(19) United States
(12) Patent Application Publication
(10) Pub. No.: US 2024/0409597 A1
(43) Pub. Date: Dec. 12, 2024

(54) MODIFIED POLYNUCLEOTIDES FOR THE PRODUCTION OF SECRETED PROTEINS

(71) Applicant: ModernaTX, Inc., Cambridge, MA (US)

(72) Inventors: Antonin DE FOUGEROLLES, Waterloo (BE); Justin GUILD, Framingham, MA (US)

(21) Appl. No.: 18/543,930

(22) Filed: Dec. 18, 2023

Related U.S. Application Data
(63) Continuation of application No. 16/920,051, filed on Jul. 2, 2020, now abandoned.
Application No. 16/920,051 is a continuation of application No. 16/438,978, filed on Jun. 12, 2019, now Pat. No. 10,703,789.
Application No. 16/438,978 is a continuation of application No. 14/987,328, filed on Jan. 4, 2016, now Pat. No. 10,385,106.
Application No. 14/987,328 is a continuation of application No. 14/750,004, filed on Jun. 25, 2015, now Pat. No. 9,828,416.
Application No. 14/750,004 is a continuation of application No. 13/791,921, filed on Mar. 9, 2013, now Pat. No. 9,192,651.
(60) Provisional application No. 61/737,155, filed on Dec. 14, 2012.
(60) Provisional application No. 61/737,152, filed on Dec. 14, 2012.
(60) Provisional application No. 61/737,147, filed on Dec. 14, 2012.
(60) Provisional application No. 61/737,139, filed on Dec. 14, 2012.
(60) Provisional application No. 61/737,135, filed on Dec. 14, 2012.
(60) Provisional application No. 61/737,134, filed on Dec. 14, 2012.
(60) Provisional application No. 61/737,130, filed on Dec. 14, 2012.
(60) Provisional application No. 61/737,203, filed on Dec. 14, 2012.
(60) Provisional application No. 61/737,191, filed on Dec. 14, 2012.
(60) Provisional application No. 61/737,184, filed on Dec. 14, 2012.
(60) Provisional application No. 61/737,174, filed on Dec. 14, 2012.
(60) Provisional application No. 61/737,168, filed on Dec. 14, 2012.
(60) Provisional application No. 61/737,160, filed on Dec. 14, 2012.
(60) Provisional application No. 61/681,742, filed on Aug. 10, 2012.
(60) Provisional application No. 61/681,667, filed on Aug. 10, 2012.
(60) Provisional application No. 61/681,675, filed on Aug. 10, 2012.
(60) Provisional application No. 61/681,687, filed on Aug. 10, 2012.
(60) Provisional application No. 61/681,696, filed on Aug. 10, 2012.
(60) Provisional application No. 61/681,704, filed on Aug. 10, 2012.
(60) Provisional application No. 61/681,645, filed on Aug. 10, 2012.
(60) Provisional application No. 61/681,647, filed on Aug. 10, 2012.
(60) Provisional application No. 61/681,648, filed on Aug. 10, 2012.
(60) Provisional application No. 61/681,649, filed on Aug. 10, 2012.
(60) Provisional application No. 61/681,650, filed on Aug. 10, 2012.
(60) Provisional application No. 61/681,654, filed on Aug. 10, 2012.
(60) Provisional application No. 61/681,658, filed on Aug. 10, 2012.
(60) Provisional application No. 61/681,661, filed on Aug. 10, 2012.
(60) Provisional application No. 61/668,157, filed on Jul. 5, 2012.
(60) Provisional application No. 61/648,286, filed on May 17, 2012.
(60) Provisional application No. 61/618,961, filed on Apr. 2, 2012.
(60) Provisional application No. 61/618,953, filed on Apr. 2, 2012.
(60) Provisional application No. 61/618,945, filed on Apr. 2, 2012.
(60) Provisional application No. 61/618,935, filed on Apr. 2, 2012.
(60) Provisional application No. 61/618,922, filed on Apr. 2, 2012.
(60) Provisional application No. 61/618,911, filed on Apr. 2, 2012.
(60) Provisional application No. 61/618,868, filed on Apr. 2, 2012.
(60) Provisional application No. 61/618,896, filed on Apr. 2, 2012.
(60) Provisional application No. 61/618,885, filed on Apr. 2, 2012.
(60) Provisional application No. 61/618,878, filed on Apr. 2, 2012.
(60) Provisional application No. 61/618,873, filed on Apr. 2, 2012.
(60) Provisional application No. 61/618,870, filed on Apr. 2, 2012.
(60) Provisional application No. 61/618,866, filed on Apr. 2, 2012.
(60) Provisional application No. 61/618,862, filed on Apr. 2, 2012.

(51) Int. Cl. C07K 14/535; A61K 9/00; A61K 9/127; A61K 9/14; A61K 9/50; A61K 31/7088; A61K 38/17; A61K 38/18; A61K 38/19; A61K 38/21; A61K 38/36; A61K 38/44; A61K 38/48; A61K 39/395; A61K 47/10; A61K 47/54; A61K 48/00; C07K 14/47; C07K 14/475; C07K 14/505; C07K 14/525; C07K 14/56; C07K 14/565; C07K 14/745; C07K 14/75; C07K 16/28; C07K 16/32; C07K 19/00; C12N 9/02; C12N 9/64; C12N 15/85; C12N 15/88

(52) U.S. Cl. CPC C07K 14/535; A61K 9/1271; A61K 9/1272; A61K 9/1277; A61K 9/14; A61K 9/5031; A61K 31/7088; A61K 38/1767; A61K 38/1816; A61K 38/1866; A61K 38/191; A61K 38/193; A61K 38/212; A61K 38/215; A61K 38/36; A61K 38/363; A61K 38/44; A61K 38/4833; A61K 38/4846; A61K 39/3955; A61K 47/10; A61K 47/54; A61K 47/542; A61K 48/0033; A61K 48/0066; A61K 48/0075; C07K 14/47; C07K 14/475; C07K 14/505; C07K 14/525; C07K 14/56; C07K 14/565; C07K 14/745; C07K 14/75; C07K 16/2887; C07K 16/32; C07K 19/00; C12N 9/0069; C12N 9/644; C12N 15/85; C12N 15/88; C12Y 113/12007; C12Y 304/21005; C12Y 304/21022; A61K 9/0019; A61K 48/00; C12N 2840/00

(57) ABSTRACT

The invention relates to compositions and methods for the preparation, manufacture and therapeutic use of polynucleotides, primary transcripts and mmRNA molecules.

### REFERENCE TO SEQUENCE LISTING

[0001] The present application is being filed along with a Sequence Listing in electronic XML format. The Sequence Listing file entitled “51165-008007_Sequence_Listing_3_8_24” was created on Mar. 8, 2024, and is 38,268,826 bytes in size. The information in electronic format of the Sequence Listing is incorporated herein by reference in its entirety.

### REFERENCE TO LENGTHY TABLE

[0002] The specification includes a lengthy Table 6. Lengthy Table 6 has been submitted via EFS-Web in electronic format as follows: File name: M304TBL.txt, Date created: Mar. 9, 2013; File size: 205,684 Bytes and is incorporated herein by reference in its entirety. Please refer to the end of the specification for access instructions.

### CROSS REFERENCE TO RELATED APPLICATIONS

[0003] This application claims priority to U.S. Provisional Patent Application No. 61/681,742, filed, Aug. 10, 2012, entitled Modified Polynucleotides for the Production of Oncology-Related Proteins and Peptides, U.S. Provisional Patent Application No. 61/737,224, filed Dec. 14, 2012, entitled Terminally Optimized Modified RNAs, International Application No PCT/US2012/069610, filed Dec. 14, 2012, entitled Modified Nucleoside, Nucleotide, and Nucleic Acid Compositions, U.S. Provisional Patent Application No. 61/618,862, filed Apr. 2, 2012, entitled Modified Polynucleotides for the Production of Biologics, U.S. Provisional Patent Application No. 61/681,645, filed Aug. 10, 2012, entitled Modified Polynucleotides for the Production of Biologics, U.S. Provisional Patent Application No. 61/737,130, filed Dec. 14, 2012, entitled Modified Polynucleotides for the Production of Biologics, U.S. Provisional Patent Application No. 61/618,866, filed Apr. 2, 2012, entitled Modified Polynucleotides for the Production of Antibodies, U.S. Provisional Patent Application No. 61/681,647, filed Aug. 10, 2012, entitled Modified Polynucleotides for the Production of Antibodies, U.S. Provisional Patent Application No. 61/737,134, filed Dec. 14, 2012, entitled Modified Polynucleotides for the Production of Antibodies, U.S. Provisional Patent Application No. 61/618,868, filed Apr. 2, 2012, entitled Modified Polynucleotides for the Production of Vaccines, U.S. Provisional Patent Application No. 61/681,648, filed Aug. 10, 2012, entitled Modified Polynucleotides for the Production of Vaccines, U.S. Provisional Patent Application No. 61/737,135, filed Dec. 14, 2012, entitled Modified Polynucleotides for the Production of Vaccines, U.S. Provisional Patent Application No. 61/618,870, filed Apr. 2, 2012, entitled Modified Polynucleotides for the Production of Therapeutic Proteins and Peptides, U.S. Provisional Patent Application No. 61/681,649, filed Aug. 10, 2012, entitled Modified Polynucleotides for the Production of Therapeutic Proteins and Peptides, U.S. Provisional Patent Application No. 61/737,139, filed Dec. 14, 2012, Modified Polynucleotides for the Production of Therapeutic Proteins and Peptides, U.S. Provisional Patent Application No. 61/618,873, filed Apr. 2, 2012, entitled Modified Polynucleotides for the Production of Secreted Proteins, U.S. Provisional Patent Application No. 61/681,650, filed Aug. 10, 2012, entitled Modified Polynucleotides for the Production of Secreted Proteins, U.S. Provisional Patent Application No. 61/737,147, filed Dec. 14, 2012, entitled Modified Polynucleotides for the Production of Secreted Proteins, U.S. Provisional Patent Application No. 61/618,878, filed Apr. 2, 2012, entitled Modified Polynucleotides for the Production of Plasma Membrane Proteins, U.S. Provisional Patent Application No. 61/681,654, filed Aug. 10, 2012, entitled Modified Polynucleotides for the Production of Plasma Membrane Proteins, U.S. Provisional Patent Application No. 61/737,152, filed Dec. 14, 2012, entitled Modified Polynucleotides for the Production of Plasma Membrane Proteins, U.S. Provisional Patent Application No. 61/618,885, filed Apr. 2, 2012, entitled Modified Polynucleotides for the Production of Cytoplasmic and Cytoskeletal Proteins, U.S. Provisional Patent Application No. 61/681,658, filed Aug. 10, 2012, entitled Modified Polynucleotides for the Production of Cytoplasmic and Cytoskeletal Proteins, U.S. Provisional Patent Application No. 61/737,155, filed Dec. 14, 2012, entitled Modified Polynucleotides for the Production of Cytoplasmic and Cytoskeletal Proteins, U.S. Provisional Patent Application No. 61/618,896, filed Apr. 2, 2012, entitled Modified Polynucleotides for the Production of Intracellular Membrane Bound Proteins, U.S. Provisional Patent Application No. 61/668,157, filed Jul. 5, 2012, entitled Modified Polynucleotides for the Production of Intracellular Membrane Bound Proteins, U.S. Provisional Patent Application No. 61/681,661, filed Aug. 10, 2012, entitled Modified Polynucleotides for the Production of Intracellular Membrane Bound Proteins, U.S. Provisional Patent Application No 61/737,160, filed Dec. 14, 2012, entitled Modified Polynucleotides for the Production of Intracellular Membrane Bound Proteins, U.S. Provisional Patent Application No. 61/618,911, filed Apr. 2, 2012, entitled Modified Polynucleotides for the Production of Nuclear Proteins, U.S. Provisional Patent Application No. 61/681,667, filed Aug. 10, 2012, entitled Modified Polynucleotides for the Production of Nuclear Proteins, U.S. Provisional Patent Application No. 61/737,168, filed Dec. 14, 2012, entitled Modified Polynucleotides for the Production of Nuclear Proteins, U.S. Provisional Patent Application No. 61/618,922, filed Apr. 2, 2012, entitled Modified Polynucleotides for the Production of Proteins, U.S. Provisional Patent Application No. 61/681,675, filed Aug. 10, 2012, entitled Modified Polynucleotides for the Production of Proteins, U.S. Provisional Patent Application No. 61/737,174, filed Dec. 14, 2012, entitled Modified Polynucleotides for the Production of Proteins, U.S. Provisional Patent Application No. 61/618,935, filed Apr. 2, 2012, entitled Modified Polynucleotides for the Production of Proteins Associated with Human Disease, U.S. Provisional Patent Application No. 61/681,687, filed Aug. 10, 2012, entitled Modified Polynucleotides for the Production of Proteins Associated with Human Disease, U.S. Provisional Patent Application No. 61/737,184, filed Dec. 14, 2012, entitled Modified Polynucleotides for the Production of Proteins Associated with Human Disease, U.S. Provisional Patent Application No. 61/618,945, filed Apr. 2, 2012, entitled Modified Polynucleotides for the Production of Proteins Associated with Human Disease, U.S. Provisional Patent Application No. 61/681,696, filed Aug. 10, 2012, entitled Modified Polynucleotides for the Production of Proteins Associated with Human Disease, U.S. Provisional Patent Application No 61/737,191, filed Dec. 14, 2012, entitled Modified Polynucleotides for the Production of Proteins Associated with Human Disease, U.S. Provisional Patent Application No. 61/618,953, filed Apr. 2, 2012, entitled Modified Polynucleotides for the Production of Proteins Associated with Human Disease, U.S. Provisional Patent Application No. 61/681,704, filed Aug. 10, 2012, entitled Modified Polynucleotides for the Production of Proteins Associated with Human Disease, U.S. Provisional Patent Application No. 61/737,203, filed Dec. 14, 2012, entitled Modified Polynucleotides for the Production of Proteins Associated with Human Disease, U.S. Provisional Patent Application No. 61/618,961, filed Apr. 2, 2012, entitled Dosing Methods for Modified mRNA, U.S. Provisional Patent Application No. 61/648,286, filed May 17, 2012, entitled Dosing Methods for Modified mRNA, the contents of each of which are herein incorporated by reference in its entirety.

[0004] This application is also related to International Publication No. PCT/US2012/58519, filed Oct. 3, 2012, entitled Modified Nucleosides, Nucleotides, and Nucleic Acids, and Uses Thereof and International Publication No. PCT/US2012/69610, filed Dec. 14, 2012, entitled Modified Nucleoside, Nucleotide, and Nucleic Acid Compositions.

[0005] The instant application is also related to co-pending applications, each filed concurrently herewith on Mar. 9, 2013 and having Attorney Docket Number M300.20, (PCT/US13/XXXXX), entitled Modified Polynucleotides for the Production of Biologics and Proteins Associated with Human Disease; Attorney Docket Number M301.20 (PCT/US13/XXXXX), entitled Modified Polynucleotides for the Production Proteins; Attorney Docket Number M305.20 (PCT/US13/XXXXX), entitled Modified Polynucleotides for the Production of Membrane Proteins; Attorney Docket Number M306.20 (PCT/US13/XXXXX), entitled Modified Polynucleotides for the Production of Cytoplasmic and Cytoskeletal Proteins; Attorney Docket Number M308.20 (PCT/US13/XXXXX), entitled Modified Polynucleotides for the Production of Nuclear Proteins; Attorney Docket Number M309.20 (PCT/US13/XXXXX), entitled Modified Polynucleotides for the Production of Proteins; Attorney Docket Number M310.20 (PCT/US13/XXXXX), entitled Modified Polynucleotides for the Production of Proteins Associated with Human Disease; Attorney Docket Number MNC1.20 (PCT/US13/XXXXX), entitled Modified Polynucleotides for the Production of Cosmetic Proteins and Peptides and Attorney Docket Number MNC2.20 (PCT/US13/XXXXX), entitled Modified Polynucleotides for the Production of Oncology-Related Proteins and Peptides, the contents of each of which are herein incorporated by reference in its entirety.

### FIELD OF THE INVENTION

[0006] The invention relates to compositions, methods, processes, kits and devices for the design, preparation, manufacture and/or formulation of polynucleotides, primary constructs and modified mRNA molecules (mmRNA).

### BACKGROUND OF THE INVENTION

[0007] There are multiple problems with prior methodologies of effecting protein expression. For example, introduced DNA can integrate into host cell genomic DNA at some frequency, resulting in alterations and/or damage to the host cell genomic DNA. Alternatively, the heterologous deoxyribonucleic acid (DNA) introduced into a cell can be inherited by daughter cells (whether or not the heterologous DNA has integrated into the chromosome) or by offspring.

[0008] In addition, assuming proper delivery and no damage or integration into the host genome, there are multiple steps which must occur before the encoded protein is made. Once inside the cell, DNA must be transported into the nucleus where it is transcribed into RNA. The RNA transcribed from DNA must then enter the cytoplasm where it is translated into protein. Not only do the multiple processing steps from administered DNA to protein create lag times before the generation of the functional protein, each step represents an opportunity for error and damage to the cell. Further, it is known to be difficult to obtain DNA expression in cells as DNA frequently enters a cell but is not expressed or not expressed at reasonable rates or concentrations. This can be a particular problem when DNA is introduced into primary cells or modified cell lines.

[0009] In the early 1990's Bloom and colleagues successfully rescued vasopressin-deficient rats by injecting in vitro-transcribed vasopressin mRNA into the hypothalamus (Science 255: 996-998; 1992). However, the low levels of translation and the immunogenicity of the molecules hampered the development of mRNA as a therapeutic and efforts have since focused on alternative applications that could instead exploit these pitfalls, i.e. immunization with mRNAs coding for cancer antigens.

[0010] Others have investigated the use of mRNA to deliver a polypeptide of interest and shown that certain chemical modifications of mRNA molecules, particularly pseudouridine and 5-methyl-cytosine, have reduced immunostimulatory effect.

[0011] These studies are disclosed in, for example, Ribostem Limited in United Kingdom patent application serial number 0316089.2 filed on Jul. 9, 2003 now abandoned, PCT application number PCT/GB2004/002981 filed on Jul. 9, 2004 published as WO2005005622, U.S. patent application national phase entry Ser. No. 10/563,897 filed on Jun. 8, 2006 published as US20060247195 now abandoned, and European patent application national phase entry serial number EP2004743322 filed on Jul. 9, 2004 published as EP1646714 now withdrawn; Novozymes, Inc. in PCT application number PCT/US2007/88060 filed on Dec. 19, 2007 published as WO2008140615, U.S. patent application national phase entry Ser. No. 12/520,072 filed on Jul. 2, 2009 published as US20100028943 and European patent application national phase entry serial number EP2007874376 filed on Jul. 7, 2009 published as EP2104739; University of Rochester in PCT application number PCT/US2006/46120 filed on Dec. 4, 2006 published as WO2007064952 and U.S. patent application Ser. No. 11/606,995 filed on Dec. 1, 2006 published as US20070141030; BioNTech AG in European patent application serial number EP2007024312 filed Dec. 14, 2007 now abandoned, PCT application number PCT/EP2008/01059 filed on Dec. 12, 2008 published as WO2009077134, European patent application national phase entry serial number EP2008861423 filed on Jun. 2, 2010 published as EP2240572, U.S. patent application national phase entry Ser. No. 12/735,060 filed Nov. 24, 2010 published as US20110065103, German patent application serial number DE 10 2005 046 490 filed Sep. 28, 2005, PCT application PCT/EP2006/0448 filed Sep. 28, 2006 published as WO2007036366, national phase European patent EP1934345 published Mar. 21, 2012 and national phase U.S. patent application Ser. No. 11/992,638 filed Aug. 14, 2009 published as 20100129877; Immune Disease Institute Inc. in U.S. patent application Ser. No. 13/088,009 filed Apr. 15, 2011 published as US20120046346 and PCT application PCT/US2011/32679 filed Apr. 15, 2011 published as WO20110130624; Shire Human Genetic Therapeutics in U.S. patent application Ser. No. 12/957,340 filed on Nov. 20, 2010 published as US20110244026; Sequitur Inc. in PCT application PCT/US1998/019492 filed on Sep. 18, 1998 published as WO1999014346; The Scripps Research Institute in PCT application number PCT/US2010/00567 filed on Feb. 24, 2010 published as WO2010098861, and U.S. patent application national phase entry Ser. No. 13/203,229 filed Nov. 3, 2011 published as US20120053333; Ludwig-Maximillians University in PCT application number PCT/EP2010/004681 filed on Jul. 30, 2010 published as WO2011012316; Cellscript Inc. in U.S. Pat. No. 8,039,214 filed Jun. 30, 2008 and granted Oct. 18, 2011, U.S. patent application Ser. No. 12/962,498 filed on Dec. 7, 2010 published as US20110143436, 12/962,468 filed on Dec. 7, 2010 published as US20110143397, 13/237,451 filed on Sep. 20, 2011 published as US20120009649, and PCT applications PCT/US2010/59305 filed Dec. 7, 2010 published as WO2011071931 and PCT/US2010/59317 filed on Dec. 7, 2010 published as WO2011071936; The Trustees of the University of Pennsylvania in PCT application number PCT/US2006/32372 filed on Aug. 21, 2006 published as WO2007024708, and U.S. patent application national phase entry Ser. No. 11/990,646 filed on Mar. 27, 2009 published as US20090286852; Curevac GMBH in German patent application serial numbers DE10 2001 027 283.9 filed Jun. 5, 2001, DE10 2001 062 480.8 filed Dec. 19, 2001, and DE 20 2006 051 516 filed Oct. 31, 2006 all abandoned, European patent numbers EP1392341 granted Mar. 30, 2005 and EP1458410 granted Jan. 2, 2008, PCT application numbers PCT/EP2002/06180 filed Jun. 5, 2002 published as WO2002098443, PCT/EP2002/14577 filed on Dec. 19, 2002 published as WO2003051401, PCT/EP2007/09469 filed on Dec. 31, 2007 published as WO2008052770, PCT/EP2008/03033 filed on Apr. 16, 2008 published as WO2009127230, PCT/EP2006/004784 filed on May 19, 2005 published as WO2006122828, PCT/EP2008/00081 filed on Jan. 9, 2007 published as WO2008083949, and U.S. patent application Ser. No. 10/729,830 filed on Dec. 5, 2003 published as US20050032730, 10/870,110 filed on Jun. 18, 2004 published as US20050059624, 11/914,945 filed on Jul. 7, 2008 published as US20080267873, 12/446,912 filed on Oct. 27, 2009 published as US2010047261 now abandoned, Ser. No. 12/522,214 filed on Jan. 4, 2010 published as US20100189729, Ser. No. 12/787,566 filed on May 26, 2010 published as US20110077287, Ser. No. 12/787,755 filed on May 26, 2010 published as US20100239608, Ser. No. 13/185,119 filed on Jul. 18, 2011 published as US20110269950, and Ser. No. 13/106,548 filed on May 12, 2011 published as US20110311472 all of which are herein incorporated by reference in their entirety.

[0012] Notwithstanding these reports which are limited to a selection of chemical modifications including pseudouridine and 5-methyl-cytosine, there remains a need in the art for therapeutic modalities to address the myriad of barriers surrounding the efficacious modulation of intracellular translation and processing of nucleic acids encoding polypeptides or fragments thereof.

[0013] To this end, the inventors have shown that certain modified mRNA sequences have the potential as therapeutics with benefits beyond just evading, avoiding or diminishing the immune response. Such studies are detailed in published co-pending applications International Application PCT/US2011/046861 filed Aug. 5, 2011 and PCT/US2011/054636 filed Oct. 3, 2011, International Application number PCT/US2011/054617 filed Oct. 3, 2011, the contents of which are incorporated herein by reference in their entirety.

[0014] The present invention addresses this need by providing nucleic acid based compounds or polynucleotides which encode a polypeptide of interest (e.g., modified mRNA or mmRNA) and which have structural and/or chemical features that avoid one or more of the problems in the art, for example, features which are useful for optimizing formulation and delivery of nucleic acid-based therapeutics while retaining structural and functional integrity, overcoming the threshold of expression, improving expression rates, half life and/or protein concentrations, optimizing protein localization, and avoiding deleterious bio-responses such as the immune response and/or degradation pathways.

### SUMMARY OF THE INVENTION

[0015] Described herein are compositions, methods, processes, kits and devices for the design, preparation, manufacture and/or formulation of modified mRNA (mmRNA) molecules. The details of various embodiments of the invention are set forth in the description below. Other features, objects, and advantages of the invention will be apparent from the description and the drawings, and from the claims.

### BRIEF DESCRIPTION OF THE DRAWINGS

[0016] The foregoing and other objects, features and advantages will be apparent from the following description of particular embodiments of the invention, as illustrated in the accompanying drawings in which like reference characters refer to the same parts throughout the different views. The drawings are not necessarily to scale, emphasis instead being placed upon illustrating the principles of various embodiments of the invention.

[0017] FIG. 1 is a schematic of a primary construct of the present invention.

[0018] FIG. 2 illustrates lipid structures in the prior art useful in the present invention, Shown are the structures for 98N12-5 (TETA5-LAP), DLin-DMA, DLin-K-DMA (2,2-Dilioleyl-4-dimethylaminomethyl-[1,3]-dioxolane), DLin-KC2-DMA, DLin-MC3-DMA and C12-200,

[0019] FIG. 3 is a representative plasmid useful in the IVT reactions taught herein. The plasmid contains Insert 64818, designed by the instant inventors.

[0020] FIG. 4 is a gel profile of modified mRNA encapsulated in PLGA microspheres.

[0021] FIG. 5 is a histogram of Factor IX protein production PLGA formulation Factor IX modified mRNA.

[0022] FIGS. 6A-6C are histograms showing VEGF protein production in human keratinocyte cells after transfection of modified mRNA at a range of doses. FIG. 6A shows protein production after transfection of modified mRNA comprising natural nucleoside triphosphate (NTP). FIG. 6B shows protein production after transfection of modified mRNA fully modified with pseudouridine (Pseudo-U) and 5-methylcytosine(5 mC). FIG. 6C shows protein production after transfection of modified mRNA fully modified with N1-methyl-pseudouridine (N1-methyl-Pseudo-U) and 5-met hylcytosine (5 mC).

[0023] FIG. 7 is a histogram of VEGF protein production in HEK293 cells.

[0024] FIGS. 8A-8B are histograms of VEGF expression and IFN-alpha induction after transfection of VEGF modified mRNA in peripheral blood mononuclear cells (PBMC). FIG. 8A shows VEGF expression. FIG. 8B shows IFN-alpha induction.

[0025] FIG. 9 is a histogram of VEGF protein production in HeLa cells from VEGF modified mRNA.

[0026] FIG. 10 is a histogram of VEGF protein production from lipoplexed VEGF modified mRNA in mice.

[0027] FIG. 11 is a histogram of G-CSF protein production in HeLa cells from G-CSF modified mRNA.

[0028] FIG. 12 is a histogram of Factor IX protein production in HeLa cell supernatant from Factor IX modified mRNA.

[0029] FIG. 13 shows Table 8 showing the chemical faces of canonical nucleotides.

### DETAILED DESCRIPTION

[0030] It is of great interest in the fields of therapeutics, diagnostics, reagents and for biological assays to be able to deliver a nucleic acid, e.g., a ribonucleic acid (RNA) inside a cell, whether in vitro, in vivo, in situ or ex vivo, such as to cause intracellular translation of the nucleic acid and production of an encoded polypeptide of interest. Of particular importance is the delivery and function of a non-integrative polynucleotide.

[0031] Described herein are compositions (including pharmaceutical compositions) and methods for the design, preparation, manufacture and/or formulation of polynucleotides encoding one or more polypeptides of interest. Also provided are systems, processes, devices and kits for the selection, design and/or utilization of the polynucleotides encoding the polypeptides of interest described herein.

[0032] According to the present invention, these polynucleotides are preferably modified as to avoid the deficiencies of other polypeptide-encoding molecules of the art. Hence these polynucleotides are referred to as modified mRNA or mmRNA.

[0033] The use of modified polynucleotides in the fields of antibodies, viruses, veterinary applications and a variety of in vivo settings has been explored by the inventors and these studies are disclosed in for example, co-pending and co-owned United States provisional patent application Ser. No. 61/470,451 filed Mar. 31, 2011 teaching in vivo applications of mmRNA; 61/517,784 filed on Apr. 26, 2011 teaching engineered nucleic acids for the production of antibody polypeptides; 61/519,158 filed May 17, 2011 teaching veterinary applications of mmRNA technology; 61/533,537 filed on Sep. 12, 2011 teaching antimicrobial applications of mmRNA technology; 61/533,554 filed on Sep. 12, 2011 teaching viral applications of mmRNA technology, 61/542,533 filed on Oct. 3, 2011 teaching various chemical modifications for use in mmRNA technology; 61/570,690 filed on Dec. 14, 2011 teaching mobile devices for use in making or using mmRNA technology; 61/570,708 filed on Dec. 14, 2011 teaching the use of mmRNA in acute care situations; 61/576,651 filed on Dec. 16, 2011 teaching terminal modification architecture for mmRNA; 61/576,705 filed on Dec. 16, 2011 teaching delivery methods using lipidoids for mmRNA; 61/578,271 filed on Dec. 21, 2011 teaching methods to increase the viability of organs or tissues using mmRNA; 61/581,322 filed on Dec. 29, 2011 teaching mmRNA encoding cell penetrating peptides; 61/581,352 filed on Dec. 29, 2011 teaching the incorporation of cytotoxic nucleosides in mmRNA and 61/631,729 filed on Jan. 10, 2012 teaching methods of using mmRNA for crossing the blood brain barrier; all of which are herein incorporated by reference in their entirety.

[0034] Provided herein, in part, are polynucleotides, primary constructs and/or mmRNA encoding polypeptides of interest which have been designed to improve one or more of the stability and/or clearance in tissues, receptor uptake and/or kinetics, cellular access by the compositions, engagement with translational machinery, mRNA half-life, translation efficiency, immune evasion, protein production capacity, secretion efficiency (when applicable), accessibility to circulation, protein half-life and/or modulation of a cell's status, function and/or activity.

### I. Compositions of the Invention (mmRNA)

[0035] The present invention provides nucleic acid molecules, specifically polynucleotides, primary constructs and/or mmRNA which encode one or more polypeptides of interest. The term “nucleic acid,” in its broadest sense, includes any compound and/or substance that comprise a polymer of nucleotides. These polymers are often referred to as polynucleotides. Exemplary nucleic acids or polynucleotides of the invention include, but are not limited to, ribonucleic acids (RNAs), deoxyribonucleic acids (DNAs), threose nucleic acids (TNAs), glycol nucleic acids (GNAs), peptide nucleic acids (PNAs), locked nucleic acids (LNAs, including LNA having a β-D-ribo configuration, α-LNA having an α-L-ribo configuration (a diastereomer of LNA), 2-amino-LNA having a 2′-amino functionalization, and 2′-amino-α-LNA having a 2′-amino functionalization) or hybrids thereof.

[0036] In preferred embodiments, the nucleic acid molecule is a messenger RNA (mRNA). As used herein, the term “messenger RNA” (mRNA) refers to any polynucleotide which encodes a polypeptide of interest and which is capable of being translated to produce the encoded polypeptide of interest in vitro, in vivo, in situ or ex vivo.

[0037] Traditionally, the basic components of an mRNA molecule include at least a coding region, a 5′UTR, a 3′UTR, a 5′ cap and a poly-A tail. Building on this wild type modular structure, the present invention expands the scope of functionality of traditional mRNA molecules by providing polynucleotides or primary RNA constructs which maintain a modular organization, but which comprise one or more structural and/or chemical modifications or alterations which impart useful properties to the polynucleotide including, in some embodiments, the lack of a substantial induction of the innate immune response of a cell into which the polynucleotide is introduced. As such, modified mRNA molecules of the present invention are termed “mmRNA.” As used herein, a “structural” feature or modification is one in which two or more linked nucleotides are inserted, deleted, duplicated, inverted or randomized in a polynucleotide, primary construct or mmRNA without significant chemical modification to the nucleotides themselves. Because chemical bonds will necessarily be broken and reformed to effect a structural modification, structural modifications are of a chemical nature and hence are chemical modifications. However, structural modifications will result in a different sequence of nucleotides. For example, the polynucleotide “ATCG” may be chemically modified to “AT-5meC-G”. The same polynucleotide may be structurally modified from “ATCG” to “ATCCCG”. Here, the dinucleotide “CC” has been inserted, resulting in a structural modification to the polynucleotide.

mmRNA Architecture

[0038] The mmRNA of the present invention are distinguished from wild type mRNA in their functional and/or structural design features which serve to, as evidenced herein, overcome existing problems of effective polypeptide production using nucleic acid-based therapeutics.

[0039] FIG. 1 shows a representative polynucleotide primary construct 100 of the present invention. As used herein, the term “primary construct” or “primary mRNA construct” refers to a polynucleotide transcript which encodes one or more polypeptides of interest and which retains sufficient structural and/or chemical features to allow the polypeptide of interest encoded therein to be translated. Primary constructs may be polynucleotides of the invention. When structurally or chemically modified, the primary construct may be referred to as an mmRNA.

[0040] Returning to FIG. 1, the primary construct 100 here contains a first region of linked nucleotides 102 that is flanked by a first flanking region 104 and a second flaking region 106. As used herein, the “first region” may be referred to as a “coding region” or “region encoding” or simply the “first region.” This first region may include, but is not limited to, the encoded polypeptide of interest. The polypeptide of interest may comprise at its 5′ terminus one or more signal sequences encoded by a signal sequence region 103. The flanking region 104 may comprise a region of linked nucleotides comprising one or more complete or incomplete 5′ UTRs sequences. The flanking region 104 may also comprise a 5′ terminal cap 108. The second flanking region 106 may comprise a region of linked nucleotides comprising one or more complete or incomplete 3′ UTRs. The flanking region 106 may also comprise a 3′ tailing sequence 110.

[0041] Bridging the 5′ terminus of the first region 102 and the first flanking region 104 is a first operational region 105. Traditionally this operational region comprises a Start codon. The operational region may alternatively comprise any translation initiation sequence or signal including a Start codon.

[0042] Bridging the 3′ terminus of the first region 102 and the second flanking region 106 is a second operational region 107. Traditionally this operational region comprises a Stop codon. The operational region may alternatively comprise any translation initiation sequence or signal including a Stop codon. According to the present invention, multiple serial stop codons may also be used.

[0043] Generally, the shortest length of the first region of the primary construct of the present invention can be the length of a nucleic acid sequence that is sufficient to encode for a dipeptide, a tripeptide, a tetrapeptide, a pentapeptide, a hexapeptide, a heptapeptide, an octapeptide, a nonapeptide, or a decapeptide. In another embodiment, the length may be sufficient to encode a peptide of 2-30 amino acids, e.g. 5-30, 10-30, 2-25, 5-25, 10-25, or 10-20 amino acids. The length may be sufficient to encode for a peptide of at least 11, 12, 13, 14, 15, 17, 20, 25 or 30 amino acids, or a peptide that is no longer than 40 amino acids, e.g. no longer than 35, 30, 25, 20, 17, 15, 14, 13, 12, 11 or 10 amino acids. Examples of dipeptides that the polynucleotide sequences can encode or include, but are not limited to, carnosine and anserine.

[0044] Generally, the length of the first region encoding the polypeptide of interest of the present invention is greater than about 30 nucleotides in length (e.g., at least or greater than about 35, 40, 45, 50, 55, 60, 70, 80, 90, 100, 120, 140, 160, 180, 200, 250, 300, 350, 400, 450, 500, 600, 700, 800, 900, 1,000, 1,100, 1,200, 1,300, 1,400, 1,500, 1,600, 1,700, 1,800, 1900, 2,000, 2,500, and 3,000, 4,000, 5,000, 6,000, 7,000, 8,000, 9,000, 10,000, 20,000, 30,000, 40,000, 50,000, 60,000, 70,000, 80,000, 90,000 or up to and including 100,000 nucleotides). As used herein, the “first region” may be referred to as a “coding region” or “region encoding” or simply the “first region.”

[0045] In some embodiments, the polynucleotide, primary construct, or mmRNA includes from about 30 to about 100,000 nucleotides (e.g., from 30 to 50, from 30 to 100, from 30 to 250, from 30 to 500, from 30 to 1,000, from 30 to 1,500, from 30 to 3,000, from 30 to 5,000, from 30 to 7,000, from 30 to 10,000, from 30 to 25,000, from 30 to 50,000, from 30 to 70,000, from 100 to 250, from 100 to 500, from 100 to 1,000, from 100 to 1,500, from 100 to 3,000, from 100 to 5,000, from 100 to 7,000, from 100 to 10,000, from 100 to 25,000, from 100 to 50,000, from 100 to 70,000, from 100 to 100,000, from 500 to 1,000, from 500 to 1,500, from 500 to 2,000, from 500 to 3,000, from 500 to 5,000, from 500 to 7,000, from 500 to 10,000, from 500 to 25,000, from 500 to 50,000, from 500 to 70,000, from 500 to 100,000, from 1,000 to 1,500, from 1,000 to 2,000, from 1,000 to 3,000, from 1,000 to 5,000, from 1,000 to 7,000, from 1,000 to 10,000, from 1,000 to 25,000, from 1,000 to 50,000, from 1,000 to 70,000, from 1,000 to 100,000, from 1,500 to 3,000, from 1,500 to 5,000, from 1,500 to 7,000, from 1,500 to 10,000, from 1,500 to 25,000, from 1,500 to 50,000, from 1,500 to 70,000, from 1,500 to 100,000, from 2,000 to 3,000, from 2,000 to 5,000, from 2,000 to 7,000, from 2,000 to 10,000, from 2,000 to 25,000, from 2,000 to 50,000, from 2,000 to 70,000, and from 2,000 to 100,000).

[0046] According to the present invention, the first and second flanking regions may range independently from 15-1,000 nucleotides in length (e.g., greater than 30, 40, 45, 50, 55, 60, 70, 80, 90, 100, 120, 140, 160, 180, 200, 250, 300, 350, 400, 450, 500, 600, 700, 800, and 900 nucleotides or at least 30, 40, 45, 50, 55, 60, 70, 80, 90, 100, 120, 140, 160, 180, 200, 250, 300, 350, 400, 450, 500, 600, 700, 800, 900, and 1,000 nucleotides).

[0047] According to the present invention, the tailing sequence may range from absent to 500 nucleotides in length (e.g., at least 60, 70, 80, 90, 120, 140, 160, 180, 200, 250, 300, 350, 400, 450, or 500 nucleotides). Where the tailing region is a polyA tail, the length may be determined in units of or as a function of polyA Binding Protein binding. In this embodiment, the polyA tail is long enough to bind at least 4 monomers of PolyA Binding Protein. PolyA Binding Protein monomers bind to stretches of approximately 38 nucleotides. As such, it has been observed that polyA tails of about 80 nucleotides and 160 nucleotides are functional.

[0048] According to the present invention, the capping region may comprise a single cap or a series of nucleotides forming the cap. In this embodiment the capping region may be from 1 to 10, e.g. 2-9, 3-8, 4-7, 1-5, 5-10, or at least 2, or 10 or fewer nucleotides in length. In some embodiments, the cap is absent.

[0049] According to the present invention, the first and second operational regions may range from 3 to 40, e.g., 5-30, 10-20, 15, or at least 4, or 30 or fewer nucleotides in length and may comprise, in addition to a Start and/or Stop codon, one or more signal and/or restriction sequences.

Cyclic mmRNA

[0050] According to the present invention, a primary construct or mmRNA may be cyclized, or concatemerized, to generate a translation competent molecule to assist interactions between poly-A binding proteins and 5′-end binding proteins. The mechanism of cyclization or concatemerization may occur through at least 3 different routes: 1) chemical, 2) enzymatic, and 3) ribozyme catalyzed. The newly formed 5′-/3′-linkage may be intramolecular or intermolecular.

[0051] In the first route, the 5′-end and the 3′-end of the nucleic acid contain chemically reactive groups that, when close together, form a new covalent linkage between the 5′-end and the 3′-end of the molecule. The 5′-end may contain an NHS-ester reactive group and the 3′-end may contain a 3′-amino-terminated nucleotide such that in an organic solvent the 3′-amino-terminated nucleotide on the 3′-end of a synthetic mRNA molecule will undergo a nucleophilic attack on the 5′-NHS-ester moiety forming a new 5′-/3′-amide bond.

[0052] In the second route, T4 RNA ligase may be used to enzymatically link a 5′-phosphorylated nucleic acid molecule to the 3′-hydroxyl group of a nucleic acid forming a new phosphorodiester linkage. In an example reaction, 1 μg of a nucleic acid molecule is incubated at 37° C. for 1 hour with 1-10 units of T4 RNA ligase (New England Biolabs, Ipswich, MA) according to the manufacturer's protocol. The ligation reaction may occur in the presence of a split oligonucleotide capable of base-pairing with both the 5′- and 3′-region in juxtaposition to assist the enzymatic ligation reaction.

[0053] In the third route, either the 5′- or 3′-end of the cDNA template encodes a ligase ribozyme sequence such that during in vitro transcription, the resultant nucleic acid molecule can contain an active ribozyme sequence capable of ligating the 5′-end of a nucleic acid molecule to the 3′-end of a nucleic acid molecule. The ligase ribozyme may be derived from the Group I Intron, Group I Intron, Hepatitis Delta Virus, Hairpin ribozyme or may be selected by SELEX (systematic evolution of ligands by exponential enrichment). The ribozyme ligase reaction may take 1 to 24 hours at temperatures between 0 and 37° C.

mmRNA Multimers

[0054] According to the present invention, multiple distinct polynucleotides, primary constructs or mmRNA may be linked together through the 3′-end using nucleotides which are modified at the 3′-terminus. Chemical conjugation may be used to control the stoichiometry of delivery into cells. For example, the glyoxylate cycle enzymes, isocitrate lyase and malate synthase, may be supplied into HepG2 cells at a 1:1 ratio to alter cellular fatty acid metabolism. This ratio may be controlled by chemically linking polynucleotides, primary constructs or mmRNA using a 3′-azido terminated nucleotide on one polynucleotide, primary construct or mmRNA species and a C5-ethynyl or alkynyl-containing nucleotide on the opposite polynucleotide, primary construct or mmRNA species. The modified nucleotide is added post-transcriptionally using terminal transferase (New England Biolabs, Ipswich, MA) according to the manufacturer's protocol. After the addition of the 3′-modified nucleotide, the two polynucleotide, primary construct or mmRNA species may be combined in an aqueous solution, in the presence or absence of copper, to form a new covalent linkage via a click chemistry mechanism as described in the literature.

[0055] In another example, more than two polynucleotides may be linked together using a functionalized linker molecule. For example, a functionalized saccharide molecule may be chemically modified to contain multiple chemical reactive groups (SH—, NH₂—, N₃, etc . . . ) to react with the cognate moiety on a 3′-functionalized mRNA molecule (i.e., a 3′-maleimide ester, 3′-NHS-ester, alkynyl). The number of reactive groups on the modified saccharide can be controlled in a stoichiometric fashion to directly control the stoichiometric ratio of conjugated polynucleotide, primary construct or mmRNA.

mmRNA Conjugates and Combinations

[0056] In order to further enhance protein production, primary constructs or mmRNA of the present invention can be designed to be conjugated to other polynucleotides, dyes, intercalating agents (e.g. acridines), cross-linkers (e.g. psoralene, mitomycin C), porphyrins (TPPC4, texaphyrin, Sapphyrin), polycyclic aromatic hydrocarbons (e.g., phenazine, dihydrophenazine), artificial endonucleases (e.g. EDTA), alkylating agents, phosphate, amino, mercapto, PEG (e.g., PEG-40K), MPEG, [MPEG]₂, polyamino, alkyl, substituted alkyl, radiolabeled markers, enzymes, haptens (e.g. biotin), transport/absorption facilitators (e.g., aspirin, vitamin E, folic acid), synthetic ribonucleases, proteins, e.g., glycoproteins, or peptides, e.g., molecules having a specific affinity for a co-ligand, or antibodies e.g., an antibody, that binds to a specified cell type such as a cancer cell, endothelial cell, or bone cell, hormones and hormone receptors, non-peptidic species, such as lipids, lectins, carbohydrates, vitamins, cofactors, or a drug.

[0057] Conjugation may result in increased stability and/or half life and may be particularly useful in targeting the polynucleotides, primary constructs or mmRNA to specific sites in the cell, tissue or organism.

[0058] According to the present invention, the mmRNA or primary constructs may be administered with, or further encode one or more of RNAi agents, siRNAs, shRNAs, miRNAs, miRNA binding sites, antisense RNAs, ribozymes, catalytic DNA, tRNA, RNAs that induce triple helix formation, aptamers or vectors, and the like.

Bifunctional mmRNA

[0059] In one embodiment of the invention are bifunctional polynucleotides (e.g., bifunctional primary constructs or bifunctional mmRNA). As the name implies, bifunctional polynucleotides are those having or capable of at least two functions. These molecules may also by convention be referred to as multi-functional.

[0060] The multiple functionalities of bifunctional polynucleotides may be encoded by the RNA (the function may not manifest until the encoded product is translated) or may be a property of the polynucleotide itself. It may be structural or chemical. Bifunctional modified polynucleotides may comprise a function that is covalently or electrostatically associated with the polynucleotides. Further, the two functions may be provided in the context of a complex of a mmRNA and another molecule.

[0061] Bifunctional polynucleotides may encode peptides which are anti-proliferative. These peptides may be linear, cyclic, constrained or random coil. They may function as aptamers, signaling molecules, ligands or mimics or mimetics thereof. Anti-proliferative peptides may, as translated, be from 3 to 50 amino acids in length. They may be 5-40, 10-30, or approximately 15 amino acids long. They may be single chain, multichain or branched and may form complexes, aggregates or any multi-unit structure once translated.

### Noncoding Polynucleotides and Primary Constructs

[0062] As described herein, provided are polynucleotides and primary constructs having sequences that are partially or substantially not translatable, e.g., having a noncoding region. Such noncoding region may be the “first region” of the primary construct. Alternatively, the noncoding region may be a region other than the first region. Such molecules are generally not translated, but can exert an effect on protein production by one or more of binding to and sequestering one or more translational machinery components such as a ribosomal protein or a transfer RNA (tRNA), thereby effectively reducing protein expression in the cell or modulating one or more pathways or cascades in a cell which in turn alters protein levels. The polynucleotide or primary construct may contain or encode one or more long noncoding RNA (lncRNA, or lincRNA) or portion thereof, a small nucleolar RNA (sno-RNA), micro RNA (miRNA), small interfering RNA (siRNA) or Piwi-interacting RNA (piRNA).

### Polypeptides of Interest

[0063] According to the present invention, the primary construct is designed to encode one or more polypeptides of interest or fragments thereof. A polypeptide of interest may include, but is not limited to, whole polypeptides, a plurality of polypeptides or fragments of polypeptides, which independently may be encoded by one or more nucleic acids, a plurality of nucleic acids, fragments of nucleic acids or variants of any of the aforementioned. As used herein, the term “polypeptides of interest” refer to any polypeptide which is selected to be encoded in the primary construct of the present invention. As used herein, “polypeptide” means a polymer of amino acid residues (natural or unnatural) linked together most often by peptide bonds. The term, as used herein, refers to proteins, polypeptides, and peptides of any size, structure, or function. In some instances the polypeptide encoded is smaller than about 50 amino acids and the polypeptide is then termed a peptide. If the polypeptide is a peptide, it will be at least about 2, 3, 4, or at least 5 amino acid residues long. Thus, polypeptides include gene products, naturally occurring polypeptides, synthetic polypeptides, homologs, orthologs, paralogs, fragments and other equivalents, variants, and analogs of the foregoing. A polypeptide may be a single molecule or may be a multi-molecular complex such as a diner, trimer or tetramer. They may also comprise single chain or multichain polypeptides such as antibodies or insulin and may be associated or linked. Most commonly disulfide linkages are found in multichain polypeptides. The term polypeptide may also apply to amino acid polymers in which one or more amino acid residues are an artificial chemical analogue of a corresponding naturally occurring amino acid.

[0064] The term “polypeptide variant” refers to molecules which differ in their amino acid sequence from a native or reference sequence. The amino acid sequence variants may possess substitutions, deletions, and/or insertions at certain positions within the amino acid sequence, as compared to a native or reference sequence. Ordinarily, variants will possess at least about 50% identity (homology) to a native or reference sequence, and preferably, they will be at least about 80%, more preferably at least about 90% identical (homologous) to a native or reference sequence.

[0065] In some embodiments “variant mimics” are provided. As used herein, the term “variant mimic” is one which contains one or more amino acids which would mimic an activated sequence. For example, glutamate may serve as a mimic for phosphoro-threonine and/or phosphoro-serine. Alternatively, variant mimics may result in deactivation or in an inactivated product containing the mimic, e.g., phenylalanine may act as an inactivating substitution for tyrosine; or alanine may act as an inactivating substitution for serine.

[0066] “Homology” as it applies to amino acid sequences is defined as the percentage of residues in the candidate amino acid sequence that are identical with the residues in the amino acid sequence of a second sequence after aligning the sequences and introducing gaps, if necessary, to achieve the maximum percent homology. Methods and computer programs for the alignment are well known in the art. It is understood that homology depends on a calculation of percent identity but may differ in value due to gaps and penalties introduced in the calculation.

[0067] By “homologs” as it applies to polypeptide sequences means the corresponding sequence of other species having substantial identity to a second sequence of a second species.

[0068] “Analogs” is meant to include polypeptide variants which differ by one or more amino acid alterations, e.g., substitutions, additions or deletions of amino acid residues that still maintain one or more of the properties of the parent or starting polypeptide.

[0069] The present invention contemplates several types of compositions which are polypeptide based including variants and derivatives. These include substitutional, insertional, deletion and covalent variants and derivatives. The term “derivative” is used synonymously with the term “variant” but generally refers to a molecule that has been modified and/or changed in any way relative to a reference molecule or starting molecule.

[0070] As such, mmRNA encoding polypeptides containing substitutions, insertions and/or additions, deletions and covalent modifications with respect to reference sequences, in particular the polypeptide sequences disclosed herein, are included within the scope of this invention. For example, sequence tags or amino acids, such as one or more lysines, can be added to the peptide sequences of the invention (e.g., at the N-terminal or C-terminal ends). Sequence tags can be used for peptide purification or localization. Lysines can be used to increase peptide solubility or to allow for biotinylation. Alternatively, amino acid residues located at the carboxy and amino terminal regions of the amino acid sequence of a peptide or protein may optionally be deleted providing for truncated sequences. Certain amino acids (e.g., C-terminal or N-terminal residues) may alternatively be deleted depending on the use of the sequence, as for example, expression of the sequence as part of a larger sequence which is soluble, or linked to a solid support.

[0071] “Substitutional variants” when referring to polypeptides are those that have at least one amino acid residue in a native or starting sequence removed and a different amino acid inserted in its place at the same position. The substitutions may be single, where only one amino acid in the molecule has been substituted, or they may be multiple, where two or more amino acids have been substituted in the same molecule.

[0072] As used herein the term “conservative amino acid substitution” refers to the substitution of an amino acid that is normally present in the sequence with a different amino acid of similar size, charge, or polarity. Examples of conservative substitutions include the substitution of a non-polar (hydrophobic) residue such as isoleucine, valine and leucine for another non-polar residue. Likewise, examples of conservative substitutions include the substitution of one polar (hydrophilic) residue for another such as between arginine and lysine, between glutamine and asparagine, and between glycine and serine. Additionally, the substitution of a basic residue such as lysine, arginine or histidine for another, or the substitution of one acidic residue such as aspartic acid or glutamic acid for another acidic residue are additional examples of conservative substitutions. Examples of non-conservative substitutions include the substitution of a non-polar (hydrophobic) amino acid residue such as isoleucine, valine, leucine, alanine, methionine for a polar (hydrophilic) residue such as cysteine, glutamine, glutamic acid or lysine and/or a polar residue for a non-polar residue.

[0073] “Insertional variants” when referring to polypeptides are those with one or more amino acids inserted immediately adjacent to an amino acid at a particular position in a native or starting sequence. “Immediately adjacent” to an amino acid means connected to either the alpha-carboxy or alpha-amino functional group of the amino acid.

[0074] “Deletional variants” when referring to polypeptides are those with one or more amino acids in the native or starting amino acid sequence removed. Ordinarily, deletional variants will have one or more amino acids deleted in a particular region of the molecule.

[0075] “Covalent derivatives” when referring to polypeptides include modifications of a native or starting protein with an organic proteinaceous or non-proteinaceous derivatizing agent, and/or post-translational modifications. Covalent modifications are traditionally introduced by reacting targeted amino acid residues of the protein with an organic derivatizing agent that is capable of reacting with selected side-chains or terminal residues, or by harnessing mechanisms of post-translational modifications that function in selected recombinant host cells. The resultant covalent derivatives are useful in programs directed at identifying residues important for biological activity, for immunoassays, or for the preparation of anti-protein antibodies for immunoaffinity purification of the recombinant glycoprotein. Such modifications are within the ordinary skill in the art and are performed without undue experimentation.

[0076] Certain post-translational modifications are the result of the action of recombinant host cells on the expressed polypeptide. Glutaminyl and asparaginyl residues are frequently post-translationally deamidated to the corresponding glutamyl and aspartyl residues. Alternatively, these residues are deamidated under mildly acidic conditions. Either form of these residues may be present in the polypeptides produced in accordance with the present invention.

[0077] Other post-translational modifications include hydroxylation of proline and lysine, phosphorylation of hydroxyl groups of seryl or threonyl residues, methylation of the alpha-amino groups of lysine, arginine, and histidine side chains (T. E. Creighton, Proteins: Structure and Molecular Properties, W.H. Freeman & Co., San Francisco, pp. 79-86 (1983)).

[0078] “Features” when referring to polypeptides are defined as distinct amino acid sequence-based components of a molecule. Features of the polypeptides encoded by the mmRNA of the present invention include surface manifestations, local conformational shape, folds, loops, half-loops, domains, half-domains, sites, termini or any combination thereof.

[0079] As used herein when referring to polypeptides the term “surface manifestation” refers to a polypeptide based component of a protein appearing on an outermost surface.

[0080] As used herein when referring to polypeptides the term “local conformational shape” means a polypeptide based structural manifestation of a protein which is located within a definable space of the protein.

[0081] As used herein when referring to polypeptides the term “fold” refers to the resultant conformation of an amino acid sequence upon energy minimization. A fold may occur at the secondary or tertiary level of the folding process. Examples of secondary level folds include beta sheets and alpha helices. Examples of tertiary folds include domains and regions formed due to aggregation or separation of energetic forces. Regions formed in this way include hydrophobic and hydrophilic pockets, and the like.

[0082] As used herein the term “turn” as it relates to protein conformation means a bend which alters the direction of the backbone of a peptide or polypeptide and may involve one, two, three or more amino acid residues.

[0083] As used herein when referring to polypeptides the term “loop” refers to a structural feature of a polypeptide which may serve to reverse the direction of the backbone of a peptide or polypeptide. Where the loop is found in a polypeptide and only alters the direction of the backbone, it may comprise four or more amino acid residues. Oliva et al. have identified at least 5 classes of protein loops (J. Mol Biol 266 (4): 814-830; 1997). Loops may be open or closed. Closed loops or “cyclic” loops may comprise 2, 3, 4, 5, 6, 7, 8, 9, 10 or more amino acids between the bridging moieties. Such bridging moieties may comprise a cysteine-cysteine bridge (Cys-Cys) typical in polypeptides having disulfide bridges or alternatively bridging moieties may be non-protein based such as the dibromozylyl agents used herein.

[0084] As used herein when referring to polypeptides the term “half-loop” refers to a portion of an identified loop having at least half the number of amino acid resides as the loop from which it is derived. It is understood that loops may not always contain an even number of amino acid residues. Therefore, in those cases where a loop contains or is identified to comprise an odd number of amino acids, a half-loop of the odd-numbered loop will comprise the whole number portion or next whole number portion of the loop (number of amino acids of the loop/2+/−0.5 amino acids). For example, a loop identified as a 7 amino acid loop could produce half-loops of 3 amino acids or 4 amino acids (7/2=3.5+/−0.5 being 3 or 4).

[0085] As used herein when referring to polypeptides the term “domain” refers to a motif of a polypeptide having one or more identifiable structural or functional characteristics or properties (e.g., binding capacity, serving as a site for protein-protein interactions).

[0086] As used herein when referring to polypeptides the term “half-domain” means a portion of an identified domain having at least half the number of amino acid resides as the domain from which it is derived. It is understood that domains may not always contain an even number of amino acid residues. Therefore, in those cases where a domain contains or is identified to comprise an odd number of amino acids, a half-domain of the odd-numbered domain will comprise the whole number portion or next whole number portion of the domain (number of amino acids of the domain/2+/−0.5 amino acids). For example, a domain identified as a 7 amino acid domain could produce half-domains of 3 amino acids or 4 amino acids (7/2=3.5+/−0.5 being 3 or 4). It is also understood that subdomains may be identified within domains or half-domains, these subdomains possessing less than all of the structural or functional properties identified in the domains or half domains from which they were derived. It is also understood that the amino acids that comprise any of the domain types herein need not be contiguous along the backbone of the polypeptide (i.e., nonadjacent amino acids may fold structurally to produce a domain, half-domain or subdomain).

[0087] As used herein when referring to polypeptides the terms “site” as it pertains to amino acid based embodiments is used synonymously with “amino acid residue” and “amino acid side chain.” A site represents a position within a peptide or polypeptide that may be modified, manipulated, altered, derivatized or varied within the polypeptide based molecules of the present invention.

[0088] As used herein the terms “termini” or “terminus” when referring to polypeptides refers to an extremity of a peptide or polypeptide. Such extremity is not limited only to the first or final site of the peptide or polypeptide but may include additional amino acids in the terminal regions. The polypeptide based molecules of the present invention may be characterized as having both an N-terminus (terminated by an amino acid with a free amino group (NH2)) and a C-terminus (terminated by an amino acid with a free carboxyl group (COOH)). Proteins of the invention are in some cases made up of multiple polypeptide chains brought together by disulfide bonds or by non-covalent forces (multimers, oligomers). These sorts of proteins will have multiple N- and C-termini. Alternatively, the termini of the polypeptides may be modified such that they begin or end, as the case may be, with a non-polypeptide based moiety such as an organic conjugate.

[0089] Once any of the features have been identified or defined as a desired component of a polypeptide to be encoded by the primary construct or mmRNA of the invention, any of several manipulations and/or modifications of these features may be performed by moving, swapping, inverting, deleting, randomizing or duplicating. Furthermore, it is understood that manipulation of features may result in the same outcome as a modification to the molecules of the invention. For example, a manipulation which involved deleting a domain would result in the alteration of the length of a molecule just as modification of a nucleic acid to encode less than a full length molecule would.

[0090] Modifications and manipulations can be accomplished by methods known in the art such as, but not limited to, site directed mutagenesis. The resulting modified molecules may then be tested for activity using in vitro or in vivo assays such as those described herein or any other suitable screening assay known in the art.

[0091] According to the present invention, the polypeptides may comprise a consensus sequence which is discovered through rounds of experimentation. As used herein a “consensus” sequence is a single sequence which represents a collective population of sequences allowing for variability at one or more sites.

[0092] As recognized by those skilled in the art, protein fragments, functional protein domains, and homologous proteins are also considered to be within the scope of polypeptides of interest of this invention. For example, provided herein is any protein fragment (meaning a polypeptide sequence at least one amino acid residue shorter than a reference polypeptide sequence but otherwise identical) of a reference protein 10, 20, 30, 40, 50, 60, 70, 80, 90, 100 or greater than 100 amino acids in length. In another example, any protein that includes a stretch of about 20, about 30, about 40, about 50, or about 100 amino acids which are about 40%, about 50%, about 60%, about 70%, about 80%, about 90%, about 95%, or about 100% identical to any of the sequences described herein can be utilized in accordance with the invention. In certain embodiments, a polypeptide to be utilized in accordance with the invention includes 2, 3, 4, 5, 6, 7, 8, 9, 10, or more mutations as shown in any of the sequences provided or referenced herein.

### Encoded Polypeptides

[0093] The primary constructs or mmRNA of the present invention may be designed to encode polypeptides of interest selected from any of several target categories including, but not limited to, biologics, antibodies, vaccines, therapeutic proteins or peptides, cell penetrating peptides, secreted proteins, plasma membrane proteins, cytoplasmic or cytoskeletal proteins, intracellular membrane bound proteins, nuclear proteins, proteins associated with human disease, targeting moieties or those proteins encoded by the human genome for which no therapeutic indication has been identified but which nonetheless have utility in areas of research and discovery.

[0094] In one embodiment primary constructs or mmRNA may encode variant polypeptides which have a certain identity with a reference polypeptide sequence. As used herein, a “reference polypeptide sequence” refers to a starting polypeptide sequence. Reference sequences may be wild type sequences or any sequence to which reference is made in the design of another sequence. A “reference polypeptide sequence” may, e.g., be any one of SEQ ID NOs: 1827-3497 as disclosed herein, e.g., any of SEQ ID NOs 1827, 1828, 1829, 1830, 1831, 1832, 1833, 1834, 1835, 1836, 1837, 1838, 1839, 1840, 1841, 1842, 1843, 1844, 1845, 1846, 1847, 1848, 1849, 1850, 1851, 1852, 1853, 1854, 1855, 1856, 1857, 1858, 1859, 1860, 1861, 1862, 1863, 1864, 1865, 1866, 1867, 1868, 1869, 1870, 1871, 1872, 1873, 1874, 1875, 1876, 1877, 1878, 1879, 1880, 1881, 1882, 1883, 1884, 1885, 1886, 1887, 1888, 1889, 1890, 1891, 1892, 1893, 1894, 1895, 1896, 1897, 1898, 1899, 1900, 1901, 1902, 1903, 1904, 1905, 1906, 1907, 1908, 1909, 1910, 1911, 1912, 1913, 1914, 1915, 1916, 1917, 1918, 1919, 1920, 1921, 1922, 1923, 1924, 1925, 1926, 1927, 1928, 1929, 1930, 1931, 1932, 1933, 1934, 1935, 1936, 1937, 1938, 1939, 1940, 1941, 1942, 1943, 1944, 1945, 1946, 1947, 1948, 1949, 1950, 1951, 1952, 1953, 1954, 1955, 1956, 1957, 1958, 1959, 1960, 1961, 1962, 1963, 1961, 1965, 1966, 1967, 1968, 1969, 1970, 1971, 1972, 1973, 1974, 1975, 1976, 1977, 1978, 1979, 1980, 1981, 1982, 1983, 1984, 1985, 1986, 1987, 1988, 1989, 1990, 1991, 1992, 1993, 1994, 1995, 1996, 1997, 1998, 1999, 2000, 2001, 2002, 2003, 2004, 2005, 2006, 2007, 2008, 2009, 2010, 2011, 2012, 2013, 2014, 2015, 2016, 2017, 2018, 2019, 2020, 2021, 2022, 2023, 2024, 2025, 2026, 2027, 2028, 2029, 2030, 2031, 2032, 2033, 2034, 2035, 2036, 2037, 2038, 2039, 2040, 2041, 2042, 2043, 2044, 2045, 2046, 2047, 2048, 2049, 2050, 2051, 2052, 2053, 2054, 2055, 2056, 2057, 2058, 2059, 2060, 2061, 2062, 2063, 2064, 2065, 2066, 2067, 2068, 2069, 2070, 2071, 2072, 2073, 2074, 2075, 2076, 2077, 2078, 2079, 2080, 2081, 2082, 2083, 2084, 2085, 2086, 2087, 2088, 2089, 2090, 2091, 2092, 2093, 2094, 2095, 2096, 2097, 2098, 2099, 2100, 2101, 2102, 2103, 2104, 2105, 2106, 2107, 2108, 2109, 2110, 2111, 2112, 2113, 2114, 2115, 2116, 2117, 2118, 2119, 2120, 2121, 2122, 2123, 2124, 2125, 2126, 2127, 2128, 2129, 2130, 2131, 2132, 2133, 2134, 2135, 2136, 2137, 2138, 2139, 2140, 2141, 2142, 2143, 2144, 2145, 2146, 2147, 2148, 2149, 2150, 2151, 2152, 2153, 2154, 2155, 2156, 2157, 2158, 2159, 2160, 2161, 2162, 2163, 2164, 2165, 2166, 2167, 2168, 2169, 2170, 2171, 2172, 2173, 2174, 2175, 2176, 2177, 2178, 2179, 2180, 2181, 2182, 2183, 2184, 2185, 2186, 2187, 2188, 2189, 2190, 2191, 2192, 2193, 2194, 2195, 2196, 2197, 2198, 2199, 2200, 2201, 2202, 2203, 2204, 2205, 2206, 2207, 2208, 2209, 2210, 2211, 2212, 2213, 2214, 2215, 2216, 2217, 2218, 2219, 2220, 2221, 2222, 2223, 2224, 2225, 2226, 2227, 2228, 2229, 2230, 2231, 2232, 2233, 2234, 2235, 2236, 2237, 2238, 2239, 2240, 2241, 2242, 2243, 2244, 2245, 2246, 2247, 2248, 2249, 2250, 2251, 2252, 2253, 2254, 2255, 2256, 2257, 2258, 2259, 2260, 2261, 2262, 2263, 2264, 2265, 2266, 2267, 2268, 2269, 2270, 2271, 2272, 2273, 2274, 2275, 2276, 2277, 2278, 2279, 2280, 2281, 2282, 2283, 2284, 2285, 2286, 2287, 2288, 2289, 2290, 2291, 2292, 2293, 2294, 2295, 2296, 2297, 2298, 2299, 2300, 2301, 2302, 2303, 2304, 2305, 2306, 2307, 2308, 2309, 2310, 2311, 2312, 2313, 2314, 2315, 2316, 2317, 2318, 2319, 2320, 2321, 2322, 2323, 2324, 2325, 2326, 2327, 2328, 2329, 2330, 2331, 2332, 2333, 2334, 2335, 2336, 2337, 2338, 2339, 2340, 2341, 2342, 2343, 2344, 2345, 2346, 2347, 2348, 2349, 2350, 2351, 2352, 2353, 2354, 2355, 2356, 2357, 2358, 2359, 2360, 2361, 2362, 2363, 2364, 2365, 2366, 2367, 2368, 2369, 2370, 2371, 2372, 2373, 2374, 2375, 2376, 2377, 2378, 2379, 2380, 2381, 2382, 2383, 2384, 2385, 2386, 2387, 2388, 2389, 2390, 2391, 2392, 2393, 2394, 2395, 2396, 2397, 2398, 2399, 2400, 2401, 2402, 2403, 2404, 2405, 2406, 2407, 2408, 2409, 2410, 2411, 2412, 2413, 2414, 2415, 2416, 2417, 2418, 2419, 2420, 2421, 2422, 2423, 2424, 2425, 2426, 2427, 2428, 2429, 2430, 2431, 2432, 2433, 2434, 2435, 2436, 2437, 2438, 2439, 2440, 2441, 2442, 2443, 2444, 2445, 2446, 2447, 2448, 2449, 2450, 2451, 2452, 2453, 2454, 2455, 2456, 2457, 2458, 2459, 2460, 2461, 2462, 2463, 2464, 2465, 2466, 2467, 2468, 2469, 2470, 2471, 2472, 2473, 2474, 2475, 2476, 2477, 2478, 2479, 2480, 2481, 2482, 2483, 2484, 2485, 2486, 2487, 2488, 2489, 2490, 2491, 2492, 2493, 2494, 2495, 2496, 2497, 2498, 2499, 2500, 2501, 2502, 2503, 2504, 2505, 2506, 2507, 2508, 2509, 2510, 2511, 2512, 2513, 2514, 2515, 2516, 2517, 2518, 2519, 2520, 2521, 2522, 2523, 2524, 2525, 2526, 2527, 2528, 2529, 2530, 2531, 2532, 2533, 2534, 2535, 2536, 2537, 2538, 2539, 2540, 2541, 2542, 2543, 2544, 2545, 2546, 2547, 2548, 2549, 2550, 2551, 2552, 2553, 2554, 2555, 2556, 2557, 2558, 2559, 2560, 2561, 2562, 2563, 2564, 2565, 2566, 2567, 2568, 2569, 2570, 2571, 2572, 2573, 2574, 2575, 2576, 2577, 2578, 2579, 2580, 2581, 2582, 2583, 2584, 2585, 2586, 2587, 2588, 2589, 2590, 2591, 2592, 2593, 2594, 2595, 2596, 2597, 2598, 2599, 2600, 2601, 2602, 2603, 2604, 2605, 2606, 2607, 2608, 2609, 2610, 2611, 2612, 2613, 2614, 2615, 2616, 2617, 2618, 2619, 2620, 2621, 2622, 2623, 2624, 2625, 2626, 2627, 2628, 2629, 2630, 2631, 2632, 2633, 2634, 2635, 2636, 2637, 2638, 2639, 2640, 2641, 2642, 2643, 2644, 2645, 2646, 2647, 2648, 2649, 2650, 2651, 2652, 2653, 2654, 2655, 2656, 2657, 2658, 2659, 2660, 2661, 2662, 2663, 2664, 2665, 2666, 2667, 2668, 2669, 2670, 2671, 2672, 2673, 2674, 2675, 2676, 2677, 2678, 2679, 2680, 2681, 2682, 2683, 2684, 2685, 2686, 2687, 2688, 2689, 2690, 2691, 2692, 2693, 2694, 2695, 2696, 2697, 2698, 2699, 2700, 2701, 2702, 2703, 2704, 2705, 2706, 2707, 2708, 2709, 2710, 2711, 2712, 2713, 2714, 2715, 2716, 2717, 2718, 2719, 2720, 2721, 2722, 2723, 2724, 2725, 2726, 2727, 2728, 2729, 2730, 2731, 2732, 2733, 2734, 2735, 2736, 2737, 2738, 2739, 2740, 2741, 2742, 2743, 2744, 2745, 2746, 2747, 2748, 2749, 2750, 2751, 2752, 2753, 2754, 2755, 2756, 2757, 2758, 2759, 2760, 2761, 2762, 2763, 2764, 2765, 2766, 2767, 2768, 2769, 2770, 2771, 2772, 2773, 2774, 2775, 2776, 2777, 2778, 2779, 2780, 2781, 2782, 2783, 2784, 2785, 2786, 2787, 2788, 2789, 2790, 2791, 2792, 2793, 2794, 2795, 2796, 2797, 2798, 2799, 2800, 2801, 2802, 2803, 2804, 2805, 2806, 2807, 2808, 2809, 2810, 2811, 2812, 2813, 2814, 2815, 2816, 2817, 2818, 2819, 2820, 2821, 2822, 2823, 2824, 2825, 2826, 2827, 2828, 2829, 2830, 2831, 2832, 2833, 2834, 2835, 2836, 2837, 2838, 2839, 2840, 2841, 2842, 2843, 2844, 2845, 2846, 2847, 2848, 2849, 2850, 2851, 2852, 2853, 2854, 2855, 2856, 2857, 2858, 2859, 2860, 2861, 2862, 2863, 2864, 2865, 2866, 2867, 2868, 2869, 2870, 2871, 2872, 2873, 2874, 2875, 2876, 2877, 2878, 2879, 2880, 2881, 2882, 2883, 2884, 2885, 2886, 2887, 2888, 2889, 2890, 2891, 2892, 2893, 2894, 2895, 2896, 2897, 2898, 2899, 2900, 2901, 2902, 2903, 2904, 2905, 2906, 2907, 2908, 2909, 2910, 2911, 2912, 2913, 2914, 2915, 2916, 2917, 2918, 2919, 2920, 2921, 2922, 2923, 2924, 2925, 2926, 2927, 2928, 2929, 2930, 2931, 2932, 2933, 2934, 2935, 2936, 2937, 2938, 2939, 2940, 2941, 2942, 2943, 2944, 2945, 2946, 2947, 2948, 2949, 2950, 2951, 2952, 2953, 2954, 2955, 2956, 2957, 2958, 2959, 2960, 2961, 2962, 2963, 2964, 2965, 2966, 2967, 2968, 2969, 2970, 2971, 2972, 2973, 2974, 2975 2976, 2977, 2978, 2979, 2980, 2981, 2982, 2983, 2984, 2985, 2986, 2987, 2988, 2989, 2990, 2991, 2992, 2993, 2994, 2995, 2996, 2997, 2998, 2999, 3000, 3001, 3002, 3003, 3004, 3005, 3006, 3007, 3008, 3009, 3010, 3011, 3012, 3013, 3014, 3015, 3016, 3017, 3018, 3019, 3020, 3021, 3022, 3023, 3024, 3025, 3026, 3027, 3028, 3029, 3030, 3031, 3032, 3033, 3034, 3035, 3036, 3037, 3038, 3039, 3040, 3041, 3042, 3043, 3044, 3045, 3046, 3047, 3048, 3049, 3050, 3051, 3052, 3053, 3054, 3055, 3056, 3057, 3058, 3059, 3060, 3061, 3062, 3063, 3064, 3065, 3066, 3067, 3068, 3069, 3070, 3071, 3072, 3073, 3074, 3075, 3076, 3077, 3078, 3079, 3080, 3081, 3082, 3083, 3084, 3085, 3086, 3087, 3088, 3089, 3090, 3091, 3092, 3093, 3094, 3095, 3096, 3097, 3098, 3099, 3100, 3101, 3102, 3103, 3104, 3105, 3106, 3107, 3108, 3109, 3110, 3111, 3112, 3113, 3114, 3115, 3116, 3117, 3118, 3119, 3120, 3121, 3122, 3123, 3124, 3125, 3126, 3127, 3128, 3129, 3130, 3131, 3132, 3133, 3134, 3135, 3136, 3137, 3138, 3139, 3140, 3141, 3142, 3143, 3144, 3145, 3146, 3147, 3148, 3149, 3150, 3151, 3152, 3153, 3154, 3155, 3156, 3157, 3158, 3159, 3160, 3161, 3162, 3163, 3164, 3165, 3166, 3167, 3168, 3169, 3170, 3171 3172, 3173, 3174, 3175, 3176, 3177, 3178, 3179, 3180, 3181, 3182, 3183, 3184, 3185, 3186, 3187, 3188, 3189, 3190, 3191, 3192, 3193, 3194, 3195, 3196, 3197, 3198, 3199, 3200 3201, 3202, 3203 3204, 3205, 3206, 3207, 3208, 3209, 3210, 3211, 3212, 3213, 3214, 3215, 3216, 3217, 3218, 3219, 3220, 3221, 3222, 3223, 3224, 3225, 3226, 3227, 3228, 3229, 3230, 3231, 3232, 3233, 3234, 3235, 3236, 3237, 3238, 3239, 3240, 3241, 3242, 3243, 3244, 3245, 3246, 3247, 3248, 3249, 3250, 3251, 3252, 3253, 3254, 3255, 3256, 3257, 3258, 3259, 3260, 3261, 3262, 3263, 3264, 3265, 3266, 3267, 3268, 3269, 3270, 3271, 3272, 3273 3274, 3275, 3276, 3277, 3278, 3279, 3280, 3281, 3282, 3283, 3284, 3285, 3286, 3287, 3288, 3289, 3290, 3291, 3292, 3293, 3294, 3295, 3296, 3297, 3298, 3299, 3300, 3301, 3302, 3303, 3304, 3305, 3306, 3307, 3308, 3309, 3310, 3311, 3312, 3313, 3314, 3315, 3316, 3317, 3318, 3319, 3320, 3321, 3322, 3323, 3324, 3325, 3326, 3327, 3328, 3329, 3330, 3331, 3332, 3333, 3334, 3335, 3336, 3337, 3338, 3339, 3340, 3341, 3342, 3343, 3344, 3345 3346, 3347, 3348, 3349, 3350, 3351, 3352, 3353, 3354, 3355, 3356, 3357, 3358, 3359, 3360, 3361, 3362, 3363, 3364, 3365, 3366, 3367, 3368, 3369, 3370, 3371, 3372, 3373, 3374, 3375, 3376, 3377, 3378, 3379, 3380, 3381, 3382, 3383, 3384, 3385, 3386, 3387, 3388, 3389, 3390, 3391, 3392, 3393, 3394, 3395, 3396, 3397, 3398, 3399, 3400, 3401, 3402, 3403, 3404, 3405, 3406, 3407, 3408, 3409, 3410, 3411, 3412, 3413, 3414, 3415, 3416, 3417, 3418, 3419, 3420, 3421, 3422, 3423, 3424, 3425, 3426, 3427, 3428, 3429, 3430, 3431, 3432, 3433, 3434, 3435, 3436, 3437, 3438, 3439, 3440, 3441, 3442, 3443, 3444, 3445, 3446, 3447, 3448, 3449, 3450, 3451, 3452, 3453, 3454, 3455, 3456, 3457, 3458, 3459, 3460, 3461, 3462, 3463, 3464, 3465, 3466, 3467, 3468, 3469, 3470, 3471, 3472, 3473, 3474, 3475, 3476, 3477, 3478, 3479, 3480, 3481, 3482, 3483, 3484, 34185, 3486, 3487, 3488, 3489, 3490, 3491, 3492, 3493, 3494, 3495, 3496, 3497.

[0095] The term “identity” as known in the art, refers to a relationship between the sequences of two or more peptides, as determined by comparing the sequences. In the art, identity also means the degree of sequence relatedness between peptides, as determined by the number of matches between strings of two or more amino acid residues. Identity measures the percent of identical matches between the smaller of two or more sequences with gap alignments (if any) addressed by a particular mathematical model or computer program (i.e., “algorithms”). Identity of related peptides can be readily calculated by known methods. Such methods include, but are not limited to, those described in Computational Molecular Biology, Lesk, A. M., ed., Oxford University Press, New York, 1988; Biocomputing: Informatics and Genome Projects, Smith, D. W., ed., Academic Press, New York, 1993; Computer Analysis of Sequence Data, Part 1, Griffin, A. M., and Griffin, H. G., eds., Humana Press, New Jersey, 1994; Sequence Analysis in Molecular Biology, von Heinje, G., Academic Press, 1987; Sequence Analysis Primer, Gribskov, M. and Devereux, J., eds., M. Stockton Press, New York, 1991; and Carillo et al., SIAM J. Applied Math. 48, 1073 (1988).

[0096] In some embodiments, the polypeptide variant may have the same or a similar activity as the reference polypeptide. Alternatively, the variant may have an altered activity (e.g., increased or decreased) relative to a reference polypeptide. Generally, variants of a particular polynucleotide or polypeptide of the invention will have at least about 40%, 45%, 50%, 55%, 60%, 65%, 70%, 75%, 80%, 85%, 90%, 91%, 92%, 93%, 94%, 95%, 96%, 97%, 98%, 99% but less than 100% sequence identity to that particular reference polynucleotide or polypeptide as determined by sequence alignment programs and parameters described herein and known to those skilled in the art. Such tools for alignment include those of the BLAST suite (Stephen F. Altschul, Thomas L. Madden, Alejandro A. Schaffer, Jinghui Zhang, Zheng Zhang, Webb Miller, and David J. Lipman (1997), “Gapped BLAST and PSI-BLAST: a new generation of protein database search programs”, Nucleic Acids Res. 25:3389-3402.) Other tools are described herein, specifically in the definition of “Identity.”

[0097] Default parameters in the BLAST algorithm include, for example, an expect threshold of 10, Word size of 28, Match/mismatch Scores 1, -2, Gap costs Linear. Any filter can be applied as well as a selection for species specific repeats, e.g., Homo sapiens.

### Biologics

[0098] The polynucleotides, primary constructs or mmRNA disclosed herein, may encode one or more biologics. As used herein, a “biologic” is a polypeptide-based molecule produced by the methods provided herein and which may be used to treat, cure, mitigate, prevent, or diagnose a serious or life-threatening disease or medical condition. Biologics, according to the present invention include, but are not limited to, allergenic extracts (e.g. for allergy shots and tests), blood components, gene therapy products, human tissue or cellular products used in transplantation, vaccines, monoclonal antibodies, cytokines, growth factors, enzymes, thrombolytics, and immunomodulators, among others.

[0099] According to the present invention, one or more biologics currently being marketed or in development may be encoded by the polynucleotides, primary constructs or mmRNA of the present invention. While not wishing to be bound by theory, it is believed that incorporation of the encoding polynucleotides of a known biologic into the primary constructs or mmRNA of the invention will result in improved therapeutic efficacy due at least in part to the specificity, purity and/or selectivity of the construct designs.

### Antibodies

[0100] The primary constructs or mmRNA disclosed herein, may encode one or more antibodies or fragments thereof. The term “antibody” includes monoclonal antibodies (including full length antibodies which have an immunoglobulin Fc region), antibody compositions with polyepitopic specificity, multispecific antibodies (e.g., bispecific antibodies, diabodies, and single-chain molecules), as well as antibody fragments. The term “immunoglobulin” (Ig) is used interchangeably with “antibody” herein. As used herein, the term “monoclonal antibody” refers to an antibody obtained from a population of substantially homogeneous antibodies, i.e., the individual antibodies comprising the population are identical except for possible naturally occurring mutations and/or post-translation modifications (e.g., isomerizations, amidations) that may be present in minor amounts. Monoclonal antibodies are highly specific, being directed against a single antigenic site.

[0101] The monoclonal antibodies herein specifically include “chimeric” antibodies (immunoglobulins) in which a portion of the heavy and/or light chain is identical with or homologous to corresponding sequences in antibodies derived from a particular species or belonging to a particular antibody class or subclass, while the remainder of the chain(s) is(are) identical with or homologous to corresponding sequences in antibodies derived from another species or belonging to another antibody class or subclass, as well as fragments of such antibodies, so long as they exhibit the desired biological activity. Chimeric antibodies of interest herein include, but are not limited to, “primatized” antibodies comprising variable domain antigen-binding sequences derived from a non-human primate (e.g., Old World Monkey, Ape etc.) and human constant region sequences.

[0102] An “antibody fragment” comprises a portion of an intact antibody, preferably the antigen binding and/or the variable region of the intact antibody. Examples of antibody fragments include Fab, Fab′, F(ab′)₂ and Fv fragments; diabodies; linear antibodies; nanobodies; single-chain antibody molecules and multispecific antibodies formed from antibody fragments.

[0103] Any of the five classes of immunoglobulins, IgA, IgD, IgE, IgG and IgM, may be encoded by the mmRNA of the invention, including the heavy chains designated alpha, delta, epsilon, gamma and mu, respectively. Also included are polynucleotide sequences encoding the subclasses, gamma and mu. Hence any of the subclasses of antibodies may be encoded in part or in whole and include the following subclasses: IgG1, IgG2, IgG3, IgG4, IgA1 and IgA2.

[0104] According to the present invention, one or more antibodies or fragments currently being marketed or in development may be encoded by the polynucleotides, primary constructs or mmRNA of the present invention. While not wishing to be bound by theory, it is believed that incorporation into the primary constructs of the invention will result in improved therapeutic efficacy due at least in part to the specificity, purity and selectivity of the mmRNA designs.

[0105] Antibodies encoded in the polynucleotides, primary constructs or mmRNA of the invention may be utilized to treat conditions or diseases in many therapeutic areas such as, but not limited to, blood, cardiovascular, CNS, poisoning (including antivenoms), dermatology, endocrinology, gastrointestinal, medical imaging, musculoskeletal, oncology, immunology, respiratory, sensory and anti-infective.

[0106] In one embodiment, primary constructs or mmRNA disclosed herein may encode monoclonal antibodies and/or variants thereof. Variants of antibodies may also include, but are not limited to, substitutional variants, conservative amino acid substitution, insertional variants, deletional variants and/or covalent derivatives. In one embodiment, the primary construct and/or mmRNA disclosed herein may encode an immunoglobulin Fc region. In another embodiment, the primary constructs and/or mmRNA may encode a variant immunoglobulin Fc region. As a non-limiting example, the primary constructs and/or mmRNA may encode an antibody having a variant immunoglobulin Fe region as described in U.S. Pat. No. 8,217,147 herein incorporated by reference in its entirety.

### Vaccines

[0107] The primary constructs or mmRNA disclosed herein, may encode one or more vaccines. As used herein, a “vaccine” is a biological preparation that improves immunity to a particular disease or infectious agent. According to the present invention, one or more vaccines currently being marketed or in development may be encoded by the polynucleotides, primary constructs or mmRNA of the present invention. While not wishing to be bound by theory, it is believed that incorporation into the primary constructs or mmRNA of the invention will result in improved therapeutic efficacy due at least in part to the specificity, purity and selectivity of the construct designs.

[0108] Vaccines encoded in the polynucleotides, primary constructs or mmRNA of the invention may be utilized to treat conditions or diseases in many therapeutic areas such as, but not limited to, cardiovascular, CNS, dermatology, endocrinology, oncology, immunology, respiratory, and anti-infective.

### Therapeutic Proteins or Peptides

[0109] The primary constructs or mmRNA disclosed herein, may encode one or more validated or “in testing” therapeutic proteins or peptides.

[0110] According to the present invention, one or more therapeutic proteins or peptides currently being marketed or in development may be encoded by the polynucleotides, primary constructs or mmRNA of the present invention. While not wishing to be bound by theory, it is believed that incorporation into the primary constructs or mmRNA of the invention will result in improved therapeutic efficacy due at least in part to the specificity, purity and selectivity of the construct designs.

[0111] Therapeutic proteins and peptides encoded in the polynucleotides, primary constructs or mmRNA of the invention may be utilized to treat conditions or diseases in many therapeutic areas such as, but not limited to, blood, cardiovascular, CNS, poisoning (including antivenoms), dermatology, endocrinology, genetic, genitourinary, gastrointestinal, musculoskeletal, oncology, and immunology, respiratory, sensory and anti-infective.

### Cell-Penetrating Polypeptides

[0112] The primary constructs or mmRNA disclosed herein, may encode one or more cell-penetrating polypeptides. As used herein, “cell-penetrating polypeptide” or CPP refers to a polypeptide which may facilitate the cellular uptake of molecules. A cell-penetrating polypeptide of the present invention may contain one or more detectable labels. The polypeptides may be partially labeled or completely labeled throughout. The polynucleotide, primary construct or mmRNA may encode the detectable label completely, partially or not at all. The cell-penetrating peptide may also include a signal sequence. As used herein, a “signal sequence” refers to a sequence of amino acid residues bound at the amino terminus of a nascent protein during protein translation. The signal sequence may be used to signal the secretion of the cell-penetrating polypeptide.

[0113] In one embodiment, the polynucleotides, primary constructs or mmRNA may also encode a fusion protein. The fusion protein may be created by operably linking a charged protein to a therapeutic protein. As used herein, “operably linked” refers to the therapeutic protein and the charged protein being connected in such a way to permit the expression of the complex when introduced into the cell. As used herein, “charged protein” refers to a protein that carries a positive, negative or overall neutral electrical charge, Preferably, the therapeutic protein may be covalently linked to the charged protein in the formation of the fusion protein. The ratio of surface charge to total or surface amino acids may be approximately 0.1, 0.2, 0.3, 0.4, 0.5, 0.6, 0.7, 0.8 or 0.9.

[0114] The cell-penetrating polypeptide encoded by the polynucleotides, primary constructs or mmRNA may form a complex after being translated. The complex may comprise a charged protein linked, e.g. covalently linked, to the cell-penetrating polypeptide. “Therapeutic protein” refers to a protein that, when administered to a cell has a therapeutic, diagnostic, and/or prophylactic effect and/or elicits a desired biological and/or pharmacological effect.

[0115] In one embodiment, the cell-penetrating polypeptide may comprise a first domain and a second domain. The first domain may comprise a supercharged polypeptide. The second domain may comprise a protein-binding partner. As used herein, “protein-binding partner” includes, but is not limited to, antibodies and functional fragments thereof, scaffold proteins, or peptides. The cell-penetrating polypeptide may further comprise an intracellular binding partner for the protein-binding partner. The cell-penetrating polypeptide may be capable of being secreted from a cell where the polynucleotide, primary construct or mmRNA may be introduced. The cell-penetrating polypeptide may also be capable of penetrating the first cell.

[0116] In a further embodiment, the cell-penetrating polypeptide is capable of penetrating a second cell. The second cell may be from the same area as the first cell, or it may be from a different area. The area may include, but is not limited to, tissues and organs. The second cell may also be proximal or distal to the first cell.

[0117] In one embodiment, the polynucleotides, primary constructs or mmRNA may encode a cell-penetrating polypeptide which may comprise a protein-binding partner. The protein binding partner may include, but is not limited to, an antibody, a supercharged antibody or a functional fragment. The polynucleotides, primary constructs or mmRNA may be introduced into the cell where a cell-penetrating polypeptide comprising the protein-binding partner is introduced.

### Secreted Proteins

[0118] Human and other eukaryotic cells are subdivided by membranes into many functionally distinct compartments. Each membrane-bounded compartment, or organelle, contains different proteins essential for the function of the organelle. The cell uses “sorting signals,” which are amino acid motifs located within the protein, to target proteins to particular cellular organelles.

[0119] One type of sorting signal, called a signal sequence, a signal peptide, or a leader sequence, directs a class of proteins to an organelle called the endoplasmic reticulum (ER).

[0120] Proteins targeted to the ER by a signal sequence can be released into the extracellular space as a secreted protein. Similarly, proteins residing on the cell membrane can also be secreted into the extracellular space by proteolytic cleavage of a “linker” holding the protein to the membrane. While not wishing to be bound by theory, the molecules of the present invention may be used to exploit the cellular trafficking described above. As such, in some embodiments of the invention, polynucleotides, primary constructs or mmRNA are provided to express a secreted protein. The secreted proteins may be selected from those described herein or those in US Patent Publication, 20100255574, the contents of which are incorporated herein by reference in their entirety.

[0121] In one embodiment, these may be used in the manufacture of large quantities of valuable human gene products.

### Plasma Membrane Proteins

[0122] In some embodiments of the invention, polynucleotides, primary constructs or mmRNA are provided to express a protein of the plasma membrane.

### Cytoplasmic or Cytoskeletal Proteins

[0123] In some embodiments of the invention, polynucleotides, primary constructs or mmRNA are provided to express a cytoplasmic or cytoskeletal protein.

### Intracellular Membrane Bound Proteins

[0124] In some embodiments of the invention, polynucleotides, primary constructs or mmRNA are provided to express an intracellular membrane bound protein.

### Nuclear Proteins

[0125] In some embodiments of the invention, polynucleotides, primary constructs or mmRNA are provided to express a nuclear protein.

Proteins Associated with Human Disease

[0126] In some embodiments of the invention, polynucleotides, primary constructs or mmRNA are provided to express a protein associated with human disease.

### Miscellaneous Proteins

[0127] In some embodiments of the invention, polynucleotides, primary constructs or mmRNA are provided to express a protein with a presently unknowin therapeutic function.

### Targeting Moieties

[0128] In some embodiments of the invention, polynucleotides, primary constructs or mmRNA are provided to express a targeting moiety. These include a protein-binding partner or a receptor on the surface of the cell, which functions to target the cell to a specific tissue space or to interact with a specific moiety, either in vivo or in vitro. Suitable protein-binding partners include, but are not limited to, antibodies and functional fragments thereof, scaffold proteins, or peptides. Additionally, polynucleotide, primary construct or mmRNA can be employed to direct the synthesis and extracellular localization of lipids, carbohydrates, or other biological moieties or biomolecules.

### Polypeptide Libraries

[0129] In one embodiment, the polynucleotides, primary constructs or mmRNA may be used to produce polypeptide libraries. These libraries may arise from the production of a population of polynucleotides, primary constructs or mmRNA, each containing various structural or chemical modification designs. In this embodiment, a population of polynucleotides, primary constructs or mmRNA may comprise a plurality of encoded polypeptides, including but not limited to, an antibody or antibody fragment, protein binding partner, scaffold protein, and other polypeptides taught herein or known in the art. In a preferred embodiment, the polynucleotides are primary constructs of the present invention, including mmRNA which may be suitable for direct introduction into a target cell or culture which in turn may synthesize the encoded polypeptides.

[0130] In certain embodiments, multiple variants of a protein, each with different amino acid modification(s), may be produced and tested to determine the best variant in terms of pharmacokinetics, stability, biocompatibility, and/or biological activity, or a biophysical property such as expression level. Such a library may contain 10, 10², 10³, 10⁴, 10⁵, 10⁶, 10⁷, 10⁸, 10⁹, or over 10⁹ possible variants (including, but not limited to, substitutions, deletions of one or more residues, and insertion of one or more residues).

### Anti-Microbial and Anti-Viral Polypeptides

[0131] The polynucleotides, primary constructs and mmRNA of the present invention may be designed to encode on or more antimicrobial peptides (AMP) or antiviral peptides (AVP). AMPs and AVPs have been isolated and described from a wide range of animals such as, but not limited to, microorganisms, invertebrates, plants, amphibians, birds, fish, and mammals (Wang et al., Nucleic Acids Res. 2009; 37 (Database issue):D933-7). For example, anti-microbial polypeptides are described in Antimicrobial Peptide Database (http://aps.unmc.edu/AP/main.php; Wang et al., Nicleic Acids Res. 2009; 37 (Database issue):D933-7), CAMP: Collection of Anti-Microbial Peptides (http://www.bicnirrh.res.in/antimicrobial/); Thomas et al., Nucleic Acids Res. 2010; 38 (Database issue): D774-80), U.S. Pat. Nos. 5,221,732, 5,447,914, 5,519,115, 5,607,914, 5,714,577, 5,734,015, 5,798,336, 5,821,224, 5,849,490, 5,856,127, 5,905,187, 5,994,308, 5,998,374, 6,107,460, 6,191,254, 6,211,148, 6,300,489, 6,329,504, 6,399,370, 6,476,189, 6,478,825, 6,492,328, 6,514,701, 6,573,361, 6,573,361, 6,576,755, 6,605,698, 6,624,140, 6,638,531, 6,642,203, 6,653,280, 6,696,238, 6,727,066, 6,730,659, 6,743,598, 6,743,769, 6,747,007, 6,790,833, 6,794,490, 6,818,407, 6,835,536, 6,835,713, 6,838,435, 6,872,705, 6,875,907, 6,884,776, 6,887,847, 6,906,035, 6,911,524, 6,936,432, 7,001,924, 7,071,293, 7,078,380, 7,091,185, 7,094,759, 7,166,769, 7,244,710, 7,314,858, and 7,582,301, the contents of which are incorporated by reference in their entirety.

[0132] The anti-microbial polypeptides described herein may block cell fusion and/or viral entry by one or more enveloped viruses (e.g., HIV, HCV). For example, the anti-microbial polypeptide can comprise or consist of a synthetic peptide corresponding to a region, e.g., a consecutive sequence of at least about 5, 10, 15, 20, 25, 30, 35, 40, 45, 50, 55, or 60 amino acids of the transmembrane subunit of a viral envelope protein, e.g., HIV-1 gp120 or gp41. The amino acid and nucleotide sequences of HIV-1 gp120 or gp41 are described in, e.g., Kuiken et al., (2008). “HIV Sequence Compendium,” Los Alamos National Laboratory.

[0133] In some embodiments, the anti-microbial polypeptide may have at least about 75%, 80%, 85%, 90%, 95%, 100% sequence horology to the corresponding viral protein sequence. In some embodiments, the anti-microbial polypeptide may have at least about 75%, 80%, 85%, 90%, 95%, or 100% sequence homology to the corresponding viral protein sequence.

[0134] In other embodiments, the anti-microbial polypeptide may comprise or consist of a synthetic peptide corresponding to a region, e.g., a consecutive sequence of at least about 5, 10, 15, 20, 25, 30, 35, 40, 45, 50, 55, or 60 amino acids of the binding domain of a capsid binding protein. In some embodiments, the anti-microbial polypeptide may have at least about 75%, 80%, 85%, 90%, 95%, or 100% sequence homology to the corresponding sequence of the capsid binding protein.

[0135] The anti-microbial polypeptides described herein may block protease dimerization and inhibit cleavage of viral proproteins (e.g., HIV Gag-pol processing) into functional proteins thereby preventing release of one or more enveloped viruses (e.g., HIV, HCV). In some embodiments, the anti-microbial polypeptide may have at least about 75%, 80%, 85%, 90%, 95%, 100% sequence homology to the corresponding viral protein sequence.

[0136] In other embodiments, the anti-microbial polypeptide can comprise or consist of a synthetic peptide corresponding to a region, e.g., a consecutive sequence of at least about 5, 10, 15, 20, 25, 30, 35, 40, 45, 50, 55, or 60 amino acids of the binding domain of a protease binding protein. In some embodiments, the anti-microbial polypeptide may have at least about 75%, 80%, 85%, 90%, 95%, 100% sequence homology to the corresponding sequence of the protease binding protein.

[0137] The anti-microbial polypeptides described herein can include an in vitro-evolved polypeptide directed against a viral pathogen.

### Anti-Microbial Poly Peptides

[0138] Anti-microbial polypeptides (AMPs) are small peptides of variable length, sequence and structure with broad spectrum activity against a wide range of microorganisms including, but not limited to, bacteria, viruses, fungi, protozoa, parasites, prions, and tumor/cancer cells. (See, e.g., Zaiou, J Mol Med, 2007; 85:317; herein incorporated by reference in its entirety). It has been shown that AMPs have broad-spectrum of rapid onset of killing activities, with potentially low levels of induced resistance and concomitant broad anti-inflammatory effects.

[0139] In some embodiments, the anti-microbial polypeptide (e.g., an anti-bacterial polypeptide) may be under 10 kDa, e.g., under 8 kDa, 6 kDa, 4 kDa, 2 kDa, or 1 kDa. In some embodiments, the anti-microbial polypeptide (e.g., an anti-bacterial polypeptide) consists of from about 6 to about 100 amino acids, e.g., from about 6 to about 75 amino acids, about 6 to about 50 amino acids, about 6 to about 25 amino acids, about 25 to about 100 amino acids, about 50 to about 100 amino acids, or about 75 to about 100 amino acids. In certain embodiments, the anti-microbial polypeptide (e.g., an anti-bacterial polypeptide) may consist of from about 15 to about 45 amino acids. In some embodiments, the anti-microbial polypeptide (e.g., an anti-bacterial polypeptide) is substantially cationic.

[0140] In some embodiments, the anti-microbial polypeptide (e.g., an anti-bacterial polypeptide) may be substantially amphipathic. In certain embodiments, the anti-microbial polypeptide (e.g., an anti-bacterial polypeptide) may be substantially cationic and amphipathic. In some embodiments, the anti-microbial polypeptide (e.g., an anti-bacterial polypeptide) may be cytostatic to a Gram-positive bacterium. In some embodiments, the anti-microbial polypeptide (e.g., an anti-bacterial polypeptide) may be cytotoxic to a Gram-positive bacterium. In some embodiments, the anti-microbial polypeptide (e.g., an anti-bacterial polypeptide) may be cytostatic and cytotoxic to a Gram-positive bacterium. In some embodiments, the anti-microbial polypeptide (e.g. an anti-bacterial polypeptide) may be cytostatic to a Gram-negative bacterium. In some embodiments, the anti-microbial polypeptide (e.g., an anti-bacterial polypeptide) may be cytotoxic to a Gram-negative bacterium. In some embodiments, the anti-microbial polypeptide (e.g., an anti-bacterial polypeptide) may be cytostatic and cytotoxic to a Gram-positive bacterium. In some embodiments, the anti-microbial polypeptide may be cytostatic to a virus, fungus, protozoan, parasite, prion, or a combination thereof. In some embodiments, the anti-microbial polypeptide may be cytotoxic to a virus, fungus, protozoan, parasite, prion, or a combination thereof. In certain embodiments, the anti-microbial polypeptide may be cytostatic and cytotoxic to a virus, fungus, protozoan, parasite, prion, or a combination thereof. In some embodiments, the anti-microbial polypeptide may be cytotoxic to a tumor or cancer cell (e.g., a human tumor and/or cancer cell). In some embodiments, the anti-microbial polypeptide may be cytostatic to a tumor or cancer cell (e.g., a human tumor and/or cancer cell). In certain embodiments, the anti-microbial polypeptide may be cytotoxic and cytostatic to a tumor or cancer cell (e.g., a human tumor or cancer cell). In some embodiments, the anti-microbial polypeptide (e.g., an anti-bacterial polypeptide) may be a secreted polypeptide.

[0141] In some embodiments, the anti-microbial polypeptide comprises or consists of a defensin. Exemplary defensins include, but are not limited to, C-defensins (e.g., neutrophil defensin 1, defensin alpha 1, neutrophil defensin 3, neutrophil defensin 4, defensin 5, defensin 6), β-defensins (e.g., beta-defensin 1, beta-defensin 2, beta-defensin 103, beta-defensin 107, beta-defensin 110, beta-defensin 136), and θ-defensins. In other embodiments, the anti-microbial polypeptide comprises or consists of a cathelicidin (e.g., hCAP18).

### Anti-Viral Polypeptides

[0142] Anti-viral polypeptides (AVPs) are small peptides of variable length, sequence and structure with broad spectrum activity against a wide range of viruses. See, e.g., Zaiou, J Mol Med, 2007; 85:317. It has been shown that AVPs have a broad-spectrum of rapid onset of killing activities, with potentially low levels of induced resistance and concomitant broad anti-inflammatory effects. In some embodiments, the anti-viral polypeptide is under 10 kDa, e.g., under 8 kDa, 6 kDa, 4 kDa, 2 kDa, or 1 kDa. In some embodiments, the anti-viral polypeptide comprises or consists of from about 6 to about 100 amino acids, e.g., from about 6 to about 75 amino acids, about 6 to about 50 amino acids, about 6 to about 25 amino acids, about 25 to about 100 amino acids, about 50 to about 100 amino acids, or about 75 to about 100 amino acids. In certain embodiments, the anti-viral polypeptide comprises or consists of from about 15 to about 45 amino acids. In some embodiments, the anti-viral polypeptide is substantially cationic. In some embodiments, the anti-viral polypeptide is substantially amphipathic. In certain embodiments, the anti-viral polypeptide is substantially cationic and amphipathic. In some embodiments, the anti-viral polypeptide is cytostatic to a virus. In some embodiments, the anti-viral polypeptide is cytotoxic to a virus. In some embodiments, the anti-viral polypeptide is cytostatic and cytotoxic to a virus. In some embodiments, the anti-viral polypeptide is cytostatic to a bacterium, fungus, protozoan, parasite, prion, or a combination thereof. In some embodiments, the anti-viral polypeptide is cytotoxic to a bacterium, fungus, protozoan, parasite, prion or a combination thereof. In certain embodiments, the anti-viral polypeptide is cytostatic and cytotoxic to a bacterium, fungus, protozoan, parasite, prion, or a combination thereof. In some embodiments, the anti-viral polypeptide is cytotoxic to a tumor or cancer cell (e.g., a human cancer cell). In some embodiments, the anti-viral polypeptide is cytostatic to a tumor or cancer cell (e.g., a human cancer cell). In certain embodiments, the anti-viral polypeptide is cytotoxic and cytostatic to a tumor or cancer cell (e.g., a human cancer cell). In some embodiments, the anti-viral polypeptide is a secreted polypeptide.

### Cytotoxic Nucleosides

[0143] In one embodiment, the polynucleotides, primary constructs or mmRNA of the present invention may incorporate one or more cytotoxic nucleosides. For example, cytotoxic nucleosides may be incorporated into polynucleotides, primary constructs or mmRNA such as bifunctional modified RNAs or mRNAs. Cytotoxic nucleoside anticancer agents include, but are not limited to, adenosine arabinoside, cytarabine, cytosine arabinoside, 5-fluorouracil, fludarabine, floxuridine, FTORAFUR● (a combination of tegafur and uracil), tegafur ((RS)-5-fluoro-1-(tetrahydrofuran-2-yl)pyrimidine-2,4(1H,3H)-dione), and 6-mercaptopurine.

[0144] A number of cytotoxic nucleoside analogues are in clinical use, or have been the subject of clinical trials, as anticancer agents. Examples of such analogues include, but are not limited to, cytarabine, gemcitabine, troxacitabine, decitabine, tezacitabine, 2′-deoxy-2′-methylidenecytidine (DMDC), cladribine, clofarabine, 5-azacytidine, 4′-thio-aracytidine, cyclopentenylcytosine and 1-(2-C-cyano-2-deoxy-beta-D-arabino-pentofuranosyl)-cytosine. Another example of such a compound is fludarabine phosphate. These compounds may be administered systemically and may have side effects which are typical of cytotoxic agents such as, but not limited to, little or no specificity for tumor cells over proliferating normal cells.

[0145] A number of prodrugs of cytotoxic nucleoside analogues are also reported in the art. Examples include, but are not limited to, N4-behenoyl-1-beta-D-arabinofuranosylcytosine, N4-octadecyl-1-beta-D-arabinofuranosylcytosine, N4-palmitoyl-1-(2-C-cyano-2-deoxy-beta-D-arabino-pentofuranosyl) cytosine, and P-4055 (cytarabine 5′-elaidic acid ester). In general, these prodrugs may be converted into the active drugs mainly in the liver and systemic circulation and display little or no selective release of active drug in the tumor tissue. For example, capecitabine, a prodrug of 5′-deoxy-5-fluorocytidine (and eventually of 5-fluorouracil), is metabolized both in the liver and in the tumor tissue. A series of capecitabine analogues containing “an easily hydrolysable radical under physiological conditions” has been claimed by Fujiu et al. (U.S. Pat. No. 4,966,891) and is herein incorporated by reference. The series described by Fujiu includes N4 alkyl and aralkyl carbamates of 5′-deoxy-5-fluorocytidine and the implication that these compounds will be activated by hydrolysis under normal physiological conditions to provide 5′-deoxy-5-fluorocytidine.

[0146] A series of cytarabine N4-carbamates has been by reported by Fadl et al (Pharmazie. 1995, 50, 382-7, herein incorporated by reference) in which compounds were designed to convert into cytarabine in the liver and plasma. WO 2004/041203, herein incorporated by reference, discloses prodrugs of gemcitabine, where some of the prodrugs are N4-carbamates. These compounds were designed to overcome the gastrointestinal toxicity of gemcitabine and were intended to provide gemcitabine by hydrolytic release in the liver and plasma after absorption of the intact prodrug from the gastrointestinal tract. Nomura et al (Bioorg Med. Chem. 2003, 11, 2453-61, herein incorporated by reference) have described acetal derivatives of 1-(3-C-ethynyl-β-D-ribo-pentofaranosyl) cytosine which, on bioreduction, produced an intermediate that required further hydrolysis under acidic conditions to produce a cytotoxic nucleoside compound.

[0147] Cytotoxic nucleotides which may be chemotherapeutic also include, but are not limited to, pyrazolo[3,4-D]-pyrimidines, allopurinol, azathioprine, capecitabine, cytosine arabinoside, fluorouracil, mercaptopurine, 6-thioguanine, acyclovir, ara-adenosine, ribavirin, 7-deaza-adenosine, 7-deaza-guanosine, 6-aza-uracil, 6-aza-cytidine, thymidine ribonucleotide, 5-bromodeoxyuridine, 2-chloro-purine, and inosine, or combinations thereof.

### Flanking Regions: Untranslated Regions (UTRs)

[0148] Untranslated regions (UTRs) of a gene are transcribed but not translated. The 5′UTR starts at the transcription start site and continues to the start codon but does not include the start codon; whereas, the 3′UTR starts immediately following the stop codon and continues until the transcriptional termination signal. There is growing body of evidence about the regulatory roles played by the UTRs in terms of stability of the nucleic acid molecule and translation. The regulatory features of a UTR can be incorporated into the polynucleotides, primary constructs and/or mmRNA of the present invention to enhance the stability of the molecule. The specific features can also be incorporated to ensure controlled down-regulation of the transcript in case they are misdirected to undesired organs sites.

### 5′ UTR and Translation Initiation

[0149] Natural 5′UTRs bear features which play roles in for translation initiation. They harbor signatures like Kozak sequences which are commonly known to be involved in the process by which the ribosome initiates translation of many genes. Kozak sequences have the consensus CCR(A/G)CCAUGG, where R is a purine (adenine or guanine) three bases upstream of the start codon (AUG), which is followed by another ‘G.’ 5′UTR also have been known to form secondary structures which are involved in elongation factor binding.

[0150] By engineering the features typically found in abundantly expressed genes of specific target organs, one can enhance the stability and protein production of the polynucleotides, primary constructs or mmRNA of the invention. For example, introduction of 5′ UTR of liver-expressed mRNA, such as albumin, serum amyloid A, Apolipoprotein A/B/E, transferrin, alpha fetoprotein, erythropoietin, or Factor VIII, could be used to enhance expression of a nucleic acid molecule, such as a mmRNA, in hepatic cell lines or liver. Likewise, use of 5′ UTR from other tissue-specific mRNA to improve expression in that tissue is possible for muscle (MyoD, Myosin, Myoglobin, Myogenin, Herculin), for endothelial cells (Tie-1, CD36), for myeloid cells (C/EBP, AML1, G-CSF, GM-CSF, CD11b, MSR, Fr-1, i-NOS), for leukocytes (C145, CD18), for adipose tissue (CD36, GLUT4, ACRP30, adiponectin) and for lung epithelial cells (SP-A/B/C/D).

[0151] Other non-UTR sequences may be incorporated into the 5′ (or 3′ UTR) UTRs. For example, introns or portions of introns sequences may be incorporated into the flanking regions of the polynucleotides, primary constructs or mmRNA of the invention. Incorporation of intronic sequences may increase protein production as well as mRNA levels.

### 3′ UTR and the AU Rich Elements

[0152] 3′ UTRs are known to have stretches of Adenosines and Uridines embedded in them. These AU rich signatures are particularly prevalent in genes with high rates of turnover. Based on their sequence features and functional properties, the AU rich elements (AREs) can be separated into three classes (Chen et al, 1995): Class I AREs contain several dispersed copies of an AUUUA motif within U-rich regions. C-Myc and MyoD contain class I AREs. Class II AREs possess two or more overlapping UUAUUUA(U/A)(U/A) nonamers. Molecules containing this type of AREs include GM-CSF and TNF-a. Class III ARES are less well defined. These U rich regions do not contain an ALUUUA motif. c-Jun and Myogenin are two well-studied examples of this class. Most proteins binding to the AREs are known to destabilize the messenger, whereas members of the ELAV family, most notably HuR, have been documented to increase the stability of mRNA. HuR binds to AREs of all the three classes. Engineering the HuR specific binding sites into the 3′ UTR of nucleic acid molecules will lead to HuR binding and thus, stabilization of the message in vivo.

[0153] Introduction, removal or modification of 3′ UTR AU rich elements (AREs) can be used to modulate the stability of polynucleotides, primary constructs or mmRNA of the invention. When engineering specific polynucleotides, primary constructs or mmRNA, one or more copies of an ARE can be introduced to make polynucleotides, primary constructs or mmRNA of the invention less stable and thereby curtail translation and decrease production of the resultant protein. Likewise, AREs can be identified and removed or mutated to increase the intracellular stability and thus increase translation and production of the resultant protein. Transfection experiments can be conducted in relevant cell lines, using polynucleotides, primary constructs or mmRNA of the invention and protein production can be assayed at various time points post-transfection. For example, cells can be transfected with different ARE-engineering molecules and by using an ELISA kit to the relevant protein and assaying protein produced at 6 hour, 12 hour, 24 hour, 48 hour, and 7 days post-transfection.

Incorporating microRNA Binding Sites

[0154] microRNAs (or miRNA) are 19-25 nucleotide long noncoding RNAs that bind to the 3′UTR of nucleic acid molecules and down-regulate gene expression either by reducing nucleic acid molecule stability or by inhibiting translation. The polynucleotides, primary constructs or mmRNA of the invention may comprise one or more microRNA target sequences, microRNA sequences, or microRNA seeds. Such sequences may correspond to any known microRNA such as those taught in US Publication US2005/0261218 and US Publication US2005/0059005, the contents of which are incorporated herein by reference in their entirety.

[0155] A microRNA sequence comprises a “seed” region, i.e., a sequence in the region of positions 2-8 of the mature microRNA, which sequence has perfect Watson-Crick complementarity to the miRNA target sequence. A microRNA seed may comprise positions 2-8 or 2-7 of the mature microRNA. In some embodiments, a microRNA seed may comprise 7 nucleotides (e.g., nucleotides 2-8 of the mature microRNA), wherein the seed-complementary site in the corresponding miRNA target is flanked by an adenine (A) opposed to microRNA position 1. In some embodiments, a microRNA seed may comprise 6 nucleotides (e.g., nucleotides 2-7 of the mature microRNA), wherein the seed-complementary site in the corresponding miRNA target is flanked byan adenine (A) opposed to microRNA position 1. See for example, Grimson A, Farh K K, Johnston W K, Garrett-Engele P, Lim L P, Bartel D P; Mol Cell. 2007 Jul. 6; 27(1):91-105; each of which is herein incorporated by reference in their entirety. The bases of the microRNA seed have complete complementarity with the target sequence. By engineering microRNA target sequences into the 3′UTR of polynucleotides, primary constructs or mmRNA of the invention one can target the molecule for degradation or reduced translation, provided the microRNA in question is available. This process will reduce the hazard of off target effects upon nucleic acid molecule delivery. Identification of microRNA, microRNA target regions, and their expression patterns and role in biology have been reported (Bonauer et al., Curr Drug Targets 2010 11:943-949; Anand and Cheresh Curr Opin Hematol 2011 18:171-176; Contreras and Rao Leukemia 2012 26:404-413 (2011 Dec. 20. doi: 10.1038/leu.2011.356); Bartel Cell 2009 136:215-233; Landgraf et al, Cell, 2007 129:1401-1414; each of which is herein incorporated by reference in its entirety).

[0156] For example, if the nucleic acid molecule is an mRNA and is not intended to be delivered to the liver but ends up there, then miR-122, a microRNA abundant in liver, can inhibit the expression of the gene of interest if one or multiple target sites of miR-122 are engineered into the 3′ UTR of the polynucleotides, primary constructs or mmRNA. Introduction of one or multiple binding sites for different microRNA can be engineered to further decrease the longevity, stability, and protein translation of a polynucleotides, primary constructs or mmRNA.

[0157] As used herein, the term “microRNA site” refers to a microRNA target site or a microRNA recognition site, or any nucleotide sequence to which a microRNA binds or associates. It should be understood that “binding” may follow traditional Watson-Crick hybridization rules or may reflect any stable association of the microRNA with the target sequence at or adjacent to the microRNA site.

[0158] Conversely, for the purposes of the polynucleotides, primary constructs or mmRNA of the present invention, microRNA binding sites can be engineered out of (i.e. removed from) sequences in which they naturally occur in order to increase protein expression in specific tissues. For example, miR-122 binding sites may be removed to improve protein expression in the liver. Regulation of expression in multiple tissues can be accomplished through introduction or removal or one or several microRNA binding sites.

[0159] Examples of tissues where microRNA are known to regulate mRNA, and thereby protein expression, include, but are not limited to, liver (miR-122), muscle (miR-133, miR-206, miR-208), endothelial cells (miR-17-92, miR-126), myeloid cells (miR-142-3p, miR-142-5p, miR-16, miR-21, miR-223, miR-24, miR-27), adipose tissue (let-7, miR-30c), heart (miR-1d, miR-149), kidney (miR-192, miR-194, miR-204), and lung epithelial cells (let-7, miR-133, miR-126). MicroRNA can also regulate complex biological processes such as angiogenesis (miR-132) (Anand and Cheresh Curr Opin Hematol 2011 18:171-176; herein incorporated by reference in its entirety). In the polynucleotides, primary constructs or mmRNA of the present invention, binding sites for microRNAs that are involved in such processes may be removed or introduced, in order to tailor the expression of the polynucleotides, primary constructs or mmRNA expression to biologically relevant cell types or to the context of relevant biological processes. A listing of MicroRNA, miR sequences and miR binding sites is listed in Table 9 of U.S. Provisional Application No. 61/753,661 filed Jan. 17, 2013, in Table 9 of U.S. Provisional Application No. 61/754,159 filed Jan. 18, 2013, and in Table 7 of U.S. Provisional Application No. 61/758,921 filed Jan. 31, 2013, each of which are herein incorporated by reference in their entireties.

[0160] Examples of use of microRNA to drive tissue or disease-specific gene expression are listed (Getner and Naldini, Tissue Antigens. 2012, 80:393-403; herein incorporated by reference in its entirety). In addition, microRNA seed sites can be incorporated into mRNA to decrease expression in certain cells which results in a biological improvement. An example of this is incorporation of miR-142 sites into a UGT1A1-expressing lentiviral vector. The presence of miR-142 seed sites reduced expression in hematopoietic cells, and as a consequence reduced expression in antigen-presentating cells, leading to the absence of an immune response against the virally expressed UCT1A1 (Schmitt et al., Gastroenterology 2010; 139:999-1007; Gonzalez-Asequinolaza et al. Gastroenterology 2010, 139:726-729; both herein incorporated by reference in its entirety). Incorporation of miR-142 sites into modified mRNA could not only reduce expression of the encoded protein in hematopoietic cells, but could also reduce or abolish immune responses to the mRNA-encoded protein. Incorporation of miR-142 seed sites (one or multiple) into mRNA would be important in the case of treatment of patients with complete protein deficiencies (UGT1A type I, LDLR-deficient patients, CRIM-negative Pompe patients, etc.).

[0161] Lastly, through an understanding of the expression patterns of microRNA in different cell types, polynucleotides, primary constructs or mmRNA can be engineered for more targeted expression in specific cell types or only under specific biological conditions. Through introduction of tissue-specific microRNA binding sites, polynucleotides, primary constructs or mmRNA could be designed that would be optimal for protein expression in a tissue or in the context of a biological condition.

[0162] Transfection experiments can be conducted in relevant cell lines, using engineered polynucleotides, primary constructs or mmRNA and protein production can be assayed at various time points post-transfection. For example, cells can be transfected with different microRNA binding site-engineering polynucleotides, primary constructs or mmRNA and by using an ELISA kit to the relevant protein and assaying protein produced at 6 hour, 12 hour, 24 hour, 48 hour, 72 hour and 7 days post-transfection. In vivo experiments can also be conducted using microRNA-binding site-engineered molecules to examine changes in tissue-specific expression of formulated polynucleotides, primary constructs or mmRNA.

### 5′ Capping

[0163] The 5′ cap structure of an mRNA is involved in nuclear export, increasing mRNA stability and binds the mRNA Cap Binding Protein (CBP), which is responsible for mRNA stability in the cell and translation competency through the association of CBP with poly(A) binding protein to form the mature cyclic mRNA species. The cap further assists the removal of 5′ proximal introns removal during mRNA splicing.

[0164] Endogenous mRNA molecules may be 5′-end capped generating a 5′-ppp-5′-triphosphate linkage between a terminal guanosine cap residue and the 5′-terminal transcribed sense nucleotide of the mRNA molecule. This 5′-guanylate cap may then be methylated to generate an N7-methyl-guanylate residue. The ribose sugars of the terminal and/or anteterminal transcribed nucleotides of the 5′ end of the mRNA may optionally also be 2′-O-methylated, 5′-decapping through hydrolysis and cleavage of the guanylate cap structure may target a nucleic acid molecule, such as an mRNA molecule, for degradation.

[0165] Modifications to the polynucleotides, primary constructs, and mmRNA of the present invention may generate a non-hydrolyzable cap structure preventing decapping and thus increasing mRNA half-life. Because cap structure hydrolysis requires cleavage of 5′-ppp-5′ phosphorodiester linkages, modified nucleotides may be used during the capping reaction. For example, a Vaccinia Capping Enzyme from New England Biolabs (Ipswich, MA) may be used with α-thio-guanosine nucleotides according to the manufacturer's instructions to create a phosphorothioate linkage in the 5′-ppp-5′ cap. Additional modified guanosine nucleotides may be used such as α-methyl-phosphonate and seleno-phosphate nucleotides.

[0166] Additional modifications include, but are not limited to, 2′-O-methylation of the ribose sugars of 5′-terminal and/or 5′-anteterminal nucleotides of the mRNA (as mentioned above) on the 2′-hydroxyl group of the sugar ring. Multiple distinct 5′-cap structures can be used to generate the 5′-cap of a nucleic acid molecule, such as an mRNA molecule.

[0167] Cap analogs, which herein are also referred to as synthetic cap analogs, chemical caps, chemical cap analogs, or structural or functional cap analogs, differ from natural (i.e. endogenous, wild-type or physiological) 5′-caps in their chemical structure, while retaining cap function. Cap analogs may be chemically (i.e. non-enzymatically) or enzymatically synthesized and/or linked to a nucleic acid molecule.

[0168] For example, the Anti-Reverse Cap Analog (ARCA) cap contains two guanines linked by a 5′-5′-triphosphate group, wherein one guanine contains an N7 methyl group as well as a 3′-O-methyl group (i.e., N7,3′-O-dimethyl-guanosine-5′-triphosphate-5′-guanosine (m⁷G-3′mppp-G; which may equivalently be designated 3′ O-Me-m7G(5′)ppp(5′)G). The 3′-O atom of the other, unmodified, guanine becomes linked to the 5′-terminal nucleotide of the capped nucleic acid molecule (e.g. an mRNA or mmRNA). The N7- and 3′-O-methylated guanine provides the terminal moiety of the capped nucleic acid molecule (e.g. mRNA or mmRNA).

[0169] Another exemplary cap is mCAP, which is similar to ARCA but has a 2′-O-methyl group on guanosine (i.e., N7,2′-O-dimethyl-guanosine-5′-triphosphate-5′-guanosine, m Gm-ppp-G).

[0170] While cap analogs allow for the concomitant capping of a nucleic acid molecule in an in vitro transcription reaction, up to 20% of transcripts can remain uncapped. This, as well as the structural differences of a cap analog from an endogenous 5′-cap structures of nucleic acids produced by the endogenous, cellular transcription machinery, may lead to reduced translational competency and reduced cellular stability.

[0171] Polynucleotides, primary constructs and mmRNA of the invention may also be capped post-transcriptionally, using enzymes, in order to generate more authentic 5′-cap structures. As used herein, the phrase “more authentic” refers to a feature that closely mirrors or mimics, either structurally or functionally, an endogenous or wild type feature. That is, a “more authentic” feature is better representative of an endogenous, wild-type, natural or physiological cellular function and/or structure as compared to synthetic features or analogs, etc., of the prior art, or which outperforms the corresponding endogenous, wild-type, natural or physiological feature in one or more respects. Non-limiting examples of more authentic 5′cap structures of the present invention are those which, among other things, have enhanced binding of cap binding proteins, increased half life, reduced susceptibility to 5′ endonucleases and/or reduced 5′decapping, as compared to synthetic 5′cap structures known in the art (or to a wild-type, natural or physiological 5′cap structure). For example, recombinant Vaccinia Virus Capping Enzyme and recombinant 2′-O-methyltransferase enzyme can create a canonical 5′-5′-triphosphate linkage between the 5′-terminal nucleotide of an mRNA and a guanine cap nucleotide wherein the cap guanine contains an N7 methylation and the 5′-terminal nucleotide of the mRNA contains a 2′-O-methyl. Such a structure is termed the Cap1 structure. This cap results in a higher translational-competency and cellular stability and a reduced activation of cellular pro-inflammatory cytokines, as compared, e.g., to other 5′cap analog structures known in the art. Cap structures include, but are not limited to, 7mG(5′)ppp(5′)N, pN2p (cap 0), 7mG(5′)ppp(5′)NlmpNp (cap 1), and 7mG(5′)-ppp(5′)NlmpN2mp (cap 2).

[0172] Because the polynucleotides, primary constructs or mmRNA may be capped post-transcriptionally, and because this process is more efficient, nearly 100% of the polynucleotides, primary constructs or mmRNA may be capped. This is in contrast to ˜80% when a cap analog is linked to an mRNA in the course of an in vitro transcription reaction.

[0173] According to the present invention, 5′ terminal caps may include endogenous caps or cap analogs. According to the present invention, a 5′ terminal cap may comprise a guanine analog. Useful guanine analogs include, but are not limited to, inosine, N1-methyl-guanosine, 2′fluoro-guanosine, 7-deaza-guanosine, 8-oxo-guanosine, 2-amino-guanosine, LNA-guanosine, and 2-azido-guanosine.

### Viral Sequences

[0174] Additional viral sequences such as, but not limited to, the translation enhancer sequence of the barley yellow dwarf virus (BYDV PAV), the Jaagsiekte sheep retrovirus (JSRV) and/or the Enzootic nasal tumor virus (See e.g., International Pub. No. WO2012129648; herein incorporated by reference in its entirety) can be engineered and inserted in the 3′ UTR of the polynucleotides, primary constructs or mmRNA of the invention and can stimulate the translation of the construct in vitro and in vivo. Transfection experiments can be conducted in relevant cell lines at and protein production can be assayed by ELISA at 12 hr, 24 hr, 48 hr, 72 hr and day 7 post-transfection.

### IRES Sequences

[0175] Further, provided are polynucleotides, primary constructs or mmRNA which may contain an internal ribosome entry site (IRES). First identified as a feature Picorna virus RNA, IRES plays an important role in initiating protein synthesis in absence of the 5′ cap structure. An IRES may act as the sole ribosome binding site, or may serve as one of multiple ribosome binding sites of an mRNA. Polynucleotides, primary constructs or mmRNA containing more than one functional ribosome binding site may encode several peptides or polypeptides that are translated independently by the ribosomes (“multicistronic nucleic acid molecules”). When polynucleotides, primary constructs or mmRNA are provided with an IRES, further optionally provided is a second translatable region. Examples of IRES sequences that can be used according to the invention include without limitation, those from picornaviruses (e.g. FMDV), pest viruses (CFFV), polio viruses (PV), encephalornyocarditis viruses (ECMV), foot-and-mouth disease viruses (FMDV), hepatitis C viruses (HCV), classical swine fever viruses (CSFV), murine leukemia virus (MLV), simian immune deficiency viruses (SIV) or cricket paralysis viruses (CrPV).

### Poly-A Tails

[0176] During RNA processing, a long chain of adenine nucleotides (poly-A tail) may be added to a polynucleotide such as an mRNA molecules in order to increase stability. Immediately after transcription, the 3′ end of the transcript may be cleaved to free a 3′ hydroxyl. Then poly-A polymerase adds a chain of adenine nucleotides to the RNA. The process, called polyadenylation, adds a poly-A tail that can be between, for example, approximately 100 and 250 residues long.

[0177] It has been discovered that unique poly-A tail lengths provide certain advantages to the polynucleotides, primary constructs or mmRNA of the present invention.

[0178] Generally, the length of a poly-A tail of the present invention is greater than 30 nucleotides in length. In another embodiment, the poly-A tail is greater than 35 nucleotides in length (e.g., at least or greater than about 35, 40, 45, 50, 55, 60, 70, 80, 90, 100, 120, 140, 160, 180, 200, 250, 300, 350, 400, 450, 500, 600, 700, 800, 900, 1,000, 1,100, 1200, 1,300, 1,400, 1,500, 1,600, 1,700, 1,800, 1,900, 2,000, 2,500, and 3,000 nucleotides). In some embodiments, the polynucleotide, primary construct, or mmRNA includes from about 30 to about 3,000 nucleotides (e.g., from 30 to 50, from 30 to 100, from 30 to 250, from 30 to 500, from 30 to 750, from 30 to 1,000, from 30 to 1,500, from 30 to 2,000, from 30 to 2,500, from 50 to 100, from 50 to 250, from 50 to 500, from 50 to 750, from 50 to 1,000, from 50 to 1,500, from 50 to 2,000, from 50 to 2,500, from 50 to 3,000, from 100 to 500, from 100 to 750, from 100 to 1,000, from 100 to 1,500, from 100 to 2,000, from 100 to 2,500, from 100 to 3,000, from 500 to 750, from 500 to 1,000, from 500 to 1,500, from 500 to 2,000, from 500 to 2,500, from 500 to 3,000, from 1,000 to 1,500, from 1,000 to 2,000, from 1,000 to 2,500, from 1,000 to 3,000, from 1,500 to 2,000, from 1,500 to 2,500, from 1,500 to 3,000, from 2,000 to 3,000, from 2,000 to 2,500, and from 2,500 to 3,000).

[0179] In one embodiment, the poly-A tail is designed relative to the length of the overall polynucleotides, primary constructs or mmRNA. This design may be based on the length of the coding region, the length of a particular feature or region (such as the first or flanking regions), or based on the length of the ultimate product expressed from the polynucleotides, primary constructs or mmRNA.

[0180] In this context the poly-A tail may be 10, 20, 30, 40, 50, 60, 70, 80, 90, or 100% greater in length than the polynucleotides, primary constructs or mmRNA or feature thereof. The poly-A tail may also be designed as a fraction of polynucleotides, primary constructs or mmRNA to which it belongs. In this context, the poly-A tail may be 10, 20, 30, 40, 50, 60, 70, 80, or 90% or more of the total length of the construct or the total length of the construct minus the poly-A tail. Further, engineered binding sites and conjugation of polynucleotides, primary constructs or mmRNA for Poly-A binding protein may enhance expression.

[0181] Additionally, multiple distinct polynucleotides, primary constructs or mmRNA may be linked together to the PABP (Poly-A binding protein) through the 3′-end using modified nucleotides at the 3′-terminus of the poly-A tail. Transfection experiments can be conducted in relevant cell lines at and protein production can be assayed by ELISA at 12 hr, 24 hr, 48 hr, 72 hr and day 7 post-transfection.

[0182] In one embodiment, the polynucleotide primary constructs of the present invention are designed to include a polyA-G Quartet. The G-quartet is a cyclic hydrogen bonded array of four guanine nucleotides that can be formed by G-rich sequences in both DNA and RNA. In this embodiment, the G-quartet is incorporated at the end of the poly-A tail. The resultant mmRNA construct is assayed for stability, protein production and other parameters including half-life at various time points. It has been discovered that the polyA-G quartet results in protein production equivalent to at least 75% of that seen using a poly-A tail of 120 nucleotides alone.

### Quantification

[0183] In one embodiment, the polynucleotides, primary constructs or mmRNA of the present invention may be quantified in exosomes derived from one or more bodily fluid. As used herein “bodily fluids” include peripheral blood, serum, plasma, ascites, urine, cerebrospinal fluid (CSF), sputum, saliva, bone marrow, synovial fluid, aqueous humor, amniotic fluid, cerumen, breast milk, broncheoalveolar lavage fluid, semen, prostatic fluid, cowper's fluid or pre-ejaculatory fluid, sweat, fecal matter, hair, tears, cyst fluid, pleural and peritoneal fluid, pericardial fluid, lymph, chyme, chyle, bile, interstitial fluid, menses, pus, sebum, vomit, vaginal secretions, mucosal secretion, stool water, pancreatic juice, lavage fluids from sinus cavities, bronchopulmonary aspirates, blastocyl cavity fluid, and umbilical cord blood. Alternatively, exosomes may be retrieved from an organ selected from the group consisting of lung, heart, pancreas, stomach, intestine, bladder, kidney, ovary, testis, skin, colon, breast, prostate, brain, esophagus, liver, and placenta.

[0184] In the quantification method, a sample of not more than 2 mL is obtained from the subject and the exosomes isolated by size exclusion chromatography, density gradient centrifugation, differential centrifugation, nanomembrane ultrafiltration, immunoabsorbent capture, affinity purification, microfluidic separation, or combinations thereof. In the analysis, the level or concentration of a polynucleotide, primary construct or mmRNA may be an expression level, presence, absence, truncation or alteration of the administered construct. It is advantageous to correlate the level with one or more clinical phenotypes or with an assay for a human disease biomarker. The assay may be performed using construct specific probes, cytometry, qRT-PCR, real-time PCR, PCR, flow cytometry, electrophoresis, mass spectrometry, or combinations thereof while the exosomes may be isolated using immunohistochemical methods such as enzyme linked immunosorbent assay (ELISA) methods. Exosomes may also be isolated by size exclusion chromatography, density gradient centrifugation, differential centrifugation, nanomembrane ultrafiltration, immunoabsorbent capture, affinity purification, microfluidic separation, or combinations thereof.

[0185] These methods afford the investigator the ability to monitor, in real time, the level of polynucleotides, primary constructs or mmRNA remaining or delivered. This is possible because the polynucleotides, primary constructs or mmRNA of the present invention differ from the endogenous forms due to the structural or chemical modifications.

### II. Design and Synthesis of mmRNA

[0186] Polynucleotides, primary constructs or mmRNA for use in accordance with the invention may be prepared according to any available technique including, but not limited to chemical synthesis, enzymatic synthesis, which is generally termed in vitro transcription (IVT) or enzymatic or chemical cleavage of a longer precursor, etc. Methods of synthesizing RNAs are known in the art (see, e.g., Gait, M. J. (ed.) Oligonucleotide synthesis: a practical approach, Oxford [Oxfordshire], Washington, DC: IRL Press, 1984; and Herdewijn, P. (ed.) Oligonucleotide synthesis: methods and applications, Methods in Molecular Biology, v. 288 (Clifton, N.J.) Totowa, N.J.: Humana Press, 2005; both of which are incorporated herein by reference).

[0187] The process of design and synthesis of the primary constructs of the invention generally includes the steps of gene construction, mrRNA production (either with or without modifications) and purification. In the enzymatic synthesis method, a target polynucleotide sequence encoding the polypeptide of interest is first selected for incorporation into a vector which will be amplified to produce a cDNA template. Optionally, the target polynucleotide sequence and/or any flanking sequences may be codon optimized. The cDNA template is then used to produce mRNA through in vitro transcription (IVT). After production, the mRNA may undergo purification and clean-up processes. The steps of which are provided in more detail below.

### Gene Construction

[0188] The step of gene construction may include, but is not limited to gene synthesis, vector amplification, plasmid purification, plasmid linearization and clean-up, and cDNA template synthesis and clean-up.

### Gene Synthesis

[0189] Once a polypeptide of interest, or target, is selected for production, a primary construct is designed. Within the primary construct, a first region of linked nucleosides encoding the polypeptide of interest may be constructed using an open reading frame (ORF) of a selected nucleic acid (DNA or RNA) transcript. The ORF may comprise the wild type ORE, an isoform, variant or a fragment thereof. As used herein, an “open reading frame” or “ORF” is meant to refer to a nucleic acid sequence (DNA or RNA) which is capable of encoding a polypeptide of interest. ORFs often begin with the start codon, ATG and end with a nonsense or termination codon or signal.

[0190] Further, the nucleotide sequence of the first region may be codon optimized. Codon optimization methods are known in the art and may be useful in efforts to achieve one or more of several goals. These goals include to match codon frequencies in target and host organisms to ensure proper folding, bias GC content to increase mRNA stability or reduce secondary structures, minimize tandem repeat codons or base runs that may impair gene construction or expression, customize transcriptional and translational control regions, insert or remove protein trafficking sequences, remove/add post translation modification sites in encoded protein (e.g. glycosylation sites), add, remove or shuffle protein domains, insert or delete restriction sites, modify ribosome binding sites and mRNA degradation sites, to adjust translational rates to allow the various domains of the protein to fold properly, or to reduce or eliminate problem secondary structures within the mRNA. Codon optimization tools, algorithms and services are known in the art, non-limiting examples include services from GeneArt (Life Technologies), DNA2.0 (Menlo Park CA) and/or proprietary methods. In one embodiment, the ORF sequence is optimized using optimization algorithms. Codon options for each amino acid are given in Table 1.

TABLE 1
Codon Options

| | Single | |
|---|---|---|
| | Letter | |
| Amino Acid | Code | Codon Options |
| Isoleucine | I | ATT, ATC, ATA |
| Leucine | L | CTT, CTC, CTA, CTG, TTA, TTG |
| Valine | V | GTT, GTC, GTA, GTG |
| Phenylalanine | F | TTT, TTC |
| Methionine | M | ATG |
| Cysteine | C | TGT, TGC |
| Alanine | A | GCT, GCC, GCA, GCG |
| Glycine | G | GGT, GGC, GGA, GGG |
| Proline | P | CCT, CCC, CCA, CCG |
| Threonine | T | ACT, ACC, ACA, ACG |
| Serine | S | TCT, TCC, TCA, TCG, AGT, AGC |
| Tyrosine | Y | TAT, TAC |
| Tryptophan | W | TGG |
| Glutamine | Q | CAA, CAG |
| Asparagine | N | AAT, AAC |
| Histidine | H | CAT, CAC |
| Glutamic acid | E | GAA, GAG |
| Aspartic acid | D | GAT, GAC |
| Lysine | K | AAA, AAG |
| Arginine | R | CGT, CGC, CGA, CGG, AGA, AGG |
| Selenocysteine | Sec | UGA in mRNA in presence |
| | | of Selenocystein |
| | | insertion element (SECIS) |
| Stop codons | Stop | TAA, TAG, TGA |

[0191] Features, which may be considered beneficial in some embodiments of the present invention, may be encoded by the primary construct and may flank the ORF as a first or second flanking region. The flanking regions may be incorporated into the primary construct before and/or after optimization of the ORF. It is not required that a primary construct contain both a 5′ and 3′ flanking region. Examples of such features include, but are not limited to, untranslated regions (UTRs), Kozak sequences, an oligo(dT) sequence, and detectable tags and may include multiple cloning sites which may have XbaI recognition.

[0192] In some embodiments, a 5′ UTR and/or a 3′ UTR may be provided as flanking regions. Multiple 5′ or 3′ UTRs may be included in the flanking regions and may be the same or of different sequences. Any portion of the flanking regions, including none, may be codon optimized and any may independently contain one or more different structural or chemical modifications, before and/or after codon optimization. Combinations of features may be included in the first and second flanking regions and may be contained within other features. For example, the ORF may be flanked by a 5′ UTR which may contain a strong Kozak translational initiation signal and/or a 3′ UTR which may include an oligo(dT) sequence for templated addition of a poly-A tail. 5′UTR may comprise a first polynucleotide fragment and a second polynucleotide fragment from the same and/or different genes such as the 5′UTRs described in US Patent Application Publication No. 20100293625, herein incorporated by reference in its entirety.

[0193] Tables 2 and 3 provide a listing of exemplary UTRs which may be utilized in the primary construct of the present invention as flanking regions. Shown in Table 2 is a listing of a 5′-untranslated region of the invention. Variants of 5′ UTRs may be utilized wherein one or more nucleotides are added or removed to the termini, including A, T, C or G.

TABLE 2
5′-Untranslated Regions

| 5′ UTR | Name/ | | |
|---|---|---|---|
| Identifier | Description | Sequence | SEQ ID NO. |
| 5UTR-001 | Upstream UTR | GGGAAATAAGAGAGAAAAGAAGAGTAAGAAG | 1 |
| | | AAATATAAGAGCCACC | |
| 5UTR-002 | Upstream UTR | GGGAGATCAGAGAGAAAAGAAGAGTAAGAAG | 2 |
| | | AAATATAAGAGCCACC | |
| 5UTR-003 | Upstream UTR | GGAATAAAAGTCTCAACACAACATATACAAA | 3 |
| | | ACAAACGAATCTCAAGCAATCAAGCATTCTA | |
| | | CTTCTATTGCAGCAATTTAAATCATTTCTTT | |
| | | TAAAGCAAAAGCAATTTTCTGAAAATTTTCA | |
| | | CCATTTACGAACGATAGCAAC | |
| 5UTR-004 | Upstream UTR | GGGAGACAAGCUUGGCAUUCCGGUACUGUUG | 4 |
| | | GUAAAGCCACC | |

[0194] Shown in Table 3 is a representative listing of 3′-untranslated regions of the invention. Variants of 3′ UTRs may be utilized wherein one or more nucleotides are added or removed to the termini, including A, T, C or G.

TABLE 3
3′-Untranslated Regions

| 3′ UTR | | | |
|---|---|---|---|
| Identifier | Name/Description | Sequence | SEQ ID NO. |
| 3UTR-001 | Creatine Kinase | GCGCCTGCCCACCTGCCACCGACTGCTGGAACCCAGCCA | 5 |
| | | GTGGGAGGGCCTGGCCCACCAGAGTCCTGCTCCCTCACT | |
| | | CCTCGCCCCGCCCCCTGTCCCAGAGTCCCACCTGGGGGC | |
| | | TCTCTCCACCCTTCTCAGAGTTCCAGTTTCAACCAGAGT | |
| | | TCCAACCAATGGGCTCCATCCTCTGGATTCTGGCCAATG | |
| | | AAATATCTCCCTGGCAGGGTCCTCTTCTTTTCCCAGAGC | |
| | | TCCACCCCAACCAGGAGCTCTAGTTAATGGAGAGCTCCC | |
| | | AGCACACTCGGAGCTTGTGCTTTGTCTCCACGCAAAGCG | |
| | | ATAAATAAAAGCATTGGTGGCCTTTGGTCTTTGAATAAA | |
| | | GCCTGAGTAGGAAGTCTAGA | |
| 3UTR-002 | Myoglobin | GCCCCTGCCGCTCCCACCCCCACCCATCTGGGCCCCGGG | 6 |
| | | TTCAAGAGAGAGCGGGGTCTGATCTCGTGTAGCCATATA | |
| | | GAGTTTGCTTCTGAGTGTCTGCTTTGTTTAGTAGAGGTG | |
| | | GGCAGGAGGAGCTGAGGGGCTGGGGCTGGGGTGTTGAAG | |
| | | TTGGCTTTGCATGCCCAGCGATGCGCCTCCCTGTGGGAT | |
| | | GTCATCACCCTGGGAACCGGGAGTGGCCCTTGGCTCACT | |
| | | GTGTTCTGCATGGTTTGGATCTGAATTAATTGTCCTTTC | |
| | | TTCTAAATCCCAACCGAACTTCTTCCAACCTCCAAACTG | |
| | | GCTGTAACCCCAAATCCAAGCCATTAACTACACCTGACA | |
| | | GTAGCAATTGTCTGATTAATCACTGGCCCCTTGAAGACA | |
| | | GCAGAATGTCCCTTTGCAATGAGGAGGAGATCTGGGCTG | |
| | | GGCGGGCCAGCTGGGGAAGCATTTGACTATCTGGAACTT | |
| | | GTGTGTGCCTCCTCAGGTATGGCAGTGACTCACCTGGTT | |
| | | TTAATAAAACAACCTGCAACATCTCATGGTCTTTGAATA | |
| | | AAGCCTGAGTAGGAAGTCTAGA | |
| 3UTR-003 | α-actin | ACACACTCCACCTCCAGCACGCGACTTCTCAGGACGACG | 7 |
| | | AATCTTCTCAATGGGGGGGCGGCTGAGCTCCAGCCACCC | |
| | | CGCAGTCACTTTCTTTGTAACAACTTCCGTTGCTGCCAT | |
| | | CGTAAACTGACACAGTGTTTATAACGTGTACATACATTA | |
| | | ACTTATTACCTCATTTTGTTATTTTTCGAAACAAAGCCC | |
| | | TGTGGAAGAAAATGGAAAACTTGAAGAAGCATTAAGTCA | |
| | | TTCTGTTAAGCTGCGTAAATGGTCTTTGAATAAAGCCTG | |
| | | AGTAGGAAGTCTAGA | |
| 3UTR-004 | Albumin | CATCACATTTAAAAGCATCTCAGCCTACCATGAGAATAA | 8 |
| | | GAGAAAGAAAATGAAGATCAAAAGCTTATTCATCTGTTT | |
| | | TTCTTTTTCGTTGGTGTAAAGCCAACACCCTGTCTAAAA | |
| | | AACATAAATTTCTTTAATCATTTTGCCTCTTTTCTCTGT | |
| | | GCTTCAATTAATAAAAAATGGAAAGAATCTAATAGAGTG | |
| | | GTACAGCACTGTTATTTTTCAAAGATGTGTTGCTATCCT | |
| | | GAAAATTCTGTAGGTTCTGTGGAAGTTCCAGTGTTCTCT | |
| | | CTTATTCCACTTCGGTAGAGGATTTCTAGTTTCTTGTGG | |
| | | GCTAATTAAATAAATCATTAATACTCTTCTAATGGTCTT | |
| | | TGAATAAAGCCTGAGTAGGAAGTCTAGA | |
| 3UTR-005 | α-globin | GCTGCCTTCTGCGGGGCTTGCCTTCTGGCCATGCCCTTC | 9 |
| | | TTCTCTCCCTTGCACCTGTACCTCTTGGTCTTTGAATAA | |
| | | AGCCTGAGTAGGAAGGCGGCCGCTCGAGCATGCATCTAG | |
| | | A | |
| 3UTR-006 | G-CSF | GCCAAGCCCTCCCCATCCCATGTATTTATCTCTATTTAA | 10 |
| | | TATTTATGTCTATTTAAGCCTCATATTTAAAGACAGGGA | |
| | | AGAGCAGAACGGAGCCCCAGGCCTCTGTGTCCTTCCCTG | |
| | | CATTTCTGAGTTTCATTCTCCTGCCTGTAGCAGTGAGAA | |
| | | AAAGCTCCTGTCCTCCCATCCCCTGGACTGGGAGGTAGA | |
| | | TAGGTAAATACCAAGTATTTATTACTATGACTGCTCCCC | |
| | | AGCCCTGGCTCTGCAATGGGCACTGGGATGAGCCGCTGT | |
| | | GAGCCCCTGGTCCTGAGGGTCCCCACCTGGGACCCTTGA | |
| | | GAGTATCAGGTCTCCCACGTGGGAGACAAGAAATCCCTG | |
| | | TTTAATATTTAAACAGCAGTGTTCCCCATCTGGGTCCTT | |
| | | GCACCCCTCACTCTGGCCTCAGCCGACTGCACAGCGGCC | |
| | | CCTGCATCCCCTTGGCTGTGAGGCCCCTGGACAAGCAGA | |
| | | GGTGGCCAGAGCTGGGAGGCATGGCCCTGGGGTCCCACG | |
| | | AATTTGCTGGGGAATCTCGTTTTTCTTCTTAAGACTTTT | |
| | | GGGACATGGTTTGACTCCCGAACATCACCGACGCGTCTC | |
| | | CTGTTTTTCTGGGTGGCCTCGGGACACCTGCCCTGCCCC | |
| | | CACGAGGGTCAGGACTGTGACTCTTTTTAGGGCCAGGCA | |
| | | GGTGCCTGGACATTTGCCTTGCTGGACGGGGACTGGGGA | |
| | | TGTGGGAGGGAGCAGACAGGAGGAATCATGTCAGGCCTG | |
| | | TGTGTGAAAGGAAGCTCCACTGTCACCCTCCACCTCTTC | |
| | | ACCCCCCACTCACCAGTGTCCCCTCCACTGTCACATTGT | |
| | | AACTGAACTTCAGGATAATAAAGTGTTTGCCTCCATGGT | |
| | | CTTTGAATAAAGCCTGAGTAGGAAGGCGGCCGCTCGAGC | |
| | | ATGCATCTAGA | |
| 3UTR-007 | Col1a2; | ACTCAATCTAAATTAAAAAAGAAAGAAATTTGAAAAAAC | 11 |
| | collagen, type | TTTCTCTTTGCCATTTCTTCTTCTTCTTTTTTAACTGAA | |
| | I, alpha 2 | AGCTGAATCCTTCCATTTCTTCTGCACATCTACTTGCTT | |
| | | AAATTGTGGGCAAAAGAGAAAAAGAAGGATTGATCAGAG | |
| | | CATTGTGCAATACAGTTTCATTAACTCCTTCCCCCGCTC | |
| | | CCCCAAAAATTTGAATTTTTTTTTCAACACTCTTACACC | |
| | | TGTTATGGAAAATGTCAACCTTTGTAAGAAAACCAAAAT | |
| | | AAAAATTGAAAAATAAAAACCATAAACATTTGCACCACT | |
| | | TGTGGCTTTTGAATATCTTCCACAGAGGGAAGTTTAAAA | |
| | | CCCAAACTTCCAAAGGTTTAAACTACCTCAAAACACTTT | |
| | | CCCATGAGTGTGATCCACATTGTTAGGTGCTGACCTAGA | |
| | | CAGAGATGAACTGAGGTCCTTGTTTTGTTTTGTTCATAA | |
| | | TACAAAGGTGCTAATTAATAGTATTTCAGATACTTGAAG | |
| | | AATGTTGATGGTGCTAGAAGAATTTGAGAAGAAATACTC | |
| | | CTGTATTGAGTTGTATCGTGTGGTGTATTTTTTAAAAAA | |
| | | TTTGATTTAGCATTCATATTTTCCATCTTATTCCCAATT | |
| | | AAAAGTATGCAGATTATTTGCCCAAATCTTCTTCAGATT | |
| | | CAGCATTTGTTCTTTGCCAGTCTCATTTTCATCTTCTTC | |
| | | CATGGTTCCACAGAAGCTTTGTTTCTTGGGCAAGCAGAA | |
| | | AAATTAAATTGTACCTATTTTGTATATGTGAGATGTTTA | |
| | | AATAAATTGTGAAAAAAATGAAATAAAGCATGTTTGGTT | |
| | | TTCCAAAAGAACATAT | |
| 3UTR-008 | Col6a2; | CGCCGCCGCCCGGGCCCCGCAGTCGAGGGTCGTGAGCCC | 12 |
| | collagen, type | ACCCCGTCCATGGTGCTAAGCGGGCCCGGGTCCCACACG | |
| | VI, alpha 2 | GCCAGCACCGCTGCTCACTCGGACGACGCCCTGGGCCTG | |
| | | CACCTCTCCAGCTCCTCCCACGGGGTCCCCGTAGCCCCG | |
| | | GCCCCCGCCCAGCCCCAGGTCTCCCCAGGCCCTCCGCAG | |
| | | GCTGCCCGGCCTCCCTCCCCCTGCAGCCATCCCAAGGCT | |
| | | CCTGACCTACCTGGCCCCTGAGCTCTGGAGCAAGCCCTG | |
| | | ACCCAATAAAGGCTTTGAACCCAT | |
| 3UTR-009 | RNP1; | GGGGCTAGAGCCCTCTCCGCACAGCGTGGAGACGGGGCA | 13 |
| | ribophorin I | AGGAGGGGGGTTATTAGGATTGGTGGTTTTGTTTTGCTT | |
| | | TGTTTAAAGCCGTGGGAAAATGGCACAACTTTACCTCTG | |
| | | TGGGAGATGCAACACTGAGAGCCAAGGGGTGGGAGTTGG | |
| | | GATAATTTTTATATAAAAGAAGTTTTTCCACTTTGAATT | |
| | | GCTAAAAGTGGCATTTTTCCTATGTGCAGTCACTCCTCT | |
| | | CATTTCTAAAATAGGGACGTGGCCAGGCACGGTGGCTCA | |
| | | TGCCTGTAATCCCAGCACTTTGGGAGGCCGAGGCAGGCG | |
| | | GCTCACGAGGTCAGGAGATCGAGACTATCCTGGCTAACA | |
| | | CGGTAAAACCCTGTCTCTACTAAAAGTACAAAAAATTAG | |
| | | CTGGGCGTGGTGGTGGGCACCTGTAGTCCCAGCTACTCG | |
| | | GGAGGCTGAGGCAGGAGAAAGGCATGAATCCAAGAGGCA | |
| | | GAGCTTGCAGTGAGCTGAGATCACGCCATTGCACTCCAG | |
| | | CCTGGGCAACAGTGTTAAGACTCTGTCTCAAATATAAAT | |
| | | AAATAAATAAATAAATAAATAAATAAATAAAAATAAAGC | |
| | | GAGATGTTGCCCTCAAA | |
| 3UTR-010 | LRP1; low | GGCCCTGCCCCGTCGGACTGCCCCCAGAAAGCCTCCTGC | 14 |
| | density | CCCCTGCCAGTGAAGTCCTTCAGTGAGCCCCTCCCCAGC | |
| | lipoprotein | CAGCCCTTCCCTGGCCCCGCCGGATGTATAAATGTAAAA | |
| | receptor-related | ATGAAGGAATTACATTTTATATGTGAGCGAGCAAGCCGG | |
| | protein 1 | CAAGCGAGCACAGTATTATTTCTCCATCCCCTCCCTGCC | |
| | | TGCTCCTTGGCACCCCCATGCTGCCTTCAGGGAGACAGG | |
| | | CAGGGAGGGCTTGGGGCTGCACCTCCTACCCTCCCACCA | |
| | | GAACGCACCCCACTGGGAGAGCTGGTGGTGCAGCCTTCC | |
| | | CCTCCCTGTATAAGACACTTTGCCAAGGCTCTCCCCTCT | |
| | | CGCCCCATCCCTGCTTGCCCGCTCCCACAGCTTCCTGAG | |
| | | GGCTAATTCTGGGAAGGGAGAGTTCTTTGCTGCCCCTGT | |
| | | CTGGAAGACGTGGCTCTGGGTGAGGTAGGCGGGAAAGGA | |
| | | TGGAGTGTTTTAGTTCTTGGGGGAGGCCACCCCAAACCC | |
| | | CAGCCCCAACTCCAGGGGCACCTATGAGATGGCCATGCT | |
| | | CAACCCCCCTCCCAGACAGGCCCTCCCTGTCTCCAGGGC | |
| | | CCCCACCGAGGTTCCCAGGGCTGGAGACTTCCTCTGGTA | |
| | | AACATTCCTCCAGCCTCCCCTCCCCTGGGGACGCCAAGG | |
| | | AGGTGGGCCACACCCAGGAAGGGAAAGCGGGCAGCCCCG | |
| | | TTTTGGGGACGTGAACGTTTTAATAATTTTTGCTGAATT | |
| | | CCTTTACAACTAAATAACACAGATATTGTTATAAATAAA | |
| | | ATTGT | |
| 3UTR-011 | Nnt1; | ATATTAAGGATCAAGCTGTTAGCTAATAATGCCACCTCT | 15 |
| | cardiotrophin- | GCAGTTTTGGGAACAGGCAAATAAAGTATCAGTATACAT | |
| | like cytokine | GGTGATGTACATCTGTAGCAAAGCTCTTGGAGAAAATGA | |
| | factor 1 | AGACTGAAGAAAGCAAAGCAAAAACTGTATAGAGAGATT | |
| | | TTTCAAAAGCAGTAATCCCTCAATTTTAAAAAAGGATTG | |
| | | AAAATTCTAAATGTCTTTCTGTGCATATTTTTTGTGTTA | |
| | | GGAATCAAAGTATTTTATAAAAGGAGAAAGAACAGCCTC | |
| | | ATTTTAGATGTAGTCCTGTTGGATTTTTTATGCCTCCTC | |
| | | AGTAACCAGAAATGTTTTAAAAAACTAAGTGTTTAGGAT | |
| | | TTCAAGACAACATTATACATGGCTCTGAAATATCTGACA | |
| | | CAATGTAAACATTGCAGGCACCTGCATTTTATGTTTTTT | |
| | | TTTTCAACAAATGTGACTAATTTGAAACTTTTATGAACT | |
| | | TCTGAGCTGTCCCCTTGCAATTCAACCGCAGTTTGAATT | |
| | | AATCATATCAAATCAGTTTTAATTTTTTAAATTGTACTT | |
| | | CAGAGTCTATATTTCAAGGGCACATTTTCTCACTACTAT | |
| | | TTTAATACATTAAAGGACTAAATAATCTTTCAGAGATGC | |
| | | TGGAAACAAATCATTTGCTTTATATGTTTCATTAGAATA | |
| | | CCAATGAAACATACAACTTGAAAATTAGTAATAGTATTT | |
| | | TTGAAGATCCCATTTCTAATTGGAGATCTCTTTAATTTC | |
| | | GATCAACTTATAATGTGTAGTACTATATTAAGTGCACTT | |
| | | GAGTGGAATTCAACATTTGACTAATAAAATGAGTTCATC | |
| | | ATGTTGGCAAGTGATGTGGCAATTATCTCTGGTGACAAA | |
| | | AGAGTAAAATCAAATATTTCTGCCTGTTACAAATATCAA | |
| | | GGAAGACCTGCTACTATGAAATAGATGACATTAATCTGT | |
| | | CTTCACTGTTTATAATACGGATGGATTTTTTTTCAAATC | |
| | | AGTGTGTGTTTTGAGGTCTTATGTAATTGATGACATTTG | |
| | | AGAGAAATGGTGGCTTTTTTTAGCTACCTCTTTGTTCAT | |
| | | TTAAGCACCAGTAAAGATCATGTCTTTTTATAGAAGTGT | |
| | | AGATTTTCTTTGTGACTTTGCTATCGTGCCTAAAGCTCT | |
| | | AAATATAGGTGAATGTGTGATGAATACTCAGATTATTTG | |
| | | TCTCTCTATATAATTAGTTTGGTACTAAGTTTCTCAAAA | |
| | | AATTATTAACACATGAAAGACAATCTCTAAACCAGAAAA | |
| | | AGAAGTAGTACAAATTTTGTTACTGTAATGCTCGCGTTT | |
| | | AGTGAGTTTAAAACACACAGTATCTTTTGGTTTTATAAT | |
| | | CAGTTTCTATTTTGCTGTGCCTGAGATTAAGATCTGTGT | |
| | | ATGTGTGTGTGTGTGTGTGTGCGTTTGTGTGTTAAAGCA | |
| | | GAAAAGACTTTTTTAAAAGTTTTAAGTGATAAATGCAAT | |
| | | TTGTTAATTGATCTTAGATCACTAGTAAACTCAGGGCTG | |
| | | AATTATACCATGTATATTCTATTAGAAGAAAGTAAACAC | |
| | | CATCTTTATTCCTGCCCTTTTTCTTCTCTCAAAGTAGTT | |
| | | GTAGTTATATCTAGAAAGAAGCAATTTTGATTTCTTGAA | |
| | | AAGGTAGTTCCTGCACTCAGTTTAAACTAAAAATAATCA | |
| | | TACTTGGATTTTATTTATTTTTGTCATAGTAAAAATTTT | |
| | | AATTTATATATATTTTTATTTAGTATTATCTTATTCTTT | |
| | | GCTATTTGCCAATCCTTTGTCATCAATTGTGTTAAATGA | |
| | | ATTGAAAATTCATGCCCTGTTCATTTTATTTTACTTTAT | |
| | | TGGTTAGGATATTTAAAGGATTTTTGTATATATAATTTC | |
| | | TTAAATTAATATTCCAAAAGGTTAGTGGACTTAGATTAT | |
| | | AAATTATGGCAAAAATCTAAAAACAACAAAAATGATTTT | |
| | | TATACATTCTATTTCATTATTCCTCTTTTTCCAATAAGT | |
| | | CATACAATTGGTAGATATGACTTATTTTATTTTTGTATT | |
| | | ATTCACTATATCTTTATGATATTTAAGTATAAATAATTA | |
| | | AAAAAATTTATTGTACCTTATAGTCTGTCACCAAAAAAA | |
| | | AAAAATTATCTGTAGGTAGTGAAATGCTAATGTTGATTT | |
| | | GTCTTTAAGGGCTTGTTAACTATCCTTTATTTTCTCATT | |
| | | TGTCTTAAATTAGGAGTTTGTGTTTAAATTACTCATCTA | |
| | | AGCAAAAAATGTATATAAATCCCATTACTGGGTATATAC | |
| | | CCAAAGGATTATAAATCATGCTGCTATAAAGACACATGC | |
| | | ACACGTATGTTTATTGCAGCACTATTCACAATAGCAAAG | |
| | | ACTTGGAACCAACCCAAATGTCCATCAATGATAGACTTG | |
| | | ATTAAGAAAATGTGCACATATACACCATGGAATACTATG | |
| | | CAGCCATAAAAAAGGATGAGTTCATGTCCTTTGTAGGGA | |
| | | CATGGATAAAGCTGGAAACCATCATTCTGAGCAAACTAT | |
| | | TGCAAGGACAGAAAACCAAACACTGCATGTTCTCACTCA | |
| | | TAGGTGGGAATTGAACAATGAGAACACTTGGACACAAGG | |
| | | TGGGGAACACCACACACCAGGGCCTGTCATGGGGTGGGG | |
| | | GGAGTGGGGAGGGATAGCATTAGGAGATATACCTAATGT | |
| | | AAATGATGAGTTAATGGGTGCAGCACACCAACATGGCAC | |
| | | ATGTATACATATGTAGCAAACCTGCACGTTGTGCACATG | |
| | | TACCCTAGAACTTAAAGTATAATTAAAAAAAAAAAGAAA | |
| | | ACAGAAGCTATTTATAAAGAAGTTATTTGCTGAAATAAA | |
| | | TGTGATCTTTCCCATTAAAAAAATAAAGAAATTTTGGGG | |
| | | TAAAAAAACACAATATATTGTATTCTTGAAAAATTCTAA | |
| | | GAGAGTGGATGTGAAGTGTTCTCACCACAAAAGTGATAA | |
| | | CTAATTGAGGTAATGCACATATTAATTAGAAAGATTTTG | |
| | | TCATTCCACAATGTATATATACTTAAAAATATGTTATAC | |
| | | ACAATAAATACATACATTAAAAAATAAGTAAATGTA | |
| 3UTR-012 | Col6a1; | CCCACCCTGCACGCCGGCACCAAACCCTGTCCTCCCACC | 16 |
| | collagen, type | CCTCCCCACTCATCACTAAACAGAGTAAAATGTGATGCG | |
| | VI, alpha 1 | AATTTTCCCGACCAACCTGATTCGCTAGATTTTTTTTAA | |
| | | GGAAAAGCTTGGAAAGCCAGGACACAACGCTGCTGCCTG | |
| | | CTTTGTGCAGGGTCCTCCGGGGCTCAGCCCTGAGTTGGC | |
| | | ATCACCTGCGCAGGGCCCTCTGGGGCTCAGCCCTGAGCT | |
| | | AGTGTCACCTGCACAGGGCCCTCTGAGGCTCAGCCCTGA | |
| | | GCTGGCGTCACCTGTGCAGGGCCCTCTGGGGCTCAGCCC | |
| | | TGAGCTGGCCTCACCTGGGTTCCCCACCCCGGGCTCTCC | |
| | | TGCCCTGCCCTCCTGCCCGCCCTCCCTCCTGCCTGCGCA | |
| | | GCTCCTTCCCTAGGCACCTCTGTGCTGCATCCCACCAGC | |
| | | CTGAGCAAGACGCCCTCTCGGGGCCTGTGCCGCACTAGC | |
| | | CTCCCTCTCCTCTGTCCCCATAGCTGGTTTTTCCCACCA | |
| | | ATCCTCACCTAACAGTTACTTTACAATTAAACTCAAAGC | |
| | | AAGCTCTTCTCCTCAGCTTGGGGCAGCCATTGGCCTCTG | |
| | | TCTCGTTTTGGGAAACCAAGGTCAGGAGGCCGTTGCAGA | |
| | | CATAAATCTCGGCGACTCGGCCCCGTCTCCTGAGGGTCC | |
| | | TGCTGGTGACCGGCCTGGACCTTGGCCCTACAGCCCTGG | |
| | | AGGCCGCTGCTGACCAGCACTGACCCCGACCTCAGAGAG | |
| | | TACTCGCAGGGGCGCTGGCTGCACTCAAGACCCTCGAGA | |
| | | TTAACGGTGCTAACCCCGTCTGCTCCTCCCTCCCGCAGA | |
| | | GACTGGGGCCTGGACTGGACATGAGAGCCCCTTGGTGCC | |
| | | ACAGAGGGCTGTGTCTTACTAGAAACAACGCAAACCTCT | |
| | | CCTTCCTCAGAATAGTGATGTGTTCGACGTTTTATCAAA | |
| | | GGCCCCCTTTCTATGTTCATGTTAGTTTTGCTCCTTCTG | |
| | | TGTTTTTTTCTGAACCATATCCATGTTGCTGACTTTTCC | |
| | | AAATAAAGGTTTTCACTCCTCTC | |
| 3UTR-013 | Calr; | AGAGGCCTGCCTCCAGGGCTGGACTGAGGCCTGAGCGCT | 17 |
| | calreticulin | CCTGCCGCAGAGCTGGCCGCGCCAAATAATGTCTCTGTG | |
| | | AGACTCGAGAACTTTCATTTTTTTCCAGGCTGGTTCGGA | |
| | | TTTGGGGTGGATTTTGGTTTTGTTCCCCTCCTCCACTCT | |
| | | CCCCCACCCCCTCCCCGCCCTTTTTTTTTTTTTTTTTTA | |
| | | AACTGGTATTTTATCTTTGATTCTCCTTCAGCCCTCACC | |
| | | CCTGGTTCTCATCTTTCTTGATCAACATCTTTTCTTGCC | |
| | | TCTGTCCCCTTCTCTCATCTCTTAGCTCCCCTCCAACCT | |
| | | GGGGGGCAGTGGTGTGGAGAAGCCACAGGCCTGAGATTT | |
| | | CATCTGCTCTCCTTCCTGGAGCCCAGAGGAGGGCAGCAG | |
| | | AAGGGGGTGGTGTCTCCAACCCCCCAGCACTGAGGAAGA | |
| | | ACGGGGCTCTTCTCATTTCACCCCTCCCTTTCTCCCCTG | |
| | | CCCCCAGGACTGGGCCACTTCTGGGTGGGGCAGTGGGTC | |
| | | CCAGATTGGCTCACACTGAGAATGTAAGAACTACAAACA | |
| | | AAATTTCTATTAAATTAAATTTTGTGTCTCC | |
| 3UTR-014 | Col1a1; | CTCCCTCCATCCCAACCTGGCTCCCTCCCACCCAACCAA | 18 |
| | collagen, type | CTTTCCCCCCAACCCGGAAACAGACAAGCAACCCAAACT | |
| | I, alpha 1 | GAACCCCCTCAAAAGCCAAAAAATGGGAGACAATTTCAC | |
| | | ATGGACTTTGGAAAATATTTTTTTCCTTTGCATTCATCT | |
| | | CTCAAACTTAGTTTTTATCTTTGACCAACCGAACATGAC | |
| | | CAAAAACCAAAAGTGCATTCAACCTTACCAAAAAAAAAA | |
| | | AAAAAAAAAGAATAAATAAATAACTTTTTAAAAAAGGAA | |
| | | GCTTGGTCCACTTGCTTGAAGACCCATGCGGGGGTAAGT | |
| | | CCCTTTCTGCCCGTTGGGCTTATGAAACCCCAATGCTGC | |
| | | CCTTTCTGCTCCTTTCTCCACACCCCCCTTGGGGCCTCC | |
| | | CCTCCACTCCTTCCCAAATCTGTCTCCCCAGAAGACACA | |
| | | GGAAACAATGTATTGTCTGCCCAGCAATCAAAGGCAATG | |
| | | CTCAAACACCCAAGTGGCCCCCACCCTCAGCCCGCTCCT | |
| | | GCCCGCCCAGCACCCCCAGGCCCTGGGGGACCTGGGGTT | |
| | | CTCAGACTGCCAAAGAAGCCTTGCCATCTGGCGCTCCCA | |
| | | TGGCTCTTGCAACATCTCCCCTTCGTTTTTGAGGGGGTC | |
| | | ATGCCGGGGGAGCCACCAGCCCCTCACTGGGTTCGGAGG | |
| | | AGAGTCAGGAAGGGCCACGACAAAGCAGAAACATCGGAT | |
| | | TTGGGGAACGCGTGTCAATCCCTTGTGCCGCAGGGCTGG | |
| | | GCGGGAGAGACTGTTCTGTTCCTTGTGTAACTGTGTTGC | |
| | | TGAAAGACTACCTCGTTCTTGTCTTGATGTGTCACCGGG | |
| | | GCAACTGCCTGGGGGCGGGGATGGGGGCAGGGTGGAAGC | |
| | | GGCTCCCCATTTTATACCAAAGGTGCTACATCTATGTGA | |
| | | TGGGTGGGGTGGGGAGGGAATCACTGGTGCTATAGAAAT | |
| | | TGAGATGCCCCCCCAGGCCAGCAAATGTTCCTTTTTGTT | |
| | | CAAAGTCTATTTTTATTCCTTGATATTTTTCTTTTTTTT | |
| | | TTTTTTTTTTTGTGGATGGGGACTTGTGAATTTTTCTAA | |
| | | AGGTGCTATTTAACATGGGAGGAGAGCGTGTGCGGCTCC | |
| | | AGCCCAGCCCGCTGCTCACTTTCCACCCTCTCTCCACCT | |
| | | GCCTCTGGCTTCTCAGGCCTCTGCTCTCCGACCTCTCTC | |
| | | CTCTGAAACCCTCCTCCACAGCTGCAGCCCATCCTCCCG | |
| | | GCTCCCTCCTAGTCTGTCCTGCGTCCTCTGTCCCCGGGT | |
| | | TTCAGAGACAACTTCCCAAAGCACAAAGCAGTTTTTCCC | |
| | | CCTAGGGGTGGGAGGAAGCAAAAGACTCTGTACCTATTT | |
| | | TGTATGTGTATAATAATTTGAGATGTTTTTAATTATTTT | |
| | | GATTGCTGGAATAAAGCATGTGGAAATGACCCAAACATA | |
| | | ATCCGCAGTGGCCTCCTAATTTCCTTCTTTGGAGTTGGG | |
| | | GGAGGGGTAGACATGGGGAAGGGGCTTTGGGGTGATGGG | |
| | | CTTGCCTTCCATTCCTGCCCTTTCCCTCCCCACTATTCT | |
| | | CTTCTAGATCCCTCCATAACCCCACTCCCCTTTCTCTCA | |
| | | CCCTTCTTATACCGCAAACCTTTCTACTTCCTCTTTCAT | |
| | | TTTCTATTCTTGCAATTTCCTTGCACCTTTTCCAAATCC | |
| | | TCTTCTCCCCTGCAATACCATACAGGCAATCCACGTGCA | |
| | | CAACACACACACACACTCTTCACATCTGGGGTTGTCCAA | |
| | | ACCTCATACCCACTCCCCTTCAAGCCCATCCACTCTCCA | |
| | | CCCCCTGGATGCCCTGCACTTGGTGGCGGTGGGATGCTC | |
| | | ATGGATACTGGGAGGGTGAGGGGAGTGGAACCCGTGAGG | |
| | | AGGACCTGGGGGCCTCTCCTTGAACTGACATGAAGGGTC | |
| | | ATCTGGCCTCTGCTCCCTTCTCACCCACGCTGACCTCCT | |
| | | GCCGAAGGAGCAACGCAACAGGAGAGGGGTCTGCTGAGC | |
| | | CTGGCGAGGGTCTGGGAGGGACCAGGAGGAAGGCGTGCT | |
| | | CCCTGCTCGCTGTCCTGGCCCTGGGGGAGTGAGGGAGAC | |
| | | AGACACCTGGGAGAGCTGTGGGGAAGGCACTCGCACCGT | |
| | | GCTCTTGGGAAGGAAGGAGACCTGGCCCTGCTCACCACG | |
| | | GACTGGGTGCCTCGACCTCCTGAATCCCCAGAACACAAC | |
| | | CCCCCTGGGCTGGGGTGGTCTGGGGAACCATCGTGCCCC | |
| | | CGCCTCCCGCCTACTCCTTTTTAAGCTT | |
| 3UTR-015 | Plod1; | TTGGCCAGGCCTGACCCTCTTGGACCTTTCTTCTTTGCC | 19 |
| | procollagen- | GACAACCACTGCCCAGCAGCCTCTGGGACCTCGGGGTCC | |
| | lysine, | CAGGGAACCCAGTCCAGCCTCCTGGCTGTTGACTTCCCA | |
| | 2-oxoglutarate | TTGCTCTTGGAGCCACCAATCAAAGAGATTCAAAGAGAT | |
| | 5-dioxygenase 1 | TCCTGCAGGCCAGAGGCGGAACACACCTTTATGGCTGGG | |
| | | GCTCTCCGTGGTGTTCTGGACCCAGCCCCTGGAGACACC | |
| | | ATTCACTTTTACTGCTTTGTAGTGACTCGTGCTCTCCAA | |
| | | CCTGTCTTCCTGAAAAACCAAGGCCCCCTTCCCCCACCT | |
| | | CTTCCATGGGGTGAGACTTGAGCAGAACAGGGGCTTCCC | |
| | | CAAGTTGCCCAGAAAGACTGTCTGGGTGAGAAGCCATGG | |
| | | CCAGAGCTTCTCCCAGGCACAGGTGTTGCACCAGGGACT | |
| | | TCTGCTTCAAGTTTTGGGGTAAAGACACCTGGATCAGAC | |
| | | TCCAAGGGCTGCCCTGAGTCTGGGACTTCTGCCTCCATG | |
| | | GCTGGTCATGAGAGCAAACCGTAGTCCCCTGGAGACAGC | |
| | | GACTCCAGAGAACCTCTTGGGAGACAGAAGAGGCATCTG | |
| | | TGCACAGCTCGATCTTCTACTTGCCTGTGGGGAGGGGAG | |
| | | TGACAGGTCCACACACCACACTGGGTCACCCTGTCCTGG | |
| | | ATGCCTCTGAAGAGAGGGACAGACCGTCAGAAACTGGAG | |
| | | AGTTTCTATTAAAGGTCATTTAAACCA | |
| 3UTR-016 | Nucb1; | TCCTCCGGGACCCCAGCCCTCAGGATTCCTGATGCTCCA | 20 |
| | nucleobindin 1 | AGGCGACTGATGGGCGCTGGATGAAGTGGCACAGTCAGC | |
| | | TTCCCTGGGGGCTGGTGTCATGTTGGGCTCCTGGGGCGG | |
| | | GGGCACGGCCTGGCATTTCACGCATTGCTGCCACCCCAG | |
| | | GTCCACCTGTCTCCACTTTCACAGCCTCCAAGTCTGTGG | |
| | | CTCTTCCCTTCTGTCCTCCGAGGGGCTTGCCTTCTCTCG | |
| | | TGTCCAGTGAGGTGCTCAGTGATCGGCTTAACTTAGAGA | |
| | | AGCCCGCCCCCTCCCCTTCTCCGTCTGTCCCAAGAGGGT | |
| | | CTGCTCTGAGCCTGCGTTCCTAGGTGGCTCGGCCTCAGC | |
| | | TGCCTGGGTTGTGGCCGCCCTAGCATCCTGTATGCCCAC | |
| | | AGCTACTGGAATCCCCGCTGCTGCTCCGGGCCAAGCTTC | |
| | | TGGTTGATTAATGAGGGCATGGGGTGGTCCCTCAAGACC | |
| | | TTCCCCTACCTTTTGTGGAACCAGTGATGCCTCAAAGAC | |
| | | AGTGTCCCCTCCACAGCTGGGTGCCAGGGGCAGGGGATC | |
| | | CTCAGTATAGCCGGTGAACCCTGATACCAGGAGCCTGGG | |
| | | CCTCCCTGAACCCCTGGCTTCCAGCCATCTCATCGCCAG | |
| | | CCTCCTCCTGGACCTCTTGGCCCCCAGCCCCTTCCCCAC | |
| | | ACAGCCCCAGAAGGGTCCCAGAGCTGACCCCACTCCAGG | |
| | | ACCTAGGCCCAGCCCCTCAGCCTCATCTGGAGCCCCTGA | |
| | | AGACCAGTCCCACCCACCTTTCTGGCCTCATCTGACACT | |
| | | GCTCCGCATCCTGCTGTGTGTCCTGTTCCATGTTCCGGT | |
| | | TCCATCCAAATACACTTTCTGGAACAAA | |
| 3UTR-017 | α-globin | GCTGGAGCCTCGGTGGCCATGCTTCTTGCCCCTTGGGCC | 21 |
| | | TCCCCCCAGCCCCTCCTCCCCTTCCTGCACCCGTACCCC | |
| | | CGTGGTCTTTGAATAAAGTCTGAGTGGGCGGC | |

[0195] It should be understood that those listed in the previous tables are examples and that any UTR from any gene may be incorporated into the respective first or second flanking region of the primary construct. Furthermore, multiple wild-type UTRs of any known gene may be utilized. It is also within the scope of the present invention to provide artificial UTRs which are not variants of wild type genes. These UTRs or portions thereof may be placed in the same orientation as in the transcript from which they were selected or may be altered in orientation or location. Hence a 5′ or 3′ UTR may be inverted, shortened, lengthened, made chimeric with one or more other 5′ UTRs or 3′ UTRs. As used herein, the term “altered” as it relates to a UTR sequence, means that the UTR has been changed in some way in relation to a reference sequence. For example, a 3′ or 5′ UTR may be altered relative to a wild type or native UTR by the change in orientation or location as taught above or may be altered by the inclusion of additional nucleotides, deletion of nucleotides, swapping or transposition of nucleotides. Any of these changes producing an “altered” UTR (whether 3′ or 5′) comprise a variant UTR.

[0196] In one embodiment, a double, triple or quadruple UTR such as a 5′ or 3′ UTR may be used. As used herein, a “double” UTR is one in which two copies of the same UTR are encoded either in series or substantially in series. For example, a double beta-globin 3′ UTR may be used as described in US Patent publication 20100129877, the contents of which are incorporated herein by reference in its entirety.

[0197] It is also within the scope of the present invention to have patterned UTRs. As used herein “patterned UTRs” are those UTRs which reflect a repeating or alternating pattern, such as ABABAB or AABBAABBAABB or ABCABCABC or variants thereof repeated once, twice, or more than 3 times. In these patterns, each letter, A, B, or C represent a different UTR at the nucleotide level.

[0198] In one embodiment, flanking regions are selected from a family of transcripts whose proteins share a common function, structure, feature of property. For example, polypeptides of interest may belong to a family of proteins which are expressed in a particular cell, tissue or at some time during development. The UTRs from any of these genes may be swapped for any other UTR of the same or different family of proteins to create a new chimeric primary transcript. As used herein, a “family of proteins” is used in the broadest sense to refer to a group of two or more polypeptides of interest which share at least one function, structure, feature, localization, origin, or expression pattern.

[0199] After optimization (if desired), the primary construct components are reconstituted and transformed into a vector such as, but not limited to, plasmids, viruses, cosmids, and artificial chromosomes. For example, the optimized construct may be reconstituted and transformed into chemically competent E. coli, yeast, neurospora, maize, drosophila, etc. where high copy plasmid-like or chromosome structures occur by methods described herein.

[0200] The untranslated region may also include translation enhancer elements (TEE). As a non-limiting example, the TEE may include those described in US Application No. 20090226470, herein incorporated by reference in its entirety, and those known in the art.

### Stop Codons

[0201] In one embodiment, the primary constructs of the present invention may include at least two stop codons before the 3′ untranslated region (UTR). The stop codon may be selected from TGA, TAA and TAG. In one embodiment, the primary constructs of the present invention include the stop codon TGA and one additional stop codon. In a further embodiment the addition stop codon may be TAA. In another embodiment, the primary constructs of the present invention include three stop codons.

### Vector Amplification

[0202] The vector containing the primary construct is then amplified and the plasmid isolated and purified using methods known in the art such as, but not limited to, a maxi prep using the Invitrogen PURELINK™ HiPure Maxiprep Kit (Carlsbad, CA).

### Plasmid Linearization

[0203] The plasmid may then be linearized using methods known in the art such as, but not limited to, the use of restriction enzymes and buffers. The linearization reaction may be purified using methods including, for example Invitrogen's PURELINK™ PCR Micro Kit (Carlsbad, CA), and HPLC based purification methods such as, but not limited to, strong anion exchange HPLC, weak anion exchange HPLC, reverse phase HPLC (RP-HPLC), and hydrophobic interaction HPLC (HIC-HPLC) and Invitrogen's standard PURELINK™ PCR Kit (Carlsbad, CA). The purification method may be modified depending on the size of the linearization reaction which was conducted. The linearized plasmid is then used to generate cDNA for in vitro transcription (IVT) reactions.

cDNA Template Synthesis

[0204] A cDNA template may be synthesized by having a linearized plasmid undergo polymerase chain reaction (PCR). Table 4 is a listing of primers and probes that may be usefully in the PCR reactions of the present invention. It should be understood that the listing is not exhaustive and that primer-probe design for any amplification is within the skill of those in the art. Probes may also contain chemically modified bases to increase base-pairing fidelity to the target molecule and base-pairing strength. Such modifications may include 5-methyl-Cytidine, 2,6-di-amino-purine, 2′-fluoro, phosphoro-thioate, or locked nucleic acids.

TABLE 4
Primers and Probes

| Primer/Probe | | | SEQ |
|---|---|---|---|
| Identifier | Sequence (5′-3′) | Hybridization target | ID NO. |
| UFP | TTGGACCCTCGTACAGAAGCTAATACG | cDNA Template | 22 |
| URP | Tₓ₁₆₀CTTCCTACTCAGGCTTTATTCAAAGACCA | cDNA Template | 23 |
| GBA1 | CCTTGACCTTCTGGAACTTC | Acid glucocerebrosidase | 24 |
| GBA2 | CCAAGCACTGAAACGGATAT | Acid glucocerebrosidAase | 25 |
| LUC1 | GATGAAAAGTGCTCCAAGGA | Luciferase | 26 |
| LUC2 | AACCGTGATGAAAAGGTACC | Luciferase | 27 |
| LUC3 | TCATGCAGATTGGAAAGGTC | Luciferase | 28 |
| GCSF1 | CTTCTTGGACTGTCCAGAGG | G-CSF | 29 |
| GCSF2 | GCAGTCCCTGATACAAGAAC | G-CSF | 30 |
| GCSF3 | GATTGAAGGTGGCTCGCTAC | G-CSF | 31 |

*UFP is universal forward primer; URP is universal reverse primer.

[0205] In one embodiment, the cDNA may be submitted for sequencing analysis before undergoing transcription.

mRNA Production

[0206] The process of mRNA or mmRNA production may include, but is not limited to, in vitro transcription, cDNA template removal and RNA clean-up, and mRNA capping and/or tailing reactions.

### In Vitro Transcription

[0207] The cDNA produced in the previous step may be transcribed using an in vitro transcription (IVT) system. The system typically comprises a transcription buffer, nucleotide triphosphates (NTPs), an RNase inhibitor and a polymerase. The NTPs may be manufactured in house, may be selected from a supplier, or may be synthesized as described herein. The NTPs may be selected from, but are not limited to, those described herein including natural and unnatural (modified) NTPs. The polymerase may be selected from, but is not limited to, T7 RNA polymerase, T3 RNA polymerase and mutant polymerases such as, but not limited to, polymerases able to incorporate modified nucleic acids.

### RNA Polymerases

[0208] Any number of RNA polymerases or variants may be used in the design of the primary constructs of the present invention.

[0209] RNA polymerases may be modified by inserting or deleting amino acids of the RNA polymerase sequence. As a non-limiting example, the RNA polymerase may be modified to exhibit an increased ability to incorporate a 2′-modified nucleotide triphosphate compared to an unmodified RNA polymerase (see International Publication WO2008078180 and U.S. Pat. No. 8,101,385; herein incorporated by reference in their entireties).

[0210] Variants may be obtained by evolving an RNA polymerase, optimizing the RNA polymerase amino acid and/or nucleic acid sequence and/or by using other methods known in the art. As a non-limiting example, T7 RNA polymerase variants may be evolved using the continuous directed evolution system set out by Esvelt et al. (Nature (2011) 472(7344):499-503; herein incorporated by reference in its entirety) where clones of T7 RNA polymerase may encode at least one mutation such as, but not limited to, lysine at position 93 substituted for threonine (K93T), I4M, A7T, E63V, V64D, A65E, D66Y, T76N, C125R, S128R, A136T, N165S, G175R, H176L, Y178H, F182L, L196F, G198V, D208Y, E222K, S228A, Q239R, T243N, G259D, M267I, G280C, H300R, D351A, A354S, E356D, L360P, A383V, Y385C, D388Y, S397R, M401T, N410S, K450R, P451T, G452V, E484A, H523L, H524N, G542V, E565K, K577E, K577M, N601S, S684Y, L699I, K713E, N748D, Q754R, E775K, A827V, D851N or L864F. As another non-limiting example, T7 RNA polymerase variants may encode at least mutation as described in U.S. Pub. Nos. 20100120024 and 20070117112; herein incorporated by reference in their entireties. Variants of RNA polymerase may also include, but are not limited to, substitutional variants, conservative amino acid substitution, insertional variants, deletional variants and/or covalent derivatives.

[0211] In one embodiment, the primary construct may be designed to be recognized by the wild type or variant RNA polymerases. In doing so, the primary construct may be modified to contain sites or regions of sequence changes from the wild type or parent primary construct.

[0212] In one embodiment, the primary construct may be designed to include at least one substitution and/or insertion upstream of an RNA polymerase binding or recognition site, downstream of the RNA polymerase binding or recognition site, upstream of the TATA box sequence, downstream of the TATA box sequence of the primary construct but upstream of the coding region of the primary construct, within the 5′UTR, before the 5′UTR and/or after the 5′UTR.

[0213] In one embodiment, the 5′UTR of the primary construct may be replaced by the insertion of at least one region and/or string of nucleotides of the same base. The region and/or string of nucleotides may include, but is not limited to, at least 3, at least 4, at least 5, at least 6, at least 7 or at least 8 nucleotides and the nucleotides may be natural and/or unnatural. As a non-limiting example, the group of nucleotides may include 5-8 adenine, cytosine, thymine, a string of any of the other nucleotides disclosed herein and/or combinations thereof.

[0214] In one embodiment, the 5′UTR of the primary construct may be replaced by the insertion of at least two regions and/or strings of nucleotides of two different bases such as, but not limited to, adenine, cytosine, thymine, any of the other nucleotides disclosed herein and/or combinations thereof. For example, the 5′UTR may be replaced by inserting 5-8 adenine bases followed by the insertion of 5-8 cytosine bases. In another example, the 5′UTR may be replaced by inserting 5-8 cytosine bases followed by the insertion of 5-8 adenine bases.

[0215] In one embodiment, the primary construct may include at least one substitution and/or insertion downstream of the transcription start site which may be recognized by an RNA polymerase. As a non-limiting example, at least one substitution and/or insertion may occur downstream the transcription start site by substituting at least one nucleic acid in the region just downstream of the transcription start site (such as, but not limited to, +1 to +6). Changes to region of nucleotides just downstream of the transcription start site may affect initiation rates, increase apparent nucleotide triphosphate (NTP) reaction constant values, and increase the dissociation of short transcripts from the transcription complex curing initial transcription (Brieba et al, Biochemistry (2002) 41: 5144-5149; herein incorporated by reference in its entirety). The modification, substitution and/or insertion of at least one nucleic acid may cause a silent mutation of the nucleic acid sequence or may cause a mutation in the amino acid sequence.

[0216] In one embodiment, the primary construct may include the substitution of at least 1, at least 2, at least 3, at least 4, at least 5, at least 6, at least 7, at least 8, at least 9, at least 10, at least 11, at least 12 or at least 13 guanine bases downstream of the transcription start site.

[0217] In one embodiment, the primary construct may include the substitution of at least 1, at least 2, at least 3, at least 4, at least 5 or at least 6 guanine bases in the region just downstream of the transcription start site. As a non-limiting example, if the nucleotides in the region are GGGAGA the guanine bases may be substituted by at least 1, at least 2, at least 3 or at least 4 adenine nucleotides. In another non-limiting example, if the nucleotides in the region are GGGAGA the guanine bases may be substituted by at least 1, at least 2, at least 3 or at least 4 cytosine bases. In another non-limiting example, if the nucleotides in the region are GGGAGA the guanine bases may be substituted by at least 1, at least 2, at least 3 or at least 4 thymine, and/or any of the nucleotides described herein.

[0218] In one embodiment, the primary construct may include at least one substitution and/or insertion upstream of the start codon. For the purpose of clarity, one of skill in the art would appreciate that the start codon is the first codon of the protein coding region whereas the transcription start site is the site where transcription begins. The primary construct may include, but is not limited to, at least 1, at least 2, at least 3, at least 4, at least 5, at least 6, at least 7 or at least 8 substitutions and/or insertions of nucleotide bases. The nucleotide bases may be inserted or substituted at 1, at least 1, at least 2, at least 3, at least 4 or at least 5 locations upstream of the start codon. The nucleotides inserted and/or substituted may be the same base (e.g., all A or all C or all T or all G), two different bases (e.g., A and C, A and I, or C and I), three different bases (e.g., A, C and T or A, C and T) or at least four different bases. As a non-limiting example, the guanine base upstream of the coding region in the primary construct may be substituted with adenine, cytosine, thymine, or any of the nucleotides described herein. In another non-limiting example the substitution of guanine bases in the primary construct may be designed so as to leave one guanine base in the region downstream of the transcription start site and before the start codon (see Esvelt et al. Nature (2011) 472(7344):499-503; herein incorporated by reference in its entirety). As a non-limiting example, at least 5 nucleotides may be inserted at 1 location downstream of the transcription start site but upstream of the start codon and the at least 5 nucleotides may be the same base type.

cDNA Template Removal and Clean-Up

[0219] The cDNA template may be removed using methods known in the art such as, but not limited to, treatment with Deoxyribonuclease I (DNase I). RNA clean-up may also include a purification method such as, but not limited to, AGENCOURT● CLEANSEQ● system from Beckman Coulter (Danvers, MA), HPLC based purification methods such as, but not limited to, strong anion exchange HPLC, weak anion exchange HPLC, reverse phase HPLC (RP-HPLC), and hydrophobic interaction HPLC (HIC-HPLC).

Capping and/or Tailing Reactions

[0220] The primary construct or mmRNA may also undergo capping and/or tailing reactions. A capping reaction may be performed by methods known in the art to add a 5′ cap to the 5′ end of the primary construct. Methods for capping include, but are not limited to, using a Vaccinia Capping enzyme (New England Biolabs, Ipswich, MA).

[0221] A poly-A tailing reaction may be performed by methods known in the art, such as, but not limited to, 2′ O-methyltransferase and by methods as described herein. If the primary construct generated from cDNA does not include a poly-T, it may be beneficial to perform the poly-A-tailing reaction before the primary construct is cleaned.

mRNA Purification

[0222] Primary construct or mmRNA purification may include, but is not limited to, mRNA or mmRNA clean-up, quality assurance and quality control. mRNA or mmRNA clean-up may be performed by methods known in the arts such as, but not limited to, AGENCOURT● beads (Beckman Coulter Genomics, Danvers, MA), poly-T beads, LNA™ oligo-T capture probes (EXIQON Inc, Vedbaek, Denmark) or HPLC based purification methods such as, but not limited to, strong anion exchange HPLC, weak anion exchange HPLC, reverse phase HPLC (RP-HPLC), and hydrophobic interaction HPLC (HIC-HPLC). The term “purified” when used in relation to a polynucleotide such as a “purified mRNA or mmRNA” refers to one that is separated from at least one contaminant. As used herein, a “contaminant” is any substance which makes another unfit, impure or inferior. Thus, a purified polynucleotide (e.g., DNA and RNA) is present in a form or setting different from that in which it is found in nature, or a form or setting different from that which existed prior to subjecting it to a treatment or purification method.

[0223] A quality assurance and/or quality control check may be conducted using methods such as, but not limited to, gel electrophoresis, UV absorbance, or analytical HPLC.

[0224] In another embodiment, the mRNA or mmRNA may be sequenced by methods including, but not limited to reverse-transcriptase-PCR.

[0225] In one embodiment, the mRNA or mmRNA may be quantified using methods such as, but not limited to, ultraviolet visible spectroscopy (UV/Vis). A non-limiting example of a UV/Vis spectrometer is a NANODROP● spectrometer (ThermoFisher, Waltham, MA). The quantified mRNA or mmRNA may be analyzed in order to determine if the mRNA or mmRNA may be of proper size, check that no degradation of the mRNA or mmRNA has occurred. Degradation of the mRNA and/or mmRNA may be checked by methods such as, but not limited to, agarose gel electrophoresis, HPLC based purification methods such as, but not limited to, strong anion exchange HPLC, weak anion exchange HPLC, reverse phase HPLC (RP-HPLC), and hydrophobic interaction HPLC (HIC-HPLC), liquid chromatography-mass spectrometry (LCMS), capillary electrophoresis (CE) and capillary gel electrophoresis (CGE).

### Signal Sequences

[0226] The primary constructs or mmRNA may also encode additional features which facilitate trafficking of the polypeptides to therapeutically relevant sites. One such feature which aids in protein trafficking is the signal sequence. As used herein, a “signal sequence” or “signal peptide” is a polynucleotide or polypeptide, respectively, which is from about 9 to 200 nucleotides (3-60 amino acids) in length which is incorporated at the 5′ (or N-terminus) of the coding region or polypeptide encoded, respectively. Addition of these sequences result in trafficking of the encoded polypeptide to the endoplasmic reticulum through one or more secretory pathways. Some signal peptides are cleaved from the protein by signal peptidase after the proteins are transported.

[0227] Table 5 is a representative listing of protein signal sequences which may be incorporated for encoding by the polynucleotides, primary constructs or mmRNA of the invention.

TABLE 5
Signal Sequences

| | | | SEQ | | SEQ |
|---|---|---|---|---|---|
| ID | Description | NUCLEOTIDE SEQUENCE (5′-3′) | ID NO. | ENCODED PEPTIDE | ID NO. |
| SS-001 | α-1-antitrypsin | ATGATGCCATCCTCAGTCTCATGGGGT | 32 | MMPSSVSWGILLAGL | 94 |
| | | ATTTTGCTCTTGGCGGGTCTGTGCTGT | | CCLVPVSLA | |
| | | CTCGTGCCGGTGTCGCTCGCA | | | |
| SS-002 | G-CSF | ATGGCCGGACCGGCGACTCAGTCGCCC | 33 | MAGPATQSPMKLMAL | 95 |
| | | ATGAAACTCATGGCCCTGCAGTTGTTG | | QLLLWHSALWTVQEA | |
| | | CTTTGGCACTCAGCCCTCTGGACCGTC | | | |
| | | CAAGAGGCG | | | |
| SS-003 | Factor IX | ATGCAGAGAGTGAACATGATTATGGCC | 34 | MQRVNMIMAESPSLI | 96 |
| | | GAGTCCCCATCGCTCATCACAATCTGC | | TICLLGYLLSAECTV | |
| | | CTGCTTGGTACCTGCTTTCCGCCGAAT | | FLDHENANKILNRPK | |
| | | GCACTGTCTTTCTGGATCACGAGAATG | | R | |
| | | CGAATAAGATCTTGAACCGACCCAAAC | | | |
| | | GG | | | |
| SS-004 | Prolactin | ATGAAAGGATCATTGCTGTTGCTCCTC | 35 | MKGSLLLLLVSNLLL | 97 |
| | | GTGTCGAACCTTCTGCTTTGCCAGTCC | | CQSVAP | |
| | | GTAGCCCCC | | | |
| SS-005 | Albumin | ATGAAATGGGTGACGTTCATCTCACTG | 36 | MKWVTFISLLFLFSS | 98 |
| | | TTGTTTTTGTTCTCGTCCGCCTACTCC | | AYSRG VFRR | |
| | | AGGGGAGTATTCCGCCGA | | | |
| SS-006 | HMMSP38 | ATGTGGTGGCGGCTCTGGTGGCTGCTC | 37 | MWWRLWWLLLLLLLL | 99 |
| | | CTGTTGCTCCTCTTGCTGTGGCCCATG | | WA | |
| | | GTGTGGGCA | | | |
| MLS-001 | ornithine | TGCTCTTTAACCTCCGCATCCTGTTGA | 38 | MLFNLRILLNNAAFR | 100 |
| | carbamoyltransferase | ATAACGCTGCGTTCCGAAATGGGCATA | | NGHNFMVRNFRCGQP | |
| | | ACTTCATGGTACGCAACTTCAGATGCG | | LQ | |
| | | GCCAGCCACTCCAG | | | |
| MLS-002 | Cytochrome C | ATGTCCGTCTTGACACCCCTGCTCTT | 39 | MSVLTPLLLRGLTGS | 101 |
| | Oxidase subunit 8A | GAGAGGGCTGACGGGGTCCGCTAGAC | | ARRLPVPRAKIHSL | |
| | | GCCTGCCGGTACCGCGAGCGAAGATC | | | |
| | | CACTCCCTG | | | |
| MLS-003 | Cytochrome C | ATGAGCGTGCTCACTCCGTTGCTTCT | 40 | MSVLTPLLLRGLTGS | 102 |
| | Oxidase subunit 8A | TCGAGGGCTTACGGGATCGGCTCGGA | | ARRLPVPRAKIHSL | |
| | | GGTTGCCCGTCCCGAGAGCGAAGATC | | | |
| | | CATTCGTTG | | | |
| SS-007 | Type III, bacterial | TGACAAAAATAACTTTATCTCCCCAG | 41 | MVTKITLSPQVFRIQ | 103 |
| | | AATTTTAGAATCCAAAAACAGGAAAC | | KQETTLLKEKSTEKN | |
| | | CACACTACTAAAAGAAAAATCAACCG | | SLAKSILAVKNHFIE | |
| | | AGAAAAATTCTTTAGCAAAAAGTATT | | LRSKLSERFISHKNT | |
| | | CTCGCAGTAAAAATCACTTCATCGAA | | | |
| | | TTAAGGTCAAAATTATCGGAACGTTT | | | |
| | | TATTTCGCATAAGAACACT | | | |
| SS-008 | Viral | ATGCTGAGCTTTGTGGATACCCGCAC | 42 | MLSFVDTRTLLLLAV | 104 |
| | | CCTGCTGCTGCTGGCGGTGACCAGCT | | TSCLATCQ | |
| | | GCCTGGCGACCTGCCAG | | | |
| SS-009 | viral | ATGGGCAGCAGCCAGGCGCCGCGCAT | 43 | MGSSQAPRMGSVGGH | 105 |
| | | GGGCAGCGTGGGCGGCCATGGCCTGA | | GLMALLMAGLILPGI | |
| | | TGGCGCTGCTGATGGCGGGCCTGATT | | LA | |
| | | CTGCCGGGCATTCTGGCG | | | |
| SS-010 | Viral | ATGGCGGGCATTTTTTATTTTCTGTT | 44 | MAGIFYFLFSFLFGI | 106 |
| | | TAGCTTTCTGTTTGGCATTTGCGAT | | CD | |
| SS-011 | Viral | ATGGAAAACCGCCTGCTGCGCGTGTT | 45 | MENRLLRVFLVWAAL | 107 |
| | | TCTGGTGTGGGCGGCGCTGACCATGG | | TMDGASA | |
| | | ATGGCGCGAGCGCG | | | |
| SS-012 | Viral | ATGGCGCGCCAGGGCTGCTTTGGCAG | 46 | MARQGCFGSYQVISL | 108 |
| | | CTATCAGGTGATTAGCCTGTTTACCT | | FTFAIGVNLCLG | |
| | | TTGCGATTGGCGTGAACCTGTGCCTG | | | |
| | | GGC | | | |
| SS-013 | Bacillus | ATGAGCCGCCTGCCGGTGCTGCTGCT | 47 | MSRLPVLLLLQLLVR | 109 |
| | | GCTGCAGCTGCTGGTGCGCCCGGGCC | | PGLQ | |
| | | TGCAG | | | |
| SS-014 | Bacillus | ATGAAACAGCAGAAACGCCTGTATGC | 48 | MKQQKRLYARLLTLL | 110 |
| | | GCGCCTGCTGACCCTGCTGTTTGCGC | | FALIFLLPHSSASA | |
| | | TGATTTTTCTGCTGCCGCATAGCAGC | | | |
| | | GCGAGCGCG | | | |
| SS-015 | Secretion signal | ATGGCGACGCCGCTGCCTCCGCCCTC | 49 | MATPLPPPSPRHLRL | 111 |
| | | CCCGCGGCACCTGCGGCTGCTGCGGC | | LRLLLSG | |
| | | TGCTGCTCTCCGCCCTCGTCCTCGGC | | | |
| SS-016 | Secretion signal | ATGAAGGCTCCGGGTCGGCTCGTGCT | 50 | MKAPGRLVLIILCSV | 112 |
| | | CATCATCCTGTGCTCCGTGGTCTTCT | | VFS | |
| | | CT | | | |
| SS-017 | Secretion signal | ATGCTTCAGCTTTGGAAACTTGTTCT | 51 | MLQLWKLLCGVLT | 113 |
| | | CCTGTGCGGCGTGCTCACT | | | |
| SS-018 | Secretion signal | ATGCTTTATCTCCAGGGTTGGAGCAT | 52 | MLYLQGWSMPAVA | 114 |
| | | GCCTGCTGTGGCA | | | |
| SS-019 | Secretion signal | ATGGATAACGTGCAGCCGAAAATAAA | 53 | MDNVQPKIKHRPFCF | 115 |
| | | ACATCGCCCCTTCTGCTCAGTGTGAA | | SVKGHVKMLRLDIIN | |
| | | AGGCCACGTGAAGATGCTGCGGCTGG | | SLVTTVFMLIVSVLA | |
| | | ATATTATCAACTCACTGGTAACAACA | | LIP | |
| | | GTATTCATGCTCATCGTATCTGTGTT | | | |
| | | GGCACTGATACCA | | | |
| SS-020 | Secretion signal | ATGCCCTGCCTAGACCAACAGCTCAC | 54 | MPCLDQQLTVHALPC | 116 |
| | | TGTTCATGCCCTACCCTGCCCTGCCC | | PAQPSSLAFCQVGFL | |
| | | AGCCCTCCTCTCTGGCCTTCTGCCAA | | TA | |
| | | GTGGGGTTCTTAACAGCA | | | |
| SS-021 | Secretion signal | ATGAAAACCTTGTTCAATCCAGCCCC | 55 | MKTLFNPAPAIADLD | 117 |
| | | TGCCATTGCTGACCTGGATCCCCAGT | | PQFYTLSDVFCCNES | |
| | | TCTACACCCTCTCAGATGTGTTCTGC | | EAEILTGLTVGSAAD | |
| | | TGCAATGAAAGTGAGGCTGAGATTTT | | A | |
| | | AACTGGCCTCACGGTGGGCAGCGCTG | | | |
| | | CAGATGCT | | | |
| SS-022 | Secretion signal | ATGAAGCCTCTCCTTGTTGTGTTTGT | 56 | MKPLLVVFVFLFLWD | 118 |
| | | CTTTCTTTTCCTTTGGGATCCAGTGC | | PVLA | |
| | | TGGCA | | | |
| SS-023 | Secretion signal | ATGTCCTGTTCCCTAAAGTTTACTTT | 57 | MSCSLKFTLIVIFFT | 119 |
| | | GATTGTAATTTTTTTTTACTGTTGGC | | CTLSSS | |
| | | TTTCATCCAGC | | | |
| SS-024 | Secretion signal | ATGGTTCTTACTAAACCTCTTCAAAG | 58 | MVLTKPLQRMGSMMS | 120 |
| | | AAATGGCAGCATGATGAGCTTTGAAA | | FENVKEKSREGGPHA | |
| | | ATGTGAAAGAAAAGAGCAGAGAAGGA | | HTPEEELCFVVTHTP | |
| | | GGGCCCCATGCACACACACCCGAAGA | | QVQTTLNLFFHIFKV | |
| | | AGAATTGTGTTTCGTGGTAACACACT | | LTQPLSLLWG | |
| | | ACCCTCAGGTTCAGACCACACTCAAC | | | |
| | | CTGTTTTTCCATATATTCAAGGTTCT | | | |
| | | TACTCAACCACTTTCCCTTCTGTGGG | | | |
| | | GT | | | |
| SS-025 | Secretion signal | ATGGCCACCCCGCCATTCCGGCTGAT | 59 | MATPPFRLIRKMFSF | 121 |
| | | AAGGAAGATGTTTTCCTTCAAGGTGA | | KVSRWMGLACFRSLA | |
| | | GCAGATGGATGGGGCTTGCCTGCTTC | | AS | |
| | | CGGTCCCTGGCGGCATCC | | | |
| SS-026 | Secretion signal | ATGAGCTTTTTCCAACTCCTGATGAA | 60 | MSFFQLLMKRKELIP | 122 |
| | | AAGGAAGGAACTCATTCCCTTGGTGG | | LVVFMTVAAGGASS | |
| | | TGTTCATGACTGTGGCGGCGGGTGGA | | | |
| | | GCCTCATCT | | | |
| SS-027 | Secretion signal | ATGGTCTCAGCTCTGCGGGGAGCACC | 61 | MVSALRGAPLIRVHS | 123 |
| | | CCTGATCAGGGTGCACTCAAGCCCTG | | SPVSSPSVSGPAALV | |
| | | TTTCTTCTCCTTCTGTGAGTGGACCA | | SCLSSQSSALS | |
| | | CGGAGGCTGGTGAGCTGCCTGTCATC | | | |
| | | CCAAAGCTCAGCTCTGAGC | | | |
| SS-028 | Secretion signal | ATGATGGGGTCCCCAGTGAGTCATCT | 62 | MMGSPVSHLLAGFCV | 124 |
| | | GCTGGCCGGCTTCTGTGTGTGGGTCG | | WVVLG | |
| | | TCTTGGGC | | | |
| SS-029 | Secretion signal | ATGGCAAGCATGGCTGCCGTGCTCAC | 63 | MASMAAVLTWALALL | 125 |
| | | CTGGGCTCTGGCTCTTCTTTCAGCGT | | SAFSATQA | |
| | | TTTCGGCCACCCAGGCA | | | |
| SS-030 | Secretion signal | ATGGTGCTCATGTGGACCAGTGGTGA | 64 | MVLMWTSGDAFKTAY | 126 |
| | | CGCCTTCAAGACGGCCTACTTCCTGC | | FLLKGAPLQFSVCGL | |
| | | TGAAGGGTGCCCCTCTGCAGTTCTCC | | LQVLVDLAILGQATA | |
| | | GTGTGCGGCCTGCTGCAGGTGCTGGT | | | |
| | | GGACCTGGCCATCCTGGGGCAGGCCT | | | |
| | | ACGCC | | | |
| SS-031 | Secretion signal | ATGGATTTTGTCGCTGGAGCCATCGG | 65 | MDFVAGAIGGVCGVA | 127 |
| | | AGGCGTCTGCGGTGTTGCTGTGGGCT | | VGYPLDTVKVRIQTE | |
| | | ACCCCCTGGACACGGTGAAGGTCAGG | | PLYTGIWHCVRDTYH | |
| | | ATCCAGACGGAGCCAAAGTACACAGG | | RERVWGFYRGLSLPV | |
| | | CATCTGGCACTGCGTCCGGGATACGT | | CTVSLVSS | |
| | | ATCACCGAGAGCGCGTGTGGGGCTTC | | | |
| | | TACCGGGGCCTCTCGCTGCCCGTGTG | | | |
| | | CACGGTGTCCCTGGTATCTTCC | | | |
| SS-032 | Secretion signal | ATGGAGAAGCCCCTCTTCCCATTAGT | 66 | MEKPLFPLVPLHWFG | 128 |
| | | GCCTTTGCATTGGTTTGGCTTTGGCT | | FGYTALVVSGGIVGY | |
| | | ACACAGCACTGGTTGTTTCTGGTGGG | | VKTGSVPSLAAGLLF | |
| | | ATCGTTGGCTATGTAAAAACAGGCAG | | GSLA | |
| | | CGTGCCGTCCCTGGCTGCAGGGCTGC | | | |
| | | TCTTCGGCAGTCTAGCC | | | |
| SS-033 | Secretion signal | ATGGGTCTGCTCCTTCCCCTGGCACT | 67 | MGLLLPLALCILVLC | 129 |
| | | CTGCATCCTAGTCCTGTGC | | | |
| SS-034 | Secretion signal | ATGGGGATCCAGACGAGCCCCGTCCT | 68 | MGIQTSPVLLASLGV | 130 |
| | | GCTGGCCTCCCTGGGGGTGGGGCTGG | | GLVTLLGLAVG | |
| | | TCACTCTGCTCGGCCTGGCTGTGGGC | | | |
| SS-035 | Secretion signal | ATGTCGGACCTGCTACTACTGGGCCT | 69 | MSDLLLLGLIGGLTL | 131 |
| | | GATTGGGGGCCTGACTCTCTTACTGC | | LLLLTLLAFA | |
| | | TGCTGACGCTGCTAGCCTTTGCC | | | |
| SS-036 | Secretion signal | ATGGAGACTGTGGTGATTGTTGCCAT | 70 | METVVIVAIGVLATI | 132 |
| | | AGGTGTGCTGGCCACCATGTTTCTGG | | FLASFAALVLVCRQ | |
| | | CTTCGTTTGCAGCCTTGGTGCTGGTT | | | |
| | | TGCAGGCAG | | | |
| SS-037 | Secretion signal | ATGCGCGGCTCTGTGGAGTGCACCTG | 71 | MAGSVECTWGWGHCA | 133 |
| | | GGGTTGGGGGCACTGTGCCCCCAGCC | | PSPLLLWTLLLFAAP | |
| | | CCCTGCTCCTTTGGACTCTACTTCTG | | FGLLG | |
| | | TTTGCAGCCCCATTTGGCCTGCTGGG | | | |
| | | G | | | |
| SS-038 | Secretion signal | ATGATGCCGTCCCGTACCAACCTGGC | 72 | MMPSRTNLATGIPSS | 134 |
| | | TACTGGAATCCCCAGTAGTAAAGTGA | | KVKYSRLSSTDDGYI | |
| | | AATATTCAAGGCTCTCCAGCACAGAC | | DLQFKKTPPKIPYKA | |
| | | GATGGCTACATTGACCTTCAGTTTAA | | IALATVLFLIGA | |
| | | GAAAACCCCTCCTAAGATCCCTTATA | | | |
| | | AGGCCATCGCACTTGCCACTGTGCTG | | | |
| | | TTTTTGATTGGCGCC | | | |
| SS-039 | Secretion signal | ATGGCCCTGCCCCAGATGTGTGACGG | 73 | MALPQMCDGSHLAST | 135 |
| | | GAGCCACTTGGCCTCCACCCTCCGCT | | LRYCMTVSGTVVLVA | |
| | | ATTGCATGACAGTCAGCGGCACAGTG | | GTLCFA | |
| | | GTTCTGGTGGCCGGGACGCTCTGCTT | | | |
| | | CGCT | | | |
| SS-041 | Vrg-6 | TGAAAAAGTGGTTCGTTGCTGCCGGC | 74 | MKKWFVAAGIGAGLL | 136 |
| | | ATCGGCGCTGCCGGACTCATGCTCTC | | MLSSAA | |
| | | CAGCGCCGCCA | | | |
| SS-042 | PhoA | ATGAAACAGAGCACCATTGCGCTGGC | 75 | MKQSTIALALLPLLF | 137 |
| | | GCTGCTGCCGCTGCTGTTTACCCCGG | | TPVTKA | |
| | | TGACCAAAGCG | | | |
| SS-043 | OmpA | ATGAAAAAAACCGCGATTGCGATTGC | 76 | MKKTAIAIAVALAGF | 138 |
| | | GGTGGCGCTGGCGGGCTTTGCGACCG | | ATVAQA | |
| | | TGGCGCAGGCG | | | |
| SS-044 | STI | ATGAAAAAACTGATGCTGGCGATTTT | 77 | MKKLMLAIFFSVLSF | 139 |
| | | TTTTAGCGTGCTGAGCTTTCCGAGCT | | PSFSQS | |
| | | TTAGCCAGAGC | | | |
| SS-045 | STII | ATGAAAAAAAACATTGCGTTTCTGCT | 78 | MKKNIAFLLASMFVF | 140 |
| | | GGCGAGCATGTTTGTGTTTAGCATTG | | SIATNAYA | |
| | | CGACCAACGCGTATGCG | | | |
| SS-046 | Amylase | ATGTTTGCGAAACGCTTTAAAACCAG | 79 | MFAKRFKTSLLPLFA | 141 |
| | | CCTGCTGCCGCTGTTTGCGGGCTTTC | | GFLLLFHLVLAGPAA | |
| | | TGCTGCTGTTTCATCTGGTGCTGGCG | | AS | |
| | | GGCCCGGCGGCGGCGAGC | | | |
| SS-047 | Alpha Factor | ATGCGCTTTCCGAGCATTTTTACCGC | 80 | MRFPSIFTAVLFAAS | 142 |
| | | GGTGCTGTTTGCGGCGAGCAGCGCGC | | SALA | |
| | | TGGCG | | | |
| SS-048 | Alpha Factor | ATGCGCTTTCCGAGCATTTTTACCAC | 81 | MRFPSIFTTVLFAAS | 143 |
| | | CGTGCTGTTTGCGGCGAGCAGCGCGC | | SALA | |
| | | TGGCG | | | |
| SS-049 | Alpha Factor | ATGCGCTTTCCGAGCATTTTTACCAG | 82 | MRFPSIFTSVLFAAS | 144 |
| | | CGTGCTGTTTGCGGCGAGCAGCGCGC | | SALA | |
| | | TGGCG | | | |
| SS-050 | Alpha Factor | ATGCGCTTTCCGAGCATTTTTACCCA | 83 | MRFPSIFTHVLFAAS | 145 |
| | | TGTGCTGTTTGCGGCGAGCAGCGCGC | | SALA | |
| | | TGGCG | | | |
| SS-051 | Alpha Factor | ATGCGCTTTCCGAGCATTTTTACCAT | 84 | MRFPSIFTIVLFAAS | 146 |
| | | TGTGCTGTTTGCGGCGAGCAGCGCGC | | SALA | |
| | | TGGCG | | | |
| SS-052 | Alpha Factor | ATGCGCTTTCCGAGCATTTTTACCTT | 85 | MRFPSIFTFVLFAAS | 147 |
| | | TGTGCTGTTTGCGGCGAGCAGCGCGC | | SALA | |
| | | TGGCG | | | |
| SS-053 | Alpha Factor | ATGCGCTTTCCGAGCATTTTTACCGA | 86 | MRFPSIFTEVLFAAS | 148 |
| | | AGTGCTGTTTGCGGCGAGCAGCGCGC | | SALA | |
| | | TGGCG | | | |
| SS-054 | Alpha Factor | ATGCGCTTTCCGAGCATTTTTACCGG | 87 | MRFPSIFTGVLFAAS | 149 |
| | | CGTGCTGTTTGCGGCGAGCAGCGCGC | | SALA | |
| | | TGGCG | | | |
| SS-055 | Endoglucanase V | ATGCGTTCCTCCCCCCTCCTCCGCTC | 88 | MRSSPLLRSAVVAAL | 150 |
| | | CGCCGTTGTGGCCGCCCTGCCGGTGT | | PVLALA | |
| | | TGGCCCTTGCC | | | |
| SS-056 | Secretion signal | ATGGGCGCGGCGGCCGTGCGCTGGCA | 89 | MGAAAVRWHLCVLLA | 151 |
| | | CTTGTGCGTGCTGCTGGCCCTGGGCA | | LGTRGRL | |
| | | CACGCGGGCGGCTG | | | |
| SS-057 | Fungal | ATGAGGAGCTCCCTTGTGCTGTTCTT | 90 | MRSSLVLFFVSAWTA | 152 |
| | | TGTCTCTGCGTGGACGGCCTTGGCCA | | LA | |
| | | G | | | |
| SS-058 | Fibronectin | ATGCTCAGGGGTCCGGGACCCGGGCG | 91 | MLRGPGPGRLLLLAV | 153 |
| | | GCTGCTGCTGCTAGCAGTCCTGTGCC | | LCLGTSVRCTETGKS | |
| | | TGGGGACATCGGTGCGCTGCACCGAA | | KR | |
| | | ACCGGGAAGAGCAAGAGG | | | |
| SS-059 | Fibronectin | ATGCTTAGGGGTCCGGGGCCCGGGCT | 92 | MLRGPGPGLLLLAVQ | 154 |
| | | GCTGCTGCTGGCCGTCCAGCTGGGGA | | CLGTAVPSTGA | |
| | | CAGCGGTGCCCTCCACG | | | |
| SS-060 | Fibronectin | ATGCGCCGGGGGGCCCTGACCGGGCT | 93 | MRRGALTGLLLVLCL | 155 |
| | | GCTCCTGGTCCTGTGCCTGAGTGTTG | | SVVLRAAPSATSKKR | |
| | | TGCTACGTGCAGCCCCCTCTGCAACA | | R | |
| | | ACAAGCAAGAAGCGCAGG | | | |

[0228] In the table, SS is secretion signal and MLS is mitochondrial leader signal. The primary constructs or mmRNA of the present invention may be designed to encode any of the signal sequences of SEQ ID NOs 94-155, or fragments or variants thereof. These sequences may be included at the beginning of the polypeptide coding region, in the middle or at the terminus or alternatively into a flanking region. Further, any of the polynucleotide primary constructs of the present invention may also comprise one or more of the sequences defined by SEQ ID NOs 32493. These may be in the first region or either flanking region.

[0229] Additional signal sequences which may be utilized in the present invention include those taught in, for example, databases such as those found at http://www.signalpeptide.de/ or http://proline.bic.nus.edu.sg/spdb/. Those described in U.S. Pat. Nos. 8,124,379; 7,413,875 and 7,385,034 are also within the scope of the invention and the contents of each are incorporated herein by reference in their entirety.

### Target Selection

[0230] According to the present invention, the primary constructs comprise at least a first region of linked nucleosides encoding at least one polypeptide of interest. The polypeptides of interest or “Targets” of the present invention are listed in Lengthy Table 6. Shown in Lengthy Table 6, in addition to the name and description of the gene encoding the polypeptide of interest (Target Description) are the ENSEMBL Transcript ID (ENST), the ENSEMIBL Protein ID (ENSP) and when available the optimized open reading frame sequence ID (Optimized ORF SEQ ID). For any particular gene there may exist one or more variants or isoforms. Where these exist, they are shown in the table as well. It will be appreciated by those of skill in the art that disclosed in the Table are potential flanking regions. These are encoded in each ENST transcript either to the 5′ (upstream) or 3′ (downstream) of the ORF or coding region. The coding region is definitively and specifically disclosed by teaching the ENSP sequence. Consequently, the sequences taught flanking that encoding the protein are considered flanking regions. It is also possible to further characterize the 5′ and 3′ flanking regions by utilizing one or more available databases or algorithms. Databases have annotated the features contained in the flanking regions of the ENST transcripts and these are available in the art.

### Protein Cleavage Signals and Sites

[0231] In one embodiment, the polypeptides of the present invention may include at least one protein cleavage signal containing at least one protein cleavage site. The protein cleavage site may be located at the N-terminus, the C-terminus, at any space between the N- and the C-termini such as, but not limited to, half-way between the N- and C-termini, between the N-terminus and the half way point, between the half way point and the C-terminus, and combinations thereof.

[0232] The polypeptides of the present invention may include, but is not limited to, a proprotein convertase (or prohormone convertase), thrombin or Factor Xa protein cleavage signal. Proprotein convertases are a family of nine proteinases, comprising seven basic amino acid-specific subtilisin-like serine proteinases related to yeast kexin, known as prohormone convertase 1/3 (PC1/3), PC2, furin, PC4, PC5/6, paired basic amino-acid cleaving enzyme 4 (PACE4) and PC7, and two other subtilases that cleave at non-basic residues, called subtilisin kexin isozyme 1 (SKI-1) and proprotein convertase subtilisin kexin 9 (PCSK9). Non-limiting examples of protein cleavage signal amino acid sequences are listing in Table 7. In Table 7, “X” refers to any amino acid, “n” may be 0, 2, 4 or 6 amino acids and “*” refers to the protein cleavage site. In Table 7, SEQ ID NO: 16090 refers to when n=4 and SEQ ID NO: 16091 refers to when n=6.

TABLE 7
Protein Cleavage Site Sequences

| Protein Cleavage Signal | Amino Acid Cleavage Sequence | SEQ ID NO |
|---|---|---|
| Proprotein convertase | R-X-X-R* | 16088 |
| | R-X-K/R-R* | 16089 |
| | K/R-Xn-K/R* | 16090 or 16091 |
| Thrombin | L-V-P-R*-G-S | 16092 |
| | L-V-P-R | 16093 |
| | A/F/G/I/L/T/V/M-A/F/G/I/L/T/V/W-P-R* | 16094 |
| Factor Xa | I-E-G-R | 16095 |
| | I-D-G-R* | 16096 |
| | A-E-G-R* | 16096 |
| | A/F/G/I/L/T/V/M-D/E/G/R* | 16098 |

[0233] In one embodiment, the primary constructs and the mmRNA of the present invention may be engineered such that the primary construct or mmRNA contains at least one encoded protein cleavage signal. The encoded protein cleavage signal may be located before the start codon, after the start codon, before the coding region, within the coding region such as, but not limited to, half way in the coding region, between the start codon and the half way point, between the half way point and the stop codon, after the coding region, before the stop codon, between two stop codons, after the stop codon and combinations thereof.

[0234] In one embodiment, the primary constructs or mmRNA of the present invention may include at least one encoded protein cleavage signal containing at least one protein cleavage site. The encoded protein cleavage signal may include, but is not limited to, a proprotein convertase (or prohormone convertase), thrombin and/or Factor Xa protein cleavage signal. One of skill in the art may use Table 1 above or other known methods to determine the appropriate encoded protein cleavage signal to include in the primary constructs or mmRNA of the present invention. For example, starting with the signal of Table 7 and considering the codons of Table 1 one can design a signal for the primary construct which can produce a protein signal in the resulting polypeptide.

[0235] In one embodiment, the polypeptides of the present invention include at least one protein cleavage signal and/or site.

[0236] As a non-limiting example, U.S. Pat. No. 7,374,930 and U.S. Pub. No. 20090227660, herein incorporated by reference in their entireties, use a furin cleavage site to cleave the N-terminal methionine of GLP-1 in the expression product from the Golgi apparatus of the cells. In one embodiment, the polypeptides of the present invention include at least one protein cleavage signal and/or site with the proviso that the polypeptide is not GLP-1.

[0237] In one embodiment, the primary constructs or mmRNA of the present invention includes at least one encoded protein cleavage signal and/or site.

[0238] In one embodiment, the primary constructs or mmRNA of the present invention includes at least one encoded protein cleavage signal and/or site with the proviso that the primary construct or mmRNA does not encode GLP-1.

[0239] In one embodiment, the primary constructs or mmRNA of the present invention may include more than one coding region. Where multiple coding regions are present in the primary construct or mmRNA of the present invention, the multiple coding regions may be separated by encoded protein cleavage sites. As a non-limiting example, the primary construct or mmRNA may be signed in an ordered pattern. On such pattern follows AXBY form where A and B are coding regions which may be the same or different coding regions and/or may encode the same or different polypeptides, and X and Y are encoded protein cleavage signals which may encode the same or different protein cleavage signals. A second such pattern follows the form AXYBZ where A and B are coding regions which may be the same or different coding regions and/or may encode the same or different polypeptides, and X, Y and Z are encoded protein cleavage signals which may encode the same or different protein cleavage signals. A third pattern follows the form ABXCY where A, B and C are coding regions which may be the same or different coding regions and/or may encode the same or different polypeptides, and X and Y are encoded protein cleavage signals which may encode the same or different protein cleavage signals.

[0240] In one embodiment, the polypeptides, primary constructs and mmRNA can also contain sequences that encode protein cleavage sites so that the polypeptides, primary constructs and mmRNA can be released from a carrier region or a fusion partner by treatment with a specific protease for said protein cleavage site.

[0241] In one embodiment, the polypeptides, primary constructs and mmRNA of the present invention may include a sequence encoding the 2A peptide. In one embodiment, this sequence may be used to separate the coding region of two or more polypeptides of interest. As a non-limiting example, the sequence encoding the 2A peptide may be between coding region A and coding region B (A-2Apep-B). The presence of the 2A peptide would result in the cleavage of one long protein into protein A, protein B and the 2A peptide. Protein A and protein B may be the same or different polypeptides of interest. In another embodiment, the 2A peptide may be used in the polynucleotides, primary constructs and/or mmRNA of the present invention to produce two, three, four, five, six, seven, eight, nine, ten or more proteins.

### Incorporating Post Transcriptional Control Modulators

[0242] In one embodiment, the polynucleotides, primary constructs and/or mmRNA of the present invention may include at least one post transcriptional control modulator. These post transcriptional control modulators may be, but are not limited to, small molecules, compounds and regulatory sequences. As a non-limiting example, post transcriptional control may be achieved using small molecules identified by PTC Therapeutics Inc. (South Plainfield, NJ) using their GEMS™ (Gene Expression Modulation by Small-Molecules) screening technology.

[0243] The post transcriptional control modulator may be a gene expression modulator which is screened by the method detailed in or a gene expression modulator described in International Publication No. WO2006022712, herein incorporated by reference in its entirety. Methods identifying RNA regulatory sequences involved in translational control are described in International Publication No. WO2004067728, herein incorporated by reference in its entirety; methods identifying compounds that modulate untranslated region dependent expression of a gene are described in International Publication No. WO2004065561, herein incorporated by reference in its entirety.

[0244] In one embodiment, the polynucleotides, primary constructs and/or mmRNA of the present invention may include at least one post transcriptional control modulator is located in the 5′ and/or the 3′ untranslated region of the polynucleotides, primary constructs and/or mmRNA of the present invention

[0245] In another embodiment, the polynucleotides, primary constructs and/or mmRNA of the present invention may include at least one post transcription control modulator to modulate premature translation termination. The post transcription control modulators may be compounds described in or a compound found by methods outlined in International Publication Nos. WO2004010106, WO2006044456, WO2006044682, WO2006044503 and WO2006044505, each of which is herein incorporated by reference in its entirety. As a non-limiting example, the compound may bind to a region of the 28S ribosomal RNA in order to modulate premature translation termination (See e.g., WO2004010106, herein incorporated by reference in its entirety).

[0246] In one embodiment, polynucleotides, primary constructs and/or mmRNA of the present invention may include at least one post transcription control modulator to alter protein expression. As a non-limiting example, the expression of VEGF may be regulated using the compounds described in or a compound found by the methods described in International Publication Nos. WO2005118857, WO2006065480, WO2006065479 and WO2006058088, each of which is herein incorporated by reference in its entirety.

[0247] The polynucleotides, primary constructs and/or mmRNA of the present invention may include at least one post transcription control modulator to control translation. In one embodiment, the post transcription control modulator may be a RNA regulatory sequence. As a non-limiting example, the RNA regulatory sequence may be identified by the methods described in International Publication No. WO2006071903, herein incorporated by reference in its entirety.

### III. Modifications

[0248] Herein, in a polynucleotide (such as a primary construct or an mRNA molecule), the terms “modification” or, as appropriate, “modified” refer to modification with respect to A, G, U or C ribonucleotides. Generally, herein, these terms are not intended to refer to the ribonucleotide modifications in naturally occurring 5′-terminal mRNA cap moieties. In a polypeptide, the term “modification” refers to a modification as compared to the canonical set of 20 amino acids, moiety)

[0249] The modifications may be various distinct modifications. In some embodiments, the coding region, the flanking regions and/or the terminal regions may contain one, two, or more (optionally different) nucleoside or nucleotide modifications. In some embodiments, a modified polynucleotide, primary construct, or mmRNA introduced to a cell may exhibit reduced degradation in the cell, as compared to an unmodified polynucleotide, primary construct, or mmRNA.

[0250] The polynucleotides, primary constructs, and mmRNA can include any useful modification, such as to the sugar, the nucleobase, or the internucleoside linkage (e.g. to a linking phosphate/to a phosphodiester linkage/to the phosphodiester backbone). One or more atoms of a pyrimidine nucleobase may be replaced or substituted with optionally substituted amino, optionally substituted thiol, optionally substituted alkyl (e.g., methyl or ethyl), or halo (e.g., chloro or fluoro). In certain embodiments, modifications (e.g., one or more modifications) are present in each of the sugar and the internucleoside linkage. Modifications according to the present invention may be modifications of ribonucleic acids (RNAs) to deoxyribonucleic acids (DNAs), threose nucleic acids (TNAs), glycol nucleic acids (GNAs), peptide nucleic acids (PNAs), locked nucleic acids (LNAs) or hybrids thereof). Additional modifications are described herein.

[0251] As described herein, the polynucleotides, primary constructs, and mmRNA of the invention do not substantially induce an innate immune response of a cell into which the mRNA is introduced. Features of an induced innate immune response include 1) increased expression of pro-inflammatory cytokines, 2) activation of intracellular PRRs (RIG-I, MDA5, etc, and/or 3) termination or reduction in protein translation.

[0252] In certain embodiments, it may desirable to intracellularly degrade a modified nucleic acid molecule introduced into the cell. For example, degradation of a modified nucleic acid molecule may be preferable if precise timing of protein production is desired. Thus, in some embodiments, the invention provides a modified nucleic acid molecule containing a degradation domain, which is capable of being acted on in a directed manner within a cell. In another aspect, the present disclosure provides polynucleotides comprising a nucleoside or nucleotide that can disrupt the binding of a major groove interacting, e.g. binding, partner with the polynucleotide (e.g., where the modified nucleotide has decreased binding affinity to major groove interacting partner, as compared to an unmodified nucleotide).

[0253] The polynucleotides, primary constructs, and mmRNA can optionally include other agents (e.g., RNAi-inducing agents, RNAi agents, siRNAs, shRNAs, miRNAs, antisense RNAs, ribozymes, catalytic DNA, tRNA, RNAs that induce triple helix formation, aptamers, vectors, etc.). In some embodiments, the polynucleotides, primary constructs, or mmRNA may include one or more messenger RNAs (mRNAs) and one or more modified nucleoside or nucleotides (e.g., mmRNA molecules). Details for these polynucleotides, primary constructs, and mmRNA follow.

### Polynucleotides and Primary Constructs

[0254] The polynucleotides, primary constructs, and mmRNA of the invention includes a first region of linked nucleosides encoding a polypeptide of interest, a first flanking region located at the 5′ terminus of the first region, and a second flanking region located at the 3′ terminus of the first region.

[0255] In some embodiments, the polynucleotide, primary construct, or mmRNA (e.g., the first region, first flanking region, or second flanking region) includes n number of linked nucleosides having Formula (Ia) or Formula (Ia-1):

[chemical structure]

or a pharmaceutically acceptable salt or stereoisomer thereof,
[0256] wherein
[0257] U is O, S, N(R^{U})ₙᵤ, or C(R^{U})ₙᵤ, wherein nu is an integer from 0 to 2 and each R^{U} is, independently, H, halo, or optionally substituted alkyl;
[0258] [symbol] is a single bond or absent;
[0259] each of R^{1′}, R^{2′}, R^{1″}, R¹, R², R³, R⁴, and R⁵ is, independently, if present, H, halo, hydroxy, thiol, optionally substituted alkyl, optionally substituted alkoxy, optionally substituted alkenyloxy, optionally substituted alkynyloxy, optionally substituted aminoalkoxy, optionally substituted alkoxyalkoxy, optionally substituted hydroxyalkoxy, optionally substituted amino, azido, optionally substituted aryl, optionally substituted aminoalkyl, optionally substituted aminoalkenyl, optionally substituted aminoalkynyl, or absent; wherein the combination of R3 with one or more of R1′, R1″, R2′, R2″, or R5 (e.g., the combination of R1′ and R3, the combination of R1″ and R3, the combination of R2′ and R3, the combination of R2″ and R3, or the combination of R5 and R3) can join together to form optionally substituted alkylene or optionally substituted heteroalkylene and, taken together with the carbons to which they are attached, provide an optionally substituted heterocyclyl (e.g., a bicyclic, tricyclic, or tetracyclic heterocyclyl); wherein the combination of R5 with one or more of R1′, R1″, R2′, or R2″ (e.g., the combination of R1′ and R5, the combination of R1″ and R5, the combination of R2′ and R5, or the combination of R2″ and R5) can join together to form optionally substituted alkylene or optionally substituted heteroalkylene and, taken together with the carbons to which they are attached, provide an optionally substituted heterocyclyl (e.g., a bicyclic, tricyclic, or tetracyclic heterocyclyl); and wherein the combination of R⁴ and one or more of R^{1′}, R^{1″}, R^{2′}, R^{2″}, R³, or R⁵ can join together to form optionally substituted alkylene or optionally substituted heteroalkylene and, taken together with the carbons to which they are attached, provide an optionally substituted heterocyclyl (e.g., a bicyclic, tricyclic, or tetracyclic heterocyclyl); each of m′ and m″ is, independently, an integer from 0 to 3 (e.g., from 0 to 2, from 0 to 1, from 1 to 3, or from 1 to 2);
[0260] each of Y¹, Y², and Y³, is, independently, O, S, Se, —NR^{N1}—, optionally substituted alkylene, or optionally substituted heteroalkylene, wherein R^{N1} is H, optionally substituted alkyl, optionally substituted alkenyl, optionally substituted alkynyl, optionally substituted aryl, or absent;
[0261] each Y⁴ is, independently, H, hydroxy, thiol, boranyl, optionally substituted alkyl, optionally substituted alkenyl, optionally substituted alkynyl, optionally substituted alkoxy, optionally substituted alkenyloxy, optionally substituted alkynyloxy, optionally substituted thioalkoxy, optionally substituted alkoxyalkoxy, or optionally substituted amino;
[0262] each Y⁵ is, independently, O, S. Se, optionally substituted alkylene (e.g., methylene), or optionally substituted heteroalkylene;
[0263] n is an integer from 1 to 100,000; and
[0264] B is a nucleobase (e.g., a purine, a pyrimidine, or derivatives thereof), wherein the combination of B and R^{1′}, the combination of B and R^{2′}, the combination of B and R^{1″}, or the combination of B and R^{2″} can, taken together with the carbons to which they are attached, optionally form a bicyclic group (e.g., a bicyclic heterocyclyl) or wherein the combination of B, R^{1″}, and R³ or the combination of B, R^{2″}, and R³ can optionally form a tricyclic or tetracyclic group (e.g., a tricyclic or tetracyclic heterocyclyl, such as in Formula (IIo)-(IIp) herein). In some embodiments, the polynucleotide, primary construct, or mmRNA includes a modified ribose. In some embodiments, the polynucleotide, primary construct, or mmRNA (e.g., the first region, the first flanking region, or the second flanking region) includes n number of linked nucleosides having Formula (Ia-2)-(Ia-5) or a pharmaceutically acceptable salt or stereoisomer thereof.

[chemical structure]

[0265] In some embodiments, the polynucleotide, primary construct, or mmRNA (e.g., the first region, the first flanking region, or the second flanking region) includes n number of linked nucleosides having Formula (Ib) or Formula (Ib-1):

[chemical structure]

or a pharmaceutically acceptable salt or stereoisomer thereof,
[0266] wherein
[0267] U is O, S, N(R^{U})ₙᵤ, or C(R^{U})ₙᵤ, wherein nu is an integer from 0 to 2 and each R^{U} is, independently H halo, or optionally substituted alkyl;
[0268] [symbol] is a single bond or absent;
[0269] each of R¹, R^{3′}, R^{3″}, and R⁴ is, independently, H, halo, hydroxy, optionally substituted alkyl, optionally substituted alkoxy, optionally substituted alkenyloxy, optionally substituted alkynyloxy, optionally substituted aminoalkoxy, optionally substituted alkoxyalkoxy, optionally substituted hydroxyalkoxy, optionally substituted amino, azido, optionally substituted aryl, optionally substituted aminoalkyl, optionally substituted aminoalkenyl, optionally substituted aminoalkynyl, or absent; and wherein the combination of R¹ and R^{3′} or the combination of R¹ and R^{3″} can be taken together to form optionally substituted alkylene or optionally substituted heteroalkylene (e.g., to produce a locked nucleic acid);
[0270] each R⁵ is, independently, H, halo, hydroxy, optionally substituted alkyl, optionally substituted alkoxy, optionally substituted alkenyloxy, optionally substituted alkynyloxy, optionally substituted aminoalkoxy, optionally substituted alkoxyalkoxy, or absent;
[0271] each of Y¹, Y², and Y³ is, independently, O, S, Se, —NR^{N1}—, optionally substituted alkylene, or optionally substituted heteroalkylene, wherein R^{N1} is H, optionally substituted alkyl, optionally substituted alkenyl, optionally substituted alkynyl, or optionally substituted aryl;
[0272] each Y⁴ is, independently, H, hydroxy, thiol, boranyl, optionally substituted alkyl, optionally substituted alkenyl, optionally substituted alkynyl, optionally substituted alkoxy, optionally substituted alkenyloxy, optionally substituted alkynyloxy, optionally substituted alkoxyalkoxy, or optionally substituted amino;
[0273] n is an integer from 1 to 100,000; and
[0274] B is a nucleobase.

[0275] In some embodiments, the polynucleotide, primary construct, or mmRNA (e.g., the first region, first flanking region, or second flanking region) includes n number of linked nucleosides having Formula (Ic):

[chemical structure]

or a pharmaceutically acceptable salt or stereoisomer thereof,
[0276] wherein
[0277] U is O, S, (R^{U})ₙᵤ, or C(R^{U})ₙᵤ, wherein nu is an integer from 0 to 2 and each R^{U} is, independently, H, halo, or optionally substituted alkyl;
[0278] [symbol] is a single bond or absent;
[0279] each of B¹, B², and B³ is, independently, a nucleobase (e.g., a purine, a pyrimidine, or derivatives thereof, as described herein), H, halo, hydroxy, thiol, optionally substituted alkyl, optionally substituted alkoxy, optionally substituted alkenyloxy, optionally substituted alkynyloxy, optionally substituted aminoalkoxy, optionally substituted alkoxyalkoxy, optionally substituted hydroxyalkoxy, optionally substituted amino, azido, optionally substituted aryl, optionally substituted aminoalkyl, optionally substituted aminoalkenyl, or optionally substituted aminoalkynyl, wherein one and only one of B¹, B², and B³ is a nucleobase;
[0280] each of R^{b1}, R^{b2}, R³, R³, and R⁵ is, independently, H, halo, hydroxy, thiol, optionally substituted alkyl, optionally substituted alkoxy, optionally substituted alkenyloxy, optionally substituted alkynyloxy, optionally substituted aminoalkoxy, optionally substituted alkoxyalkoxy, optionally substituted hydroxyalkoxy, optionally substituted amino, azido, optionally substituted aryl, optionally substituted aminoalkyl, optionally substituted aminoalkenyl or optionally substituted aminoalkynyl;
[0281] each of Y¹, Y², and Y³, is, independently, O, S, Se, —NR^{N1}—, optionally substituted alkylene, or optionally substituted heteroalkylene, wherein R^{N1} is H, optionally substituted alkyl, optionally substituted alkenyl, optionally substituted alkynyl, or optionally substituted aryl;
[0282] each Y⁴ is, independently, H, hydroxy, thiol, boranyl, optionally substituted alkyl, optionally substituted alkenyl, optionally substituted alkynyl, optionally substituted alkoxy, optionally substituted alkenyloxy, optionally substituted alkynyloxy, optionally substituted thioalkoxy, optionally substituted alkoxyalkoxy, or optionally substituted amino;
[0283] each Y⁵ is, independently, O, S, Se, optionally substituted alkylene (e.g., methylene), or optionally substituted heteroalkylene;
[0284] n is an integer from 1 to 100,000; and
[0285] wherein the ring including U can include one or more double bonds.

[0286] In particular embodiments, the ring including U does not have a double bond between U—CB³R^{b3} or between CB³R^{b3}—C^{B2}R^{b2}.

[0287] In some embodiments, the polynucleotide, primary construct, or mmRNA (e.g., the first region, first flanking region, or second flanking region) includes n number of linked nucleosides having Formula (Id):

[chemical structure]

or a pharmaceutically acceptable salt or stereoisomer thereof,
[0288] wherein
[0289] U is O, S, N(R^{U})ₙᵤ, or C(R^{U})ₙᵤ, wherein nu is an integer from 0 to 2 and each R^{U} is, independently, H, halo, or optionally substituted alkyl;
[0290] each R³ is, independently, H, halo, hydroxy, thiol, optionally substituted alkyl, optionally substituted alkoxy, optionally substituted alkenyloxy, optionally substituted alkynyloxy, optionally substituted aminoalkoxy, optionally substituted alkoxyalkoxy, optionally substituted hydroxyalkoxy, optionally substituted amino, azido, optionally substituted aryl, optionally substituted aminoalkyl, optionally substituted aminoalkenyl, or optionally substituted aminoalkynyl;
[0291] each of Y¹, Y², and Y³, is, independently, O, S, Se, —NR^{N1}—, optionally substituted alkylene, or optionally substituted heteroalkylene, wherein R^{N1} is H, optionally substituted alkyl, optionally substituted alkenyl, optionally substituted alkynyl, or optionally substituted aryl;
[0292] each Y⁴ is, independently, H, hydroxy, thiol, boranyl, optionally substituted alkyl, optionally substituted alkenyl, optionally substituted alkynyl, optionally substituted alkoxy, optionally substituted alkenyloxy, optionally substituted alkynyloxy, optionally substituted thioalkoxy, optionally substituted alkoxyalkoxy, or optionally substituted amino;
[0293] each Y⁵ is, independently, O, S, optionally substituted alkylene (e.g., methylene), or optionally substituted heteroalkylene;
[0294] n is an integer from 1 to 100,000; and
[0295] B is a nucleobase (e.g., a purine, a pyrimidine, or derivatives thereof).

[0296] In some embodiments, the polynucleotide, primary construct, or mmRNA (e.g., the first region, first flanking region, or second flanking region) includes n number of linked nucleosides having Formula (Ie):

[chemical structure]

or a pharmaceutically acceptable salt or stereoisomer thereof,
[0297] wherein
[0298] each of U′ and U″ is, independently, O, S, N(R^{U})ₙᵤ, or C(R^{U})ₙᵤ, wherein nu is an integer from 0 to 2 and each R¹ is, independently, H, halo, or optionally substituted alkyl;
[0299] each R⁶ is, independently, H, halo, hydroxy, thiol, optionally substituted alkyl, optionally substituted alkoxy, optionally substituted alkenyloxy, optionally substituted alkynyloxy, optionally substituted aminoalkoxy, optionally substituted alkoxyalkoxy, optionally substituted hydroxyalkoxy, optionally substituted amino, azido, optionally substituted aryl, optionally substituted aminoalkyl, optionally substituted aminoalkenyl, or optionally substituted aminoalkynyl;
[0300] each Y^{5′} is, independently, O, S, optionally substituted alkylene (e.g., methylene or ethylene), or optionally substituted heteroalkylene;
[0301] n is an integer from 1 to 100,000; and
[0302] B is a nucleobase (e.g., a purine, a pyrimidine, or derivatives thereof).

[0303] In some embodiments, the polynucleotide, primary construct, or mmRNA (e.g., the first region, first flanking region, or second flanking region) includes n number of linked nucleosides having Formula (If) or (If-1):

[chemical structure]

[0304] or a pharmaceutically acceptable salt or stereoisomer thereof,
[0305] wherein
[0306] each of U′ and U″ is, independently, CO, S, N, N(R^{U})ₙᵤ, or C(R^{U})ₙᵤ, wherein nu is an integer from 0 to 2 and each R^{U} is, independently, H, halo, or optionally substituted alkyl (e.g., U′ is O and U″ is N);
[0307] [symbol] is a single bond or absent;
[0308] each of R^{1′}, R^{2′}, R^{1″}, R^{2″}, R³, and R⁴ is, independently, H, halo, hydroxy, thiol, optionally substituted alkyl, optionally substituted alkoxy, optionally substituted alkenyloxy, optionally substituted alkynyloxy, optionally substituted aminoalkoxy, optionally substituted alkoxyalkoxy, optionally substituted hydroxyalkoxy, optionally substituted amino, azido, optionally substituted aryl, optionally substituted aminoalkyl, optionally substituted aminoalkenyl, optionally substituted aminoalkynyl, or absent; and wherein the combination of R^{1′} and R³, the combination of R^{1″} and R³, the combination of R^{2′} and R³, or the combination of R^{2″} and R³ can be taken together to form optionally substituted alkylene or optionally substituted heteroalkylene (e.g., to produce a locked nucleic acid); each of m′ and m″ is, independently, an integer from 0 to 3 (e.g., from 0 to 2, from 0 to 1, from 1 to 3, or from 1 to 2);
[0309] each of Y¹, Y², and Y³, is, independently, O, S, Se, optionally substituted alkylene, or optionally substituted heteroalkylene, wherein R^{N1} is H optionally substituted alkyl, optionally substituted alkenyl, optionally substituted alkynyl, optionally substituted aryl, or absent;
[0310] each Y⁴ is, independently, H, hydroxy, thiol, boranyl, optionally substituted alkyl, optionally substituted alkenyl, optionally substituted alkynyl, optionally substituted alkoxy, optionally substituted alkenyloxy, optionally substituted alkynyloxy, optionally substituted thioalkoxy, optionally substituted alkoxyalkoxy, or optionally substituted amino;
[0311] each Y⁵ is, independently, O, S, Se, optionally substituted alkylene (e.g. methylene), or optionally substituted heteroalkylene;
[0312] n is an integer from 1 to 100,000; and
[0313] B is a nucleobase (e.g., a purine, a pyrimidine, or derivatives thereof).

[0314] In some embodiments of the polynucleotides, primary constructs, or mmRNA (e.g., Formulas (Ia), (Ia-1)-(Ia-3), (Ib)-(If), and (IIa)-(IIp)), the ring including U has one or two double bonds.

[0315] In some embodiments of the polynucleotides, primary constructs, or mmRNA (e.g., Formulas (Ia)-(Ia-5), (Ib)-(If-1), (IIa)-(IIp), (IIb-1), (IIb-2), (IIc-1)-(IIc-2), (IIn-1), (IIn-2), (IVa)-(IVl), and (IXa)-(IXr)), each of R¹, R^{1′}, and R^{1″}, if present, is H. In further embodiments, each of R², R^{2′}, and R^{2″}, if present, is, independently, H, halo (e.g., fluoro), hydroxy, optionally substituted alkoxy (e.g., methoxy or ethoxy), or optionally substituted alkoxyalkoxy. In particular embodiments, alkoxyalkoxy is —(CH₂)ₛ₂(OCH₂CH₂)ₛ₁(CH₂)ₛ₃OR′, wherein s1 is an integer from 1 to 10 (e.g., from 1 to 6 or from 1 to 4), each of s2 and s3, independently, is an integer from 0 to 10 (e.g., from 0 to 4, from 0 to 6, from 1 to 4, from 1 to 6, or from 1 to 10), and R′ is H or C₁₋₂₀ alkyl). In some embodiments, s2 is 0, s1 is 1 or 2, s3 is 0 or 1, and R′ is C₁₋₆ alkyl.

[0316] In some embodiments of the polynucleotides, primary constructs, or mmRNA (e.g., Formulas (Ia)-(Ia-5), (Ib)-(If-1), (IIa)-(IIp), (IIb-1), (IIb-2), (IIc-1)-(IIc-2), (IIn-1), (IIn-2), (IVa)-(IVl), and (IXa)-(IXr)), each of R², R^{2′}, and R^{2″}, if present, is H. In further embodiments, each of R¹, R^{1′}, and R^{1″} if present, is, independently, H, halo (e.g., fluoro), hydroxy, optionally substituted alkoxy (e.g., methoxy or ethoxy), or optionally substituted alkoxyalkoxy. In particular embodiments, alkoxyalkoxy is —(CH₂)ₛ₂(OCH₂CH₂)ₛ₁(CH₂)ₛ₃OR′, wherein s1 is an integer from 1 to 10 (e.g., from 1 to 6 or from 1 to 4), each of s2 and s3, independently, is an integer from 0 to 10 (e.g., from 0 to 4, from 0 to 6, from 1 to 4, from 1 to 6, or from 1 to 10), and R′ is H or C₁₋₂₀ alkyl). In some embodiments, s2 is 0, s1 is 1 or 2, s3 is 0 or 1, and R′ is C₁₋₆ alkyl.

[0317] In some embodiments of the polynucleotides, primary constructs, or mmRNA (e.g., Formulas (Ia)-(Ia-5), (Ib)-(If-1), (IIa)-(IIp), (IIb-1), (IIb-2), (IIc-1)-(IIc-2), (IIn-1), (IIn-2), (IVa)-(IVl), and (IXa)-(IXr)), each of R³, R⁴ and R⁵ is, independently, H, halo (e.g., fluoro), hydroxy, optionally substituted alkyl, optionally substituted alkoxy (e.g., methoxy or ethoxy), or optionally substituted alkoxyalkoxy. In particular embodiments, R³ is H, R⁴ is H, R⁵ is H, or R³, R⁴, and R⁵ are all H. In particular embodiments, R³ is C₁₋₆ alkyl, R⁴ is C₁₋₆ alkyl, R⁵ is C₁₋₆ alkyl, or R³, R⁴, and R⁵ are all C₁₋₆ alkyl. In particular embodiments, R³ and R⁴ are both H, and R⁵ is C₁₋₆ alkyl.

[0318] In some embodiments of the polynucleotides, primary constructs, or mmRNA (e.g., Formulas (Ia)-(Ia-5), (Ib)-(If-1), (IIa)-(IIp), (IIb-1), (IIb-2), (IIc-1)-(IIc-2), (IIn-1), (IIn-2), (IVa)-(IVl), and (IXa)-(IXr)), R³ and R⁵ join together to form optionally substituted alkylene or optionally substituted heteroalkylene and, taken together with the carbons to which they are attached, provide an optionally substituted heterocyclyl (e.g., a bicyclic, tricyclic, or tetracyclic heterocyclyl, such as trans-3′,4′ analogs, wherein R³ and R⁵ join together to form heteroalkylene (e.g., —(CH₂)_{b1}O(CH₂)_{b2}O(CH₂)_{b3}—, wherein each of b1, b2, and b3 are, independently, an integer from 0 to 3).

[0319] In some embodiments of the polynucleotides, primary constructs, or mmRNA (e.g., Formulas (Ia)-(Ia-5), (Ib)-(If-1), (IIa)-(IIp), (IIb-1), (IIb-2), (IIc-1)-(IIc-2), (IIn-1), (IIn-2), (IVa)-(IVl), and (IXa)-(IXr)), R³ and one or more of R^{1′}, R^{1″}, R^{2′}, R^{2″}, or R⁵ join together to form optionally substituted alkylene or optionally substituted heteroalkylene and, taken together with the carbons to which they are attached, provide an optionally substituted heterocyclyl (e.g., a bicyclic, tricyclic, or tetracyclic heterocyclyl, R³ and one or more of R^{1′}, R^{1″}, R^{2′}, R^{2″}, or R⁵ join together to form heteroalkylene (e.g., —(CH₂)_{b1}O(CH₂)_{b2}O(CH₂)_{b3}—, wherein each of b1, b2, and b3 are, independently, an integer from 0 to 3).

[0320] In some embodiments of the polynucleotides, primary constructs, or mmRNA (e.g., Formulas (Ia)-(Ia-5), (Ib)-(If-1), (IIa)-(IIp), (IIb-1), (IIb-2), (IIc-1)-(IIc-2), (IIn-1), (IIn-2), (IVa)-(IVl), and (IXa)-(IXr)), R and one or more of R^{1′}, R^{1″}, R^{2′}, or R² join together to form optionally substituted alkylene or optionally substituted heteroalkylene and, taken together with the carbons to which they are attached, provide an optionally substituted heterocyclyl (e.g., a bicyclic, tricyclic, or tetracyclic heterocyclyl, R⁵ and one or more of R^{1′}, R^{1″}, R^{2′}, or R^{2″} join together to form heteroalkylene (e.g., —(CH₂)_{b1}C(CH₂)_{b2}O(CH₂)_{b3}—, wherein each of b1, b2, and b3 are, independently, an integer from 0 to 3).

[0321] In some embodiments of the polynucleotides, primary constructs, or mmRNA (e.g., Formulas (Ia)-(Ia-5), (Ib)-(If-1), (IIa)-(IIp), (IIb-1), (IIb-2), (IIc-1)-(IIc-2), (IIn-1), (IIn-2), (IVa)-(IVl), and (IXa)-(IXr)), each Y² is, independently, O, S, or —NR^{N1}—, wherein R^{N1} is H, optionally substituted alkyl, optionally substituted alkenyl, optionally substituted alkynyl, or optionally substituted aryl. In particular embodiments, Y² is NR^{N1}—, wherein R^{N1} is H or optionally substituted alkyl (e.g., C₁₋₆ alkyl, such as methyl, ethyl, isopropyl, or n-propyl).

[0322] In some embodiments of the polynucleotides, primary constructs, or mmRNA (e.g., Formulas (Ia)-(Ia-5), (Ib)-(If-1), (IIa)-(IIp), (IIb-1), (IIb-2), (IIc-1)-(IIc-2), (IIn-1), (IIn-2), (IVa)-(IVl), and (IXa)-(IXr)), each Y² is, independently, O or S.

[0323] In some embodiments of the polynucleotides, primary constructs, or mmRNA (e.g., Formulas (Ia)-(Ia-5), (Ib)-(If-1), (IIa)-(IIp), (IIb-1), (IIb-2), (IIc-1)-(IIc-2), (IIn-1), (IIn-2), (IVa)-(IVl), and (IXa)-(IXr)), R¹ is H; each R² is, independently, H, halo (e.g., fluoro), hydroxy, optionally substituted alkoxy (e.g., methoxy or ethoxy), or optionally substituted alkoxyalkoxy (e.g., —(CH₂)ₛ₂(OCH₂CH₂)ₛ₁(CH₂)ₛ₃OR′, wherein s1 is an integer from 1 to 10 (e.g., from 1 to 6 or from 1 to 4), each of s2 and s3, independently, is an integer from 0 to 10 (e.g., from 0 to 4, from 0 to 6, from 1 to 4, from 1 to 6, or from 1 to 10), and R′ is —H or C₁₋₂₀ alkyl, such as wherein s2 is 0, s1 is 1 or 2, s3 is 0 or 1, and R′ is C₁₋₆ alkyl); each Y² is, independently, O or —NR^{N1}—, wherein RN is H, optionally substituted alkyl, optionally substituted alkenyl, optionally substituted alkynyl, or optionally substituted aryl (e.g., wherein R^{N1} is H or optionally substituted alkyl (e.g., C₁₋₆ alkyl, such as methyl, ethyl, isopropyl, or n-propyl)); and each Y³ is, independently, O or S (e.g., S). In further embodiments, R³ is H, halo (e.g., fluoro), hydroxy, optionally substituted alkyl, optionally substituted alkoxy (e.g., methoxy or ethoxy), or optionally substituted alkoxyalkoxy. In yet further embodiments, each Y¹ is, independently, O or —NR^{N1}—, wherein R^{N1} is H, optionally substituted alkyl, optionally substituted alkenyl, optionally substituted alkynyl, or optionally substituted aryl (e.g., wherein R^{N1} is H or optionally substituted alkyl (e.g., C₁₋₆ alkyl, such as methyl, ethyl, isopropyl, or n-propyl); and each Y⁴ is, independently, H, hydroxy, thiol, optionally substituted alkyl, optionally substituted alkoxy, optionally substituted thioalkoxy, optionally substituted alkoxyalkoxy, or optionally substituted amino.

[0324] In some embodiments of the polynucleotides, primary constructs, or mmRNA (e.g., Formulas (Ia)-(Ia-5), (Ib)-(If-1), (IIa)-(IIp), (IIb-1), (IIb-2), (IIc-1)-(IIc-2), (IIn-1), (IIn-2), (IVa)-(IVl), and (IXa)-(IXr)), each R¹ is, independently, H, halo (e.g., fluoro), hydroxy, optionally substituted alkoxy (e.g., methoxy or ethoxy), or optionally substituted alkoxyalkoxy (e.g., —(CH₂)ₛ₂(OCH₂CH₂)ₛ₁(CH₂)ₛ₃OR′, wherein s1 is an integer from 1 to 10 (e.g., from 1 to 6 or from 1 to 4), each of s2 and s3, independently, is an integer from 0 to 10 (e.g., from 0 to 4, from 0 to 6, from 1 to 4, from 1 to 6, or from 1 to 10), and R′ is H or C₁₋₂₀ alkyl, such as wherein s2 is 0, s1 is 1 or 2, s3 is 0 or 1, and R′ is C₁₋₆ alkyl); R² is H; each Y is, independently, O or —NR^{N1}—, wherein RN is H, optionally substituted alkyl, optionally substituted alkenyl, optionally substituted alkynlyl, or optionally substituted aryl (e.g., wherein R^{N1} is H or optionally substituted alkyl (e.g., C₁₋₆ alkyl, such as methyl, ethyl, isopropyl, or n-propyl)); and each Y³ is, independently, O or S (e.g., S). In further embodiments, R³ is H, halo (e.g., fluoro), hydroxy, optionally substituted alkyl, optionally substituted alkoxy (e.g., methoxy or ethoxy), or optionally substituted alkoxyalkoxy. In yet further embodiments, each Y³ is, independently, O or —NR^{N1}—, wherein R^{N1} is H, optionally substituted alkyl, optionally substituted alkenyl, optionally substituted alkynyl, or optionally substituted aryl (e.g., wherein R^{N1} is H or optionally substituted alkyl (e.g., C₁₋₆ alkyl, such as methyl, ethyl, isopropyl, or n-propyl)); and each Y⁴ is, independently, H, hydroxy, thiol, optionally substituted alkyl, optionally substituted alkoxy, optionally substituted thioalkoxy, optionally substituted alkoxyalkoxy, or optionally substituted amino.

[0325] In some embodiments of the polynucleotides, primary constructs, or mmRNA (e.g., Formulas (Ia)-(Ia-5), (Ib)-(If-1), (IIa)-(IIp), (IIb-1), (IIb-1), (IIc-1)-(IIc-2), (IIn-1), (IIn-2), (IVa)-(IVl), and (IXa)-(IXr)), the ring including U is in the β-D (e.g., β-D-ribo) configuration.

[0326] In some embodiments of the polynucleotides, primary constructs, or mmRNA (e.g., Formulas (Ia)-(Ia-5), (Ib)-(If-1), (IIa)-(IIp), (IIb-1), (IIb-2), (IIc-1)-(IIc-2), (IIn-1), (IIn-2), (IVa)-(IVl), and (IXa)-(IXr)), the ring including U is in the α-L (e.g., α-L-ribo) configuration.

[0327] In some embodiments of the polynucleotides, primary constructs, or mmRNA (e.g., Formulas (Ia)-(Ia-5), (Ib)-(If-1), (IIa)-(IIp), (IIb-1), (IIb-2), (IIc-1)-(IIc-2), (IIn-1), (IIn-2), (IVa)-(IVl), and (IXa)-(IXr)), one or more B is not pseudouridine (iv) or 5-methyl-cytidine (mC). In some embodiments, about 10% to about 100% of n number of B nucleobases is not W or m⁵C (e.g., from 10% to 20%, from 10% to 35%, from 10% to 50%, from 10% to 60%, from 10% to 75%, from 10% to 90%, from 10% to 95%, from 1 0% to 98%, from 10% to 99%, from 20% to 35%, from 20% to 50%, from 20% to 60%, from 20% to 75%, from 20% to 90%, from 20% to 95%, from 20% to 98%, from 20% to 99%, from 20% to 100%, from 50% to 60%, from 50% to 75%, from 50% to 90%, from 50% to 95%, from 50% to 98%, from 50% to 99%, from 50% to 100%, from 75% to 90%, from 75% to 95%, from 75% to 98%, from 75% to 99%, and from 75% to 100% of n number of B is not ψ or m⁵C). In some embodiments, B is not ψ or m⁵C.

[0328] In some embodiments of the polynucleotides, primary constructs, or mmRNA (e.g., Formulas (Ia)-(Ia-5), (Ib)-(If-1), (IIa)-(IIp), (IIb-1), (IIb-2), (IIc-1)-(IIc-2), (IIn-1), (IIn-2), (IVa)-(IVl), and (IXa)-(IXr)), when B is an unmodified nucleobase selected from cytosine, guanine, uracil and adenine, then at least one of Y¹, Y², or Y³ is not O.

[0329] In some embodiments, the polynucleotide, primary construct, or mmRNA includes a modified ribose. In some embodiments, the polynucleotide, primary construct, or mmRNA (e.g., the first region, the first flanking region, or the second flanking region) includes n number of linked nucleosides having Formula (IIa)-(IIc):

[chemical structure]

or a pharmaceutically acceptable salt or stereoisomer thereof. In particular embodiments, U is O or C(R^{U})ₙᵤ, wherein nu is an integer from 0 to 2 and each R^{U} is, independently, H, halo, or optionally substituted alkyl (e.g., U is —CH₂— or —CH—). In other embodiments, each of R¹, R², R³, R⁴, and R⁵ is, independently, H, halo, hydroxy, thiol, optionally substituted alkyl, optionally substituted alkoxy, optionally substituted alkenyloxy, optionally substituted alkynyloxy, optionally substituted aminoalkoxy, optionally substituted alkoxyalkoxy, optionally substituted hydroxyalkoxy, optionally substituted amino, azido, optionally substituted aryl, optionally substituted aminoalkyl, optionally substituted aminoalkenyl, optionally substituted aminoalkynyl, or absent (e.g., each R¹ and R² is, independently, H, halo, hydroxy, optionally substituted alkyl, or optionally substituted alkoxy; each R³ and R⁴ is, independently, H or optionally substituted alkyl; and R⁵ is H or hydroxy), and [symbol] is a single bond or double bond.

[0330] In particular embodiments, the polynucleotides or mmRNA includes n number of linked nucleosides having Formula (IIb-1)-(IIb-2):

[chemical structure]

or a pharmaceutically acceptable salt or stereoisomer thereof. In some embodiments, U is O or C(R^{U})ₙᵤ, wherein nu is an integer from 0 to 2 and each R^{U} is, independently, H, halo, or optionally substituted alkyl (e.g., U is —CH₂— or —CH—). In other embodiments, each of R¹ and R² independently, H, halo, hydroxy, thiol, optionally substituted alkyl, optionally substituted alkoxy, optionally substituted alkenyloxy, optionally substituted alkynyloxy, optionally substituted aminoalkoxy, optionally substituted alkoxyalkoxy, optionally substituted hydroxyalkoxy, optionally substituted amino, azido, optionally substituted aryl, optionally substituted aminoalkyl, optionally substituted aminoalkenyl, optionally substituted aminoalkynyl, or absent (e.g., each R¹ and R² is, independently, H, halo, hydroxy, optionally substituted alkyl, or optionally substituted alkoxy, e.g., H, halo, hydroxy, alkyl, or alkoxy). In particular embodiments, R² is hydroxy or optionally substituted alkoxy (e.g., methoxy, ethoxy, or any described herein).

[0331] In particular embodiments, the polynucleotide, primary construct, or mmRNA includes n number of linked nucleosides having Formula (IIc-1)-(IIc-4):

[chemical structure]

or a pharmaceutically acceptable salt or stereoisomer thereof. In some embodiments, U is O or C(R^{U})ₙᵤ, wherein nu is an integer from 0 to 2 and each R^{U} is, independently, H, halo, or optionally substituted alkyl (e.g., U is —CH₂— or —CH—) In some embodiments, each of R¹, R² and R³ is, independently, H, halo, hydroxy, thiol, optionally substituted alkyl, optionally substituted alkoxy, optionally substituted alkenyloxy, optionally substituted alkynyloxy, optionally substituted aminoalkoxy, optionally substituted alkoxyalkoxy, optionally substituted hydroxyalkoxy, optionally substituted amino, azido, optionally substituted aryl, optionally substituted aminoalkyl, optionally substituted aminoalkenyl, optionally substituted aminoalkynyl, or absent (e.g., each R¹ and R² is, independently, H, halo, hydroxy, optionally substituted alkyl, or optionally substituted alkoxy, e.g., H, halo, hydroxy, alkyl, or alkoxy; and each R³ is, independently, H or optionally substituted alkyl)). In particular embodiments, R¹ is optionally substituted alkoxy (e.g., methoxy or ethoxy, or any described herein). In particular embodiments, R² is optionally substituted alkyl, and R² is hydroxy. In other embodiments, R¹ is hydroxy, and R² is optionally substituted alkyl. In further embodiments, R³ is optionally substituted alkyl.

[0332] In some embodiments, the polynucleotide, primary construct, or mmRNA includes an acyclic modified ribose. In some embodiments, the polynucleotide, primary construct, or mmRNA (e.g., the first region, the first flanking region, or the second flanking region) includes n number of linked nucleosides having Formula (IId)-(IIf):

[chemical structure]

or a pharmaceutically acceptable salt or stereoisomer thereof.

[0333] In some embodiments, the polynucleotide, primary construct, or mmRNA includes an acyclic modified hexitol. In some embodiments, the polynucleotide, primary construct, or mmRNA (e.g., the first region, the first flanking region, or the second flanking region) includes n number of linked nucleosides having Formula (IIg)-(IIi):

[chemical structure]

pharmaceutically acceptable salt or stereoisomer thereof.

[0334] In some embodiments, the polynucleotide, primary construct, or mmRNA includes a sugar moiety having a contracted or an expanded ribose ring. In some embodiments, the polynucleotide, primary construct, or mmRNA (e.g., the first region, the first flanking region, or the second flanking region) includes n number of linked nucleosides having Formula (IIk)-(IIm):

[chemical structure]

or a pharmaceutically acceptable salt or stereoisomer thereof, wherein each of R^{1′}, R^{1″}, R^{2′}, and R^{2″} is, independently, H, halo, hydroxy, optionally substituted alkyl, optionally substituted alkoxy, optionally substituted alkenyloxy, optionally substituted alkynyloxy, optionally substituted aminoalkoxy, optionally substituted alkoxyalkoxy, or absent; and wherein the combination of R^{2′} and R³ or the combination of R^{2″} and R³ can be taken together to form optionally substituted alkylene or optionally substituted heteroalkylene.

[0335] In some embodiments, the polynucleotide, primary construct, or mmRNA includes a locked modified ribose. In some embodiments, the polynucleotide, primary construct, or mmRNA (e.g., the first region, the first flanking region, or the second flanking region) includes n number of linked nucleosides having Formula (IIn):

[chemical structure]

or a pharmaceutically acceptable salt or stereoisomer thereof, wherein R^{3′} is O, S, or —NR^{N1}—, wherein R^{N1} is H, optionally substituted alkyl, optionally substituted alkenyl, optionally substituted alkynyl, or optionally substituted aryl and R^{3″} is optionally substituted alkylene (e.g., —CH₂—, —CH₂CH₂—, or —CH₂CH₂CH₂—) or optionally substituted heteroalkylene (e.g., —CH₂NH—, —CH₂CH₂NH—, —CH₂OCH₂—, or —CH₂CH₂OCH₂—)(e.g., R^{3′} is O and R^{3″} is optionally substituted alkylene (e.g., —CH₂—, —CH₂CH₂—, or —CH₂CH₂CH₂—)).

[0336] In some embodiments, the polynucleotide, primary construct, or mmRNA includes n number of linked nucleosides having Formula (IIn-1)-(II-n2):

[chemical structure]

or a pharmaceutically acceptable salt or stereoisomer thereof, wherein R^{3′} is O, S, or —NR^{N1}— wherein R^{N1} is H, optionally substituted alkyl, optionally substituted alkenyl, optionally substituted alkynyl, or optionally substituted aryl and R^{3″} is optionally substituted alkylene (e.g., —CH₂—, —CH₂CH—, or —CH₂CH₂CH₂—) or optionally substituted heteroalkylene (e.g., —CH₂NH—, —CH₂CH₂NH—, —CH₂OCH₂—, or —CH₂CH₂OCH₂) (e.g., R^{3′} is O and R^{3″} is optionally substituted alkylene (e.g., —CH₂—, —CH₂CH₂—, or —CH₂CH₂CH₂—)).

[0337] In some embodiments, the polynucleotide, primary construct, or mmRNA includes a locked modified ribose that forms a tetracyclic heterocyclyl. In some embodiments, the polynucleotide, primary construct, or mmRNA (e.g., the first region, the first flanking region, or the second flanking region) includes n number of linked nucleosides having Formula (IIo):

[chemical structure]

or a pharmaceutically acceptable salt or stereoisomer thereof, wherein R^{12a}, R^{12c}, T^{1′}, T^{1″}, T^{2′}, T^{2″}, V¹ and V³ are as described herein.

[0338] Any of the formulas for the polynucleotides, primary constructs, or mmRNA can include one or more nucleobases described herein (e.g., Formulas (b1)-(b43)).

[0339] In one embodiment, the present invention provides methods of preparing a polynucleotide, primary construct, or mmRNA, wherein the polynucleotide comprises n number of nucleosides having Formula (Ia), as defined herein:

[chemical structure]

the method comprising reacting a compound of Formula (IIIa), as defined herein:

[chemical structure]

with an RNA polymerase, and a cDNA template.

[0340] In a further embodiment, the present invention provides methods of amplifying a poly nucleotide, primary construct, or mmRNA comprising at least one nucleotide (e.g., mmRNA molecule), the method comprising: reacting a compound of Formula (IIIa), as defined herein, with a primer, a cDNA template, and an RNA polymerase.

[0341] In one embodiment, the present invention provides methods of preparing a polynucleotide, primary construct, or mmRNA comprising at least one nucleotide (e.g. mmRNA molecule), wherein the polynucleotide comprises n number of nucleosides having Formula (Ia), as defined herein:

[chemical structure]

the method comprising reacting a compound of Formula (IIIa-1), as defined herein:

[chemical structure]

with an RNA polymerase, and a cDNA template.

[0342] In a further embodiment, the present invention provides methods of amplifying a polynucleotide, primary construct, or mmRNA comprising at least one nucleotide (e.g., mmRNA molecule), the method comprising:
[0343] reacting a compound of Formula (IIIa-1), as defined herein, with a primer, a cDNA template, and an RNA polymerase.

[0344] In one embodiment, the present invention provides methods of preparing a modified mRNA comprising at least one nucleotide (e.g., mmRNA molecule), wherein the polynucleotide comprises n number of nucleosides having Formula (Ia-2), as defined herein:

[chemical structure]

the method comprising reacting a compound of Formula (IIIa-2), as defined herein:

[chemical structure]

with an RNA polymerase, and a cDNA template.

[0345] In a further embodiment, the present invention provides methods of amplifying a modified mRNA comprising at least one nucleotide (e.g., mmRNA molecule), the method comprising:
[0346] reacting a compound of Formula (IIIa-2), as defined herein, with a primer, a cDNA template, and an RNA polymerase.

[0347] In some embodiments, the reaction may be repeated from 1 to about 7,000 times. In any of the embodiments herein, B may be a nucleobase of Formula (b1)-(b43).

[0348] The polynucleotides, primary constructs, and mmRNA can optionally include 5′ and/or 3′ flanking regions, which are described herein.

Modified RNA (mmRNA) Molecules

[0349] The present invention also includes building blocks, e.g., modified ribonucleosides, modified ribonucleotides, of modified RNA (mmRNA) molecules. For example, these building blocks can be useful for preparing the polynucleotides, primary constructs, or mmRNA of the invention.

[0350] In some embodiments, the building block molecule has Formula (IIIa) or (IIIa-1):

[chemical structure]

or a pharmaceutically acceptable salt or stereoisomer thereof, wherein the substituents are as described herein (e.g., for Formula (Ia) and (Ia-1)), and wherein when B is an unmodified nucleobase selected from cytosine, guanine, uracil and adenine, then at least one of Y¹, Y², or Y³ is not O.

[0351] In some embodiments, the building block molecule, which may be incorporated into a polynucleotide, primary construct, or mmRNA, has Formula (IVa)-(IVb):

[chemical structure]

or a pharmaceutically acceptable salt or stereoisomer thereof, wherein B is as described herein (e.g., any one of (b1)-(b43)). In particular embodiments, Formula (IVa) or (IVb) is combined with a modified uracil (e.g., any one of formulas (b1)-(b9), (b21)-(b23), and (b28)-(b31), such as formula (b1), (b8), (b28), (b29), or (b30)). In particular embodiments, Formula (IVa) or (IVb) is combined with a modified cytosine (e.g., any one of formulas (b10)-(b14), (b24), (b25), and (b32)-(b36), such as formula (b10) or (b32)). In particular embodiments, Formula (IVa) or (IVb) is combined with a modified guanine (e.g., any one of formulas (b15)-(b17) and (b37)-(b40)). In particular embodiments, Formula (IVa) or (IVb) is combined with a modified adenine (e.g., any one of formulas (b18)-(b20) and (b41)-(b43)).

[0352] In some embodiments, the building block molecule, which may be incorporated into a polynucleotide, primary construct, or mmRNA, has Formula (IVe)-(IVk):

[chemical structure]

[chemical structure]

or a pharmaceutically acceptable salt or stereoisomer thereof, wherein B is as described herein (e.g., any one of (b1)-(b43)). In particular embodiments, one of Formulas (IVc)-(IVk) is combined with a modified uracil (e.g., any one of formulas (b1)-(b9), (b21)-(b23), and (b28)-(b31), such as formula (b1), (b8), (b28), (b29), or (b30)). In particular embodiments, one of Formulas (IVc)-(IVk) is combined with a modified cytosine (e.g. any one of formulas (b10)-(b14), (b24), (b25), and (b32)-(b36), such as formula (b10) or (b32)). In particular embodiments, one of Formulas (IVc)-(IVk) is combined with a modified guanine (e.g., any one of formulas (b15)-(b17) and (b37)-(b40)). In particular embodiments, one of Formulas (IVc)-(IVk) is combined with a modified adenine (e.g., any one of formulas (b18)-(b20) and (b41)-(b43)).

[0353] In other embodiments, the building block molecule, which may be incorporated into a polynucleotide, primary construct, or mmRNA, has Formula (Va) or (Vb):

[chemical structure]

or a pharmaceutically acceptable salt or stereoisomer thereof, wherein B is as described herein (e.g., any one of (b1)-(b43)).

[0354] In other embodiments, the building block molecule, which may be incorporated into a polynucleotide, primary construct, or mmRNA, has Formula (IXa)-(IXd):

[chemical structure]

or a pharmaceutically acceptable salt or stereoisomer thereof, wherein B is as described herein (e.g., any one of (b1)-(b43)). In particular embodiments, one of Formulas (IXa)-(IXd) is combined with a modified uracil (e.g., any one of formulas (b1)-(b9), (b21)-(b23), and (b28)-(b31), such as formula (b1), (b8), (b28), (b29), or (b30)). In particular embodiments, one of Formulas (IXa)-(IXd) is combined with a modified cytosine (e.g., any one of formulas (b10)-(b14), (b24), (b25), and (b32)-(b36), such as formula (b10) or (b32)). In particular embodiments, one of Formulas (IXa)-(IXd) is combined with a modified guanine (e.g., any one of formulas (b15)-(b17) and (b37)-(b40)). In particular embodiments, one of Formulas (IXa)-(IXd) is combined with a modified adenine (e.g., any one of formulas (b18)-(b20) and (b41)-(b43)).

[0355] In other embodiments, the building block molecule, which may be incorporated into a polynucleotide, primary construct, or mmRNA, has Formula (IXe)—(IXg):

[chemical structure]

or a pharmaceutically acceptable salt or stereoisomer thereof, wherein B is as described herein (e.g., any one of (b1)-(b43)). In particular embodiments, one of Formulas (IXe)—(IXg) is combined with a modified uracil (e.g., any one of formulas (b1)-(b9), (b21)-(b23), and (b28)-(b31), such as formula (b1), (b8), (b28), (b29), or (b30)). In particular embodiments, one of Formulas (IXe)—(IXg) is combined with a modified cytosine (e.g., any one of formulas (b10)-(b14), (b24), (b25), and (b32)-(b36), such as formula (b10) or (b32)). In particular embodiments, one of Formulas (IXe)—(IXg) is combined with a modified guanine (e.g., any one of formulas (b15)-(b17) and (b37)-(b40)). In particular embodiments, one of Formulas (IXe)—(IXg) is combined with a modified adenine (e.g., any one of formulas (b18)-(b20) and (b41)-(b43)).

[0356] In other embodiments, the building block molecule, which may be incorporated into a polynucleotide, primary construct, or mmRNA, has Formula (IXh)-(IXk):

[chemical structure]

or a pharmaceutically acceptable salt or stereoisomer thereof, wherein B is as described herein (e.g., any one of (b1)-(b43)). In particular embodiments, one of Formulas (IXh)-(IXk) is combined with a modified uracil (e.g., any one of formulas (b1)-(b9), (b21)-(b23), and (b28)-(b31), such as formula (b1), (b8), (b28), (b29), or (b30)). In particular embodiments, one of Formulas (IXh)-(IXk) is combined with a modified cytosine (e.g., any one of formulas (b10)-(b14), (b24), (b25), and (b32)-(b36), such as formula (b10) or (b32)). In particular embodiments, one of Formulas (IXh)-(IXk) is combined with a modified guanine (e.g., any one of formulas (b15)-(b17) and (b37)-(b40)). In particular embodiments, one of Formulas (IXh)-(IXk) is combined with a modified adenine (e.g., any one of formulas (b18)-(b20) and (b41)-(b43)).

[0357] In other embodiments, the building block molecule, which may be incorporated into a polynucleotide, primary construct, or mmRNA, has Formula (IXl)-(IXr):

[chemical structure]

(IXr) or a pharmaceutically acceptable salt or stereoisomer thereof, wherein each r1 and r2 is, independently, an integer from 0 to 5 (e.g., from 0 to 3, from 1 to 3, or from 1 to 5) and B is as described herein (e.g., any one of (b1)-(b43)). In particular embodiments, one of Formulas (IXl)-(IXr) is combined with a modified uracil (e.g., any one of formulas (b1)-(b9), (b21)-(b23), and (b28)-(b3I), such as formula (b1), (b8), (b28), (b29), or (b30)). In particular embodiments, one of Formulas (IXl)-(IXr) is combined with a modified cytosine (e.g., any one of formulas (b10)-(b14), (b24), (b25), and (b32)-(b36), such as formula (b10) or (b32)). In particular embodiments, one of Formulas (IXl)-(IXr) is combined with a modified guanine (e.g., any one of formulas (b15)-(b17) and (b37)-(b40)). In particular embodiments, one of Formulas (IXl)-(IXr) is combined with a modified adenine (e.g., any one of formulas (b18)-(b20) and (b41)-(b43)).

[0358] In some embodiments, the building block molecule, which may be incorporated into a polynucleotide, primary construct, or mmRNA, can be selected from the group consisting of:

[chemical structure]

[chemical structure]

[chemical structure]

or a pharmaceutically acceptable salt or stereoisomer thereof wherein each r is, independently, an integer from 0 to 5 (e.g., from 0 to 3, from 1 to 3, or from 1 to 5).

[0359] In some embodiments, the building block molecule, which may be incorporated into a polynucleotide, primary construct, or mmRNA, can be selected from the group consisting of:

[chemical structure]

[chemical structure]

or a pharmaceutically acceptable salt or stereoisomer thereof, wherein each r is, independently, an integer from 0 to 5 (e.g., from 0 to 3, from 1 to 3, or from 1 to 5) and s1 is as described herein.

[0360] In some embodiments, the building block molecule, which may be incorporated into a nucleic acid (e.g., RNA, mRNA, polynucleotide, primary construct, or mmRNA), is a modified uridine (e.g., selected from the group consisting of:

[chemical structure]

[chemical structure]

[chemical structure]

[chemical structure]

[chemical structure]

[chemical structure]

[chemical structure]

[chemical structure]

[chemical structure]

[chemical structure]

[chemical structure]

[chemical structure]

[chemical structure]

[chemical structure]

[chemical structure]

[chemical structure]

[chemical structure]

[chemical structure]

[chemical structure]

[chemical structure]

[chemical structure]

or a pharmaceutically acceptable salt or stereoisomer thereof wherein Y¹, Y³, Y⁴, Y⁶, and r are as described herein (e.g., each r is, independently, an integer from 0 to 5, such as from 0 to 3, from 1 to 3, or from 1 to 5)).

[0361] In some embodiments, the building block molecule, which may be incorporated into a polynucleotide, primary construct, or mmRNA, is a modified cytidine (e.g., selected from the group consisting of:

[chemical structure]

[chemical structure]

[chemical structure]

[chemical structure]

[chemical structure]

[chemical structure]

[chemical structure]

or a pharmaceutically acceptable salt or stereoisomer thereof, wherein Y¹, Y³, Y⁴, Y⁶ and r are as described herein (e.g., each r is, independently, an integer from 0 to 5, such as from 0 to 3, from 1 to 3, or from 1 to 5)). For example, the building block molecule, which may be incorporated into a polynucleotide, primary construct, or mmRNA, can be:

[chemical structure]

or a pharmaceutically acceptable salt or stereoisomer thereof, wherein each r is, independently, an integer from 0 to 5 (e.g., from 0 to 3, from 1 to 3, or from 1 to 5).

[0362] In some embodiments, the building block molecule, which may be incorporated into a polynucleotide, primary construct, or mmRNA, is a modified adenosine (e.g., selected from the group consisting of:

[chemical structure]

[chemical structure]

[chemical structure]

[chemical structure]

[chemical structure]

[chemical structure]

[chemical structure]

[chemical structure]

or a pharmaceutically acceptable salt or stereoisomer thereof, wherein Y¹, Y³, Y⁴, Y⁶, and r are as described herein (e.g., each r is, independently, an integer from 0 to 5, such as from 0 to 3, from 1 to 3, or from 1 to 5)).

[0363] In some embodiments, the building block molecule, which may be incorporated into a polynucleotide, primary construct, or mmRNA, is a modified guanosine (e g selected from the group consisting of:

[chemical structure]

[chemical structure]

[chemical structure]

[chemical structure]

[chemical structure]

[chemical structure]

[chemical structure]

or a pharmaceutically acceptable salt or stereoisomer thereof, wherein Y¹, Y³, Y⁴, Y⁶, and r are as described herein (e.g., each r is, independently, an integer from 0 to 5, such as from 0 to 3, from 1 to 3, or from 1 to 5)).

[0364] In some embodiments, the chemical modification can include replacement of C group at C-5 of the ring (e.g., for a pyrimidine nucleoside, such as cytosine or uracil) with N (e.g., replacement of the >CH group at C-5 with >NR^{N1} group, wherein R^{N}1 is H or optionally substituted alkyl). For example, the building block molecule, which may be incorporated into a polynucleotide, primary construct, or mmRNA, can be:

[chemical structure]

or a pharmaceutically acceptable salt or stereoisomer thereof, wherein each r is, independently, an integer from 0 to 5 (e.g., from 0 to 3, from 1 to 3, or from 1 to 5).

[0365] In another embodiment, the chemical modification can include replacement of the hydrogen at C-5 of cytosine with halo (e.g., Br, Cl, F, or I) or optionally substituted alkyl (e.g., methyl). For example, the building block molecule, which may be incorporated into a polynucleotide, primary construct, or mmRNA, can be:

[chemical structure]

or a pharmaceutically acceptable salt or stereoisomer thereof, wherein each r is, independently, an integer from 0 to 5 (e.g., from 0 to 3, from 1 to 3, or from 1 to 5).

[0366] In yet a further embodiment, the chemical modification can include a fused ring that is formed by the NH₂ at the C-4 position and the carbon atom at the C-5 position. For example, the building block molecule, which may be incorporated into a polynucleotide, primary construct, or mmRNA, can be:

[chemical structure]

or a pharmaceutically acceptable salt or stereoisomer thereof, wherein each r is, independently, an integer from 0 to 5 (e.g., from 0 to 3, from 1 to 3, or from 1 to 5).

### Modifications on the Sugar

[0367] The modified nucleosides and nucleotides (e.g., building block molecules), which may be incorporated into a polynucleotide, primary construct, or mmRNA (e.g., RNA or mRNA, as described herein), can be modified on the sugar of the ribonucleic acid. For example, the 2′ hydroxyl group (OH) can be modified or replaced with a number of different substituents. Exemplary substitutions at the 2′-position include, but are not limited to, H, halo, optionally substituted C₁₋₆ alkyl; optionally substituted C₁₋₆ alkoxy; optionally substituted C₆₋₁₀ aryloxy; optionally substituted C₃₋₈ cycloalkyl; optionally substituted C₃₋₈ cycloalkoxy; optionally substituted C₆₋₁₀ aryloxy; optionally substituted C₆₋₁₀ aryl-C₁₋₆ alkoxy, optionally substituted C₁₋₁₂ (heterocyclyl)oxy; a sugar (e.g., ribose, pentose, or any described herein); a polyethyleneglycol (PEG), —O(CH₂CH₂O)ₙCH₁₂CH₂OR, where R is H or optionally substituted alkyl, and n is an integer from 0 to 20 (e.g., from 0 to 4, from 0 to 8, from 0 to 10, from 0 to 16, from 1 to 4, from 1 to 8, from 1 to 10, from 1 to 16, from 1 to 20, from 2 to 4, from 2 to 8, from 2 to 10, from 2 to 16, from 2 to 20, from 4 to 8, from 4 to 10, from 4 to 16, and from 4 to 20); “locked” nucleic acids (LNA) in which the 2′-hydroxyl is connected by a C₁₋₆ alkylene or C₁₋₆ heteroalkylene bridge to the 4′-carbon of the same ribose sugar, where exemplary bridges included methylene, propylene, ether, or amino bridges; aminoalkyl, as defined herein; aminoalkoxy, as defined herein; amino as defined herein; and amino acid, as defined herein Generally, RNA includes the sugar group ribose, which is a 5-membered ring having an oxygen. Exemplary, non-limiting modified nucleotides include replacement of the oxygen in ribose (e.g., with S, Se, or alkylene, such as methylene or ethylene); addition of a double bond (e.g., to replace ribose with cyclopentenyl or cyclohexenyl); ring contraction of ribose (e.g., to form a 4-membered ring of cyclobutane or oxetane); ring expansion of ribose (e.g., to form a 6- or 7-membered ring having an additional carbon or heteroatom, such as for anhydrohexitol, altritol, mannitol, cyclohexanyl, cyclohexenyl, and morpholino that also has a phosphoramidate backbone); multicyclic forms (e.g., tricyclo; and “unlocked” forms, such as glycol nucleic acid (GNA) (e.g., R-GNA or S-GNA, where ribose is replaced by glycol units attached to phosphodiester bonds), threose nucleic acid (TNA, where ribose is replace with α-L-threofuranosyl-(3′→2′)), and peptide nucleic acid (PNA, where 2-amino-ethyl-glycine linkages replace the ribose and phosphodiester backbone). The sugar group can also contain one or more carbons that possess the opposite stereochernical configuration than that of the corresponding carbon in ribose. Thus, a polynucleotide, primary construct, or mmRNA molecule can include nucleotides containing, e.g., arabinose, as the sugar.

### Modifications on the Nucleobase

[0368] The present disclosure provides for modified nucleosides and nucleotides. As described herein “nucleoside” is defined as a compound containing a sugar molecule (e.g., a pentose or ribose) or a derivative thereof in combination with an organic base (e.g., a purine or pyrimidine) or a derivative thereof (also referred to herein as “nucleobase”). As described herein, “nucleotide” is defined as a nucleoside including a phosphate group. The modified nucleotides may by synthesized by any useful method, as described herein (e.g., chemically, enzymatically, or recombinantly to include one or more modified or non-natural nucleosides).

[0369] The modified nucleotide base pairing encompasses not only the standard adenosine-thymine, adenosine-uracil, or guanosine-cytosine base pairs, but also base pairs formed between nucleotides and/or modified nucleotides comprising non-standard or modified bases, wherein the arrangement of hydrogen bond donors and hydrogen bond acceptors permits hydrogen bonding between a non-standard base and a standard base or between two complementary non-standard base structures. One example of such non-standard base pairing is the base pairing between the modified nucleotide inosine and adenine, cytosine or uracil.

[0370] The modified nucleosides and nucleotides can include a modified nucleobase. Examples of nucleobases found in RNA include, but are not limited to, adenine, guanine, cytosine, and uracil. Examples of nucleobase found in DNA include, but are not limited to, adenine, guanine, cytosine, and thymine. These nucleobases can be modified or wholly replaced to provide polynucleotides, primary constructs, or mmRNA molecules having enhanced properties, e.g., resistance to nucleases through disruption of the binding of a major groove binding partner. Table 8 below identifies the chemical faces of each canonical nucleotide. Circles identify the atoms comprising the respective chemical regions.

TABLE 8

| | | | | Watson-Crick |
|---|---|---|---|---|
| | | Major Groove | Minor Groove | Base-pairing |
| | | Face | Face | Face |
| Pyrimi- dines | Cytidine: | [chemical structure] | [chemical structure] | [chemical structure] |
| | Uridine: | [chemical structure] | [chemical structure] [symbol] | [chemical structure] |
| Purines | Adenosine: | [chemical structure] | [chemical structure] | [chemical structure] |
| | Guanosine: | [chemical structure] | [chemical structure] | [chemical structure] |

[symbol]

indicates data missing or illegible when filed

[0371] In some embodiments, B is a modified uracil. Exemplary modified uracils include those having Formula (b1)-(b5):

[chemical structure]

or a pharmaceutically acceptable salt or stereoisomer thereof,
[0372] wherein
[0373] [symbol] is a single or double bond;
[0374] each of T^{1′}, T^{1″}, T^{2′}, and T^{2″} is, independently, H, optionally substituted alkyl, optionally substituted alkoxy, or optionally substituted thioalkoxy, or the combination of T^{1′} and T^{1″} or the combination of T^{2′} and T^{2″} join together (e.g., as in T²) to form O (oxo), S (thio), or Se (seleno);
[0375] each of V¹ and V² is, independently, O, S, N(R^{Vb})ₙᵥ, or C(R^{Vb})ₙᵥ, wherein nv is an integer from 0 to 2 and each R^{Vb} is, independently, H, halo, optionally substituted amino acid, optionally substituted alkyl, optionally substituted haloalkyl, optionally substituted alkenyl, optionally substituted alkynyl, optionally substituted alkoxy, optionally substituted alkenyloxy, optionally substituted alkynyloxy, optionally substituted hydroxyalkyl, optionally substituted hydroxyalkenyl, optionally substituted hydroxyalkynyl, optionally substituted aminoalkyl (e.g., substituted with an N-protecting group, such as any described herein, e.g., trifluoroacetyl), optionally substituted aminoalkenyl, optionally substituted aminoalkynyl, optionally substituted acylaminoalkyl (e.g., substituted with an N-protecting group, such as any described herein, e.g., trifluoroacetyl), optionally substituted alkoxycarbonylalkyl, optionally substituted alkoxycarbonylalkenyl, optionally substituted alkoxycarbonylalkynyl, or optionally substituted alkynyloxy (e.g., optionally substituted with any substituent described herein, such as those selected from (1)-(21) for alkyl);
[0376] R¹⁰ is H, halo, optionally substituted amino acid, hydroxy, optionally substituted alkyl, optionally substituted alkenyl, optionally substituted alkynyl, optionally substituted aminoalkyl, optionally substituted hydroxyalkyl, optionally substituted hydroxyalkenyl, optionally substituted hydroxyalkynyl, optionally substituted aminoalkenyl, optionally substituted aminoalkynyl, optionally substituted alkoxy, optionally substituted alkoxycarbonylalkyl, optionally substituted alkoxycarbonylalkenyl, optionally substituted alkoxycarbonylalkynyl, optionally substituted alkoxycarbonylalkoxy, optionally substituted carboxyalkoxy, optionally substituted carboxyalkyl, or optionally substituted carbonylalkyl;
[0377] R¹¹ is H or optionally substituted alkyl;
[0378] R^{12a} is H, optionally substituted alkyl, optionally substituted hydroxyalkyl, optionally substituted hydroxyalkenyl, optionally substituted hydroxyalkynyl, optionally substituted aminoalkyl, optionally substituted aminoalkenyl, or optionally substituted aminoalkynyl, optionally substituted carboxyalkyl (e.g., optionally substituted with hydroxy), optionally substituted carboxyalkoxy, optionally substituted carboxyaminoalkyl, or optionally substituted carbamoylalkyl; and
[0379] R^{12c} is H, halo, optionally substituted alkyl, optionally substituted alkoxy, optionally substituted thioalkoxy, optionally substituted amino, optionally substituted hydroxyalkyl, optionally substituted hydroxyalkenyl, optionally substituted hydroxyalkynyl, optionally substituted aminoalkyl, optionally substituted aminoalkenyl, or optionally substituted aminoalkynyl.

[0380] Other exemplary modified uracils include those having Formula (b6)-(b9):

[chemical structure]

[0381] (b9), or a pharmaceutically acceptable salt or stereoisomer thereof,
[0382] wherein
[0383] [symbol] is a single or double bond;
[0384] each of T^{1′}, T^{1″}, T^{2′}, and T^{2″} is, independently, H, optionally substituted alkyl, optionally substituted alkoxy, or optionally substituted thioalkoxy, or the combination of T^{1′} and T^{1″} join together (e.g., as in T¹) or the combination of T^{2′} and T^{2″} join together (e.g., as in T²) to form O (oxo), S (thio), or Se (seleno), or each T^{2′} and T^{2″} is, independently, O (oxo), S (thio), or Se (seleno);
[0385] each of W¹ and W² is, independently, N(R^{Wa})_{nw} or C(R^{Wa})_{nw}, wherein nw is an integer from 0 to 2 and each R^{Wa} is, independently, H, optionally substituted alkyl, or optionally substituted alkoxy;
[0386] each W¹ is, independently, O, S, N(R^{Va})ₙᵥ, or C(R^{Va})ₙᵥ, wherein nv is an integer from 0 to 2 and each R^{Va} is, independently, H, halo, optionally substituted amino acid, optionally substituted alkyl, optionally substituted hydroxyalkyl, optionally substituted hydroxyalkenyl, optionally substituted hydroxyalkynyl, optionally substituted alkenyl, optionally substituted alkynyl, optionally substituted heterocyclyl, optionally substituted alkheterocyclyl, optionally substituted alkoxy, optionally substituted alkenyloxy, or optionally substituted alkynyloxy, optionally substituted aminoalkyl (e.g., substituted with an N-protecting group, such as any described herein, e.g., trifluoroacetyl, or sulfoalkyl), optionally substituted aminoalkenyl, optionally substituted aminoalkynyl, optionally substituted acylaminoalkyl (e.g., substituted with an N-protecting group, such as any described herein, e.g., trifluoroacetyl), optionally substituted alkoxycarbonylalkyl, optionally substituted alkoxycarbonylalkenyl, optionally substituted alkoxycarbonylalkynyl, optionally substituted alkoxycarbonylaryl, optionally substituted alkoxycarbonylalkoxy, optionally substituted carboxyalkyl (e.g., optionally substituted with hydroxy and/or an O-protecting group), optionally substituted carboxyalkoxy, optionally substituted carboxyaminoalkyl, or optionally substituted carbamoylalkyl (e.g., optionally substituted with any substituent described herein, such as those selected from (1)-(21) for alkyl), and wherein R^{Va} and R^{12c} taken together with the carbon atoms to which they are attached can form optionally substituted cycloalkyl, optionally substituted aryl, or optionally substituted heterocyclyl (e.g., a 5- or 6-membered ring);
[0387] R^{12a} is H, optionally substituted alkyl, optionally substituted hydroxyalkyl, optionally substituted hydroxyalkenyl, optionally substituted hydroxyalkynyl, optionally substituted aminoalkyl, optionally substituted aminoalkenyl, optionally substituted aminoalkynyl, optionally substituted carboxyalkyl (e.g., optionally substituted with hydroxy and/or an O-protecting group), optionally substituted carboxyalkoxy, optionally substituted carboxyaminoalkyl, optionally substituted carbamoylalkyl, or absent;
[0388] R^{12b} is H, optionally substituted alkyl, optionally substituted alkenyl, optionally substituted alkynyl, optionally substituted hydroxyalkyl, optionally substituted hydroxyalkenyl, optionally substituted hydroxyalkynyl, optionally substituted aminoalkyl, optionally substituted aminoalkenyl, optionally substituted aminoalkynyl, optionally substituted alkaryl, optionally substituted heterocyclyl, optionally substituted alkheterocyclyl, optionally substituted amino acid, optionally substituted alkoxycarbonylaryl, optionally substituted alkoxycarbonylalkoxy, optionally substituted alkoxycarbonylalkyl, optionally substituted alkoxycarbonylalkenyl, optionally substituted alkoxycarbonylalkynyl, optionally substituted alkoxycarbonylalkoxy, optionally substituted carboxyalkyl (e.g., optionally substituted with hydroxy and/or an O-protecting group), optionally substituted carboxyalkoxy, optionally substituted carboxyaminoalkyl, or optionally substituted carbamoylalkyl,
[0389] wherein the combination of R^{12b} and T¹ or the combination of R^{12b} and R^{12c} can join together to form optionally substituted heterocyclyl; and
[0390] R^{12c} is H, halo, optionally substituted alkyl, optionally substituted alkoxy, optionally substituted thioalkoxy, optionally substituted amino, optionally substituted aminoalkyl, optionally substituted aminoalkenyl, or optionally substituted aminoalkynyl.

[0391] Further exemplary modified uracils include those having Formula (b28)-(b31):

[chemical structure]

or a pharmaceutically acceptable salt or stereoisomer thereof,
[0392] wherein
[0393] each of T¹ and T² is, independently, O (oxo), S (thio), or Se (seleno);
[0394] each R^{Vb′} and R^{Vb″} is, independently, H, halo, optionally substituted amino acid, optionally substituted alkyl, optionally substituted haloalkyl, optionally substituted hydroxyalkyl, optionally substituted hydroxyalkenyl, optionally substituted hydroxyalkynyl, optionally substituted alkenyl, optionally substituted alkynyl, optionally substituted alkoxy, optionally substituted alkenyloxy, optionally substituted alkynyloxy, optionally substituted aminoalkyl (e.g., substituted with an N-protecting group, such as any described herein, e.g., trifluoroacetyl, or sulfoalkyl), optionally substituted aminoalkenyl, optionally substituted aminoalkynyl, optionally substituted acylaminoalkyl (e.g., substituted with an N-protecting group, such as any described herein, e.g., trifluoroacetyl), optionally substituted alkoxycarbonylalkyl, optionally substituted alkoxycarbonylalkenyl, optionally substituted alkoxycarbonylalkynyl, optionally substituted alkoxycarbonylaryl, optionally substituted alkoxycarbonylalkoxy, optionally substituted carboxyalkyl (e.g., optionally substituted with hydroxy and/or an O-protecting group), optionally substituted carboxyalkoxy, optionally substituted carboxyaminoalkyl, or optionally substituted carbamoylalkyl (e.g., optionally substituted with any substituent described herein, such as those selected from (1)-(21) for alkyl) (e.g., R^{Vb′} is optionally substituted alkyl, optionally substituted alkenyl, or optionally substituted aminoalkyl, e.g., substituted with an N-protecting group, such as any described herein, e.g., trifluoroacetyl, or sulfoalkyl);
[0395] R^{12a} is H, optionally substituted alkyl, optionally substituted carboxyaminoalkyl, optionally substituted aminoalkyl (e.g., e.g., substituted with an N-protecting group, such as any described herein, e.g., trifluoroacetyl, or sulfoalkyl), optionally substituted aminoalkenyl, or optionally substituted aminoalkynyl; and
[0396] R^{12b} is H, optionally substituted alkyl, optionally substituted alkenyl, optionally substituted alkynyl, optionally substituted hydroxyalkyl, optionally substituted hydroxyalkenyl, optionally substituted hydroxyalkynyl, optionally substituted aminoalkyl, optionally substituted aminoalkenyl, optionally substituted aminoalkynyl (e.g., e.g., substituted with an N-protecting group, such as any described herein, e.g., trifluoroacetyl, or sulfoalkyl),
[0397] optionally substituted alkoxycarbonylaryl, optionally substituted alkoxycarbonylalkoxy, optionally substituted alkoxycarbonylalkyl, optionally substituted alkoxycarbonylalkenyl, optionally substituted alkoxycarbonylalkynyl, optionally substituted alkoxycarbonylalkoxy, optionally substituted carboxyalkoxy, optionally substituted carboxyalkyl, or optionally substituted carbamoylalkyl.

[0398] In particular embodiments, T¹ is O (oxo), and T² is S (thio) or Se (seleno). In other embodiments, T¹ is S (thio), and T2 is O (oxo) or Se (seleno), an some embodiments, R^{b} is H, optionally substituted alkyl, or optionally substituted alkoxy.

[0399] In other embodiments, each R^{12a} and R^{12b} is, independently, H, optionally substituted alkyl, optionally substituted alkenyl, optionally substituted alkynyl, or optionally substituted hydroxyalkyl. In particular embodiments, R^{12a} is H. In other embodiments, both R^{12a} and R^{12b} are H.

[0400] In some embodiments, each R^{Vb′} of R^{12b} is, independently, optionally substituted aminoalkyl (e.g., substituted with an N-protecting group, such as any described herein, e.g., trifluoroacetyl, or sulfoalkyl), optionally substituted aminoalkenyl, optionally substituted aminoalkynyl, or optionally substituted acylaminoalkyl (e.g., substituted with an N-protecting group, such as any described herein, e.g., trifluoroacetyl). In some embodiments, the amino and/or alkyl of the optionally substituted aminoalkyl is substituted with one or more of optionally substituted alkyl, optionally substituted alkenyl, optionally substituted sulfoalkyl, optionally substituted carboxy (e.g., substituted with an O-protecting group), optionally substituted hydroxy (e.g., substituted with an O-protecting group), optionally substituted carboxyalkyl (e.g., substituted with an O-protecting group), optionally substituted alkoxycarbonylalkyl (e.g., substituted with an O-protecting group), or N-protecting group. In some embodiments, optionally substituted aminoalkyl is substituted with an optionally substituted sulfoalkyl or optionally substituted alkenyl. In particular embodiments, R^{12a} and R^{Vb″} are both H. In particular embodiments, T¹ is O (oxo), and T² is S (thio) or Se (seleno).

[0401] In some embodiments, R^{Vb′} is optionally substituted alkoxycarbonylalkyl or optionally substituted carbamoylalkyl.

[0402] In particular embodiments, the optional substituent for R^{12a}, R^{12b}, R^{12c}, or R^{Va} is a polyethylene glycol group (e.g., —(CH₂)ₛ₂(OCH₂CH₂)ₛ₁(CH₂)ₛ₃NR^{N1}, wherein s1 is an integer from 1 to 10 (e.g., from 1 to 6 or from 1 to 4), each of s2 and s3, independently, is an integer from 0 to 10 (e.g., from 0 to 4, from 0 to 6, from 1 to 4, from 1 to 6, or from 1 to 10), and R′ is H or C₁₋₂₀ alkyl); or an amino-polyethylene glycol group (e.g., —NR^{N1}(CH₂)ₛ₂(CH₂CH₂O)ₛ₁(CH₂)ₛ₃NR^{N1}, wherein s1 is an integer from 1 to 10 (e.g., from 1 to 6 or from 1 to 4), each of s2 and s3, independently, is an integer from 0 to 10 (e.g., from 0 to 4, from 0 to 6, from 1 to 4, from 1 to 6, or from 1 to 10), and each R^{N1} is, independently, hydrogen or optionally substituted C₁₋₆ alkyl).

[0403] In some embodiments, B is a modified cytosine. Exemplary modified cytosines include compounds of Formula (b10)-(b14):

[chemical structure]

or a pharmaceutically acceptable salt or stereoisomer thereof,
[0404] wherein
[0405] each of T^{3′} and T^{3″} is, independently, H, optionally substituted alkyl, optionally substituted alkoxy, or optionally substituted thioalkoxy, or the combination of T^{3′} and T^{3″} join together (e.g., as in T³) to form O (oxo), S (thio), or Se (seleno);
[0406] each V⁴ is, independently, O, S, N(R^{Vc})ₙᵥ, or C(R^{Vc})ₙᵥ, wherein nv is an integer from 0 to 2 and each R^{Vc} is, independently, H, halo, optionally substituted amino acid, optionally substituted alkyl, optionally substituted alkenyl, optionally substituted alkynyl, optionally substituted alkoxy, optionally substituted alkenyloxy, optionally substituted heterocyclyl, optionally substituted alkheterocyclyl, or optionally substituted alkynyloxy (e.g., optionally substituted with any substituent described herein, such as those selected from (1)-(21) for alkyl), wherein the combination of R^{13b} and R^{Vc} can be taken together to form optionally substituted heterocyclyl;
[0407] each V⁵ is, independently, N(R^{Vd})ₙᵥ, or C(R^{Vd})ₙᵥ, wherein nv is an integer from 0 to 2 and each R^{Vd} is, independently, H, halo, optionally substituted amino acid, optionally substituted alkyl, optionally substituted alkenyl, optionally substituted alkynyl, optionally substituted alkoxy, optionally substituted alkenyloxy, optionally substituted heterocyclyl, optionally substituted alkheterocyclyl, or optionally substituted alkynyloxy (e.g., optionally substituted with any substituent described herein, such as those selected from (1)-(21) for alkyl) (e.g., V⁵ is —CH or N);
[0408] each of R^{13a} and R^{13b} is, independently, H, optionally substituted acyl, optionally substituted acyloxyalkyl, optionally substituted alkyl, or optionally substituted alkoxy, wherein the combination of R^{13b} and R¹⁴ can be taken together to form optionally substituted heterocyclyl;
[0409] each R¹⁴ is, independently, H, halo, hydroxy, thiol, optionally substituted acyl, optionally substituted amino acid, optionally substituted alkyl, optionally substituted haloalkyl, optionally substituted alkenyl, optionally substituted alkynyl, optionally substituted hydroxyalkyl (e.g., substituted with an O-protecting group), optionally substituted hydroxyalkenyl, optionally substituted hydroxyalkynyl, optionally substituted alkoxy, optionally substituted alkenyloxy, optionally substituted alkynyloxy, optionally substituted aminoalkoxy, optionally substituted alkoxyalkoxy, optionally substituted acyloxyalkyl, optionally substituted amino (e.g., —NHR, wherein R is H, alkyl, aryl, or phosphoryl), azido, optionally substituted aryl, optionally substituted heterocyclyl, optionally substituted alkheterocyclyl, optionally substituted aminoalkyl, optionally substituted aminoalkenyl, or optionally substituted aminoalkyl; and
[0410] each of R¹⁵ and R¹⁶ is, independently, H, optionally substituted alkyl, optionally substituted alkenyl, or optionally substituted alkynyl.

[0411] Further exemplary modified cytosines include those having Formula (b32)-(b35):

[chemical structure]

or a pharmaceutically acceptable salt or stereoisomer thereof,
[0412] wherein
[0413] each of T¹ and T³ is, independently, O (oxo), S (thio), or Se (seleno);
[0414] each of R¹⁵ and R¹⁶ is, independently, H, optionally substituted acyl, optionally substituted acyloxyalkyl, optionally substituted alkyl, or optionally substituted alkoxy, wherein the combination of R¹ and R⁴ can be taken together to form optionally substituted heterocyclyl;
[0415] each R¹⁴ is, independently, H, halo, hydroxy, thiol, optionally substituted acyl, optionally substituted amino acid, optionally substituted alkyl, optionally substituted haloalkyl, optionally substituted alkenyl, optionally substituted alkynyl, optionally substituted hydroxyalkyl (e.g., substituted with an O-protecting group), optionally substituted hydroxyalkenyl, optionally substituted hydroxyalkynyl, optionally substituted alkoxy, optionally substituted alkenyloxy, optionally substituted alkynyloxy, optionally substituted aminoalkoxy, optionally substituted alkoxyalkoxy, optionally substituted acyloxyalkyl, optionally substituted amino (e.g., —NHR, wherein R is H, alkyl, aryl, or phosphoryl), azido, optionally substituted aryl, optionally substituted heterocyclyl, optionally substituted alkheterocyclyl, optionally substituted aminoalkyl (e.g., hydroxyalkyl, alkyl, alkenyl, or alkynyl), optionally substituted aminoalkenyl, or optionally substituted aminoalkynyl; and
[0416] each of R¹⁵ and R¹⁶ is, independently, H, optionally substituted alkyl, optionally substituted alkenyl, or optionally substituted alkynyl (e.g., R¹⁵ is H, and R⁶ is H or optionally substituted alkyl).

[0417] In some embodiments, R¹⁵ is H, and R¹⁶ is H or optionally substituted alkyl. In particular embodiments, R¹⁴ is H, acyl, or hydroxyalkyl. In some embodiments, R¹⁴ is halo. In some embodiments, both R¹⁴ and R¹⁵ are H. In some embodiments, both R¹⁵ and R¹⁶ are H. In some embodiments, each of R¹⁴ and R¹⁵ and R¹⁶ is H. In further embodiments, each of R^{13a} and R^{13b} is independently, H or optionally substituted alkyl.

[0418] Further non-limiting examples of modified cytosines include compounds of Formula (b36):

[chemical structure]

or a pharmaceutically acceptable salt or stereoisomer thereof,
[0419] wherein
[0420] each R^{13b} is, independently, H, optionally substituted acyl, optionally substituted acyloxyalkyl, optionally substituted alkyl, or optionally substituted alkoxy, wherein the combination of R^{13b} and R^{14b} can be taken together to form optionally substituted heterocyclyl;
[0421] each R^{14a} and R^{14b} is, independently, H, halo, hydroxy, thiol, optionally substituted acyl, optionally substituted amino acid, optionally substituted alkyl, optionally substituted haloalkyl, optionally substituted alkenyl, optionally substituted alkynyl, optionally substituted hydroxyalkyl (e.g., substituted with an O-protecting group), optionally substituted hydroxyalkenyl, optionally substituted alkoxy, optionally substituted alkenyloxy, optionally substituted alkynyloxy, optionally substituted aminoalkoxy, optionally substituted alkoxyalkoxy, optionally substituted acyloxyalkyl, optionally substituted amino (e.g., —NHR, wherein R is H, alkyl, aryl, phosphoryl, optionally substituted aminoalkyl, or optionally substituted carboxyaminoalkyl), azido, optionally substituted aryl, optionally substituted heterocyclyl, optionally substituted alkheterocyclyl, optionally substituted aminoalkyl, optionally substituted aminoalkenyl, or optionally substituted aminoalkynyl; and
[0422] each of R¹⁵ is, independently, H, optionally substituted alkyl, optionally substituted alkenyl, or optionally substituted alkynyl.

[0423] In particular embodiments, R^{14b} is an optionally substituted amino acid (e.g. optionally substituted lysine). In some embodiments, R^{14a} is H.

[0424] In some embodiments, B is a modified guanine. Exemplary modified guanines include compounds of Formula (b15)-(b17):

[chemical structure]

or a pharmaceutically acceptable salt or stereoisomer thereof,
[0425] wherein
[0426] each of T^{4′}, T^{4″}, T^{5′}, T^{5″}, T^{6′}, and T^{6″} is, independently, H, optionally substituted alkyl, or optionally substituted alkoxy, and wherein the combination of T^{4′} and T^{4″} (e.g., as in T⁴) or the combination of T^{5′} and T^{5″} (e.g., as in T⁵) or the combination of T^{6′} and T^{6″} (e.g., as in T⁶) join together form O (oxo), S (thio), or Se (seleno);
[0427] each of V⁵ and V⁶ is, independently, O, S, N(R^{Vd})ₙᵥ, or C(R^{Vd})ₙᵥ, wherein nv is an integer from 0 to 2 and each R^{Vd} is, independently, H, halo, thiol, optionally substituted amino acid, cyano, amidine, optionally substituted aminoalkyl, optionally substituted aminoalkenyl, optionally substituted aminoalkynyl, optionally substituted alkyl, optionally substituted alkenyl, optionally substituted alkynyl, optionally substituted alkoxy, optionally substituted alkenyloxy, or optionally substituted alkynyloxy (e.g., optionally substituted with any substituent described herein, such as those selected from (1)-(21) for alkyl), optionally substituted thioalkoxy, or optionally substituted amino; and
[0428] each of R¹⁷, R¹⁸, R^{19a}, R^{19b}, R²¹, R²², R²³, and R²⁴ is, independently, H, halo, thiol, optionally substituted alkyl, optionally substituted alkenyl, optionally substituted alkynyl, optionally substituted thioalkoxy, optionally substituted amino, or optionally substituted amino acid.

[0429] Exemplary modified guanosines include compounds of Formula (b37)-(b40):

[chemical structure]

or a pharmaceutically acceptable salt or stereoisomer thereof
[0430] wherein
[0431] each of T^{4′} is, independently, H, optionally substituted alkyl, or optionally substituted alkoxy, and each T⁴ is, independently, O (oxo), S (thio), or Se (seleno);
[0432] each of R¹⁸, R^{19a}, R^{19b}, and R²¹ is, independently, H, halo, thiol, optionally substituted alkyl, optionally substituted alkenyl, optionally substituted alkynyl, optionally substituted thioalkoxy, optionally substituted amino, or optionally substituted amino acid.

[0433] In some embodiments, R¹⁸ is H or optionally substituted alkyl. In further embodiments, T⁴ is oxo. In some embodiments, each of R^{19a} and R^{19b} is, independently, H or optionally substituted alkyl.

[0434] In some embodiments, B is a modified adenine. Exemplary modified adenines include compounds of Formula (b18)-(b20):

[chemical structure]

or a pharmaceutically acceptable salt or stereoisomer thereof,
[0435] wherein
[0436] each V⁷ is, independently, O, S, N(R^{Ve})ₙᵥ, or C(R^{Ve})ₙᵥ, wherein nv is an integer from 0 to 2 and each R^{Ve} is, independently, H, halo, optionally substituted amino acid, optionally substituted alkyl, optionally substituted alkenyl, optionally substituted alkynyl, optionally substituted alkoxy, optionally substituted alkenyloxy, or optionally substituted alkynyloxy (e.g., optionally substituted with any substituent described herein, such as those selected from (1)-(21) for alkyl);
[0437] each R²⁵ is, independently, H, halo, thiol, optionally substituted alkyl, optionally substituted alkenyl, optionally substituted alkynyl, optionally substituted thioalkoxy, or optionally substituted amino;
[0438] each of R^{26a} and R^{26b} is, independently, H, optionally substituted acyl, optionally substituted amino acid, optionally substituted carbonylalkyl, optionally substituted alkyl, optionally substituted alkenyl, optionally substituted alkynyl, optionally substituted hydroxyalkyl, optionally substituted hydroxyalkenyl, optionally substituted hydroxyalkynyl, optionally substituted alkoxy, or polyethylene glycol group (e.g., —(CH₂)ₛ₂(OCH₂CH₂)ₛ₁(CH₂)ₛ₃OR′, wherein s1 is an integer from 1 to 10 (e.g., from 1 to 6 or from 1 to 4), each of s2 and s3, independently, is an integer from 0 to 10 (e.g., from 0 to 4, from 0 to 6, from 1 to 4, from 1 to 6, or from 1 to 10), and R′ is H or C₁₋₂₀ alkyl); or an amino-polyethylene glycol group (e.g., —NR^{N1}(CH₂)ₛ₂(CH₂CH₂O)ₛ₁(CH₂)ₛ₃NR^{N1}wherein s1 is an integer from 1 to 10 (e.g., from 1 to 6 or from 1 to 4), each of s2 and s3, independently, is an integer from 0 to 10 (e.g., from 0 to 4, from 0 to 6, from 1 to 4, from 1 to 6, or from 1 to 10), and each R^{N1} is, independently, hydrogen or optionally substituted C₁₋₆ alkyl);
[0439] each R²⁷ is, independently. H, optionally substituted alkyl, optionally substituted alkenyl, optionally substituted alkynyl, optionally substituted alkoxy, optionally substituted thioalkoxy or optionally substituted amino;
[0440] each R²⁸ is, independently, H, optionally substituted alkyl, optionally substituted alkenyl, or optionally substituted alkynyl; and
[0441] each R²⁹ is, independently, H, optionally substituted acyl, optionally substituted amino acid, optionally substituted carbamoylalkyl, optionally substituted alkyl, optionally substituted alkenyl, optionally substituted alkynyl, optionally substituted hydroxyalkyl, optionally substituted hydroxyalkenyl, optionally substituted alkoxy, or optionally substituted amino.

[0442] Exemplary modified adenines include compounds of Formula (b41)-(b43):

[chemical structure]

or a pharmaceutically acceptable salt or stereoisomer thereof,
[0443] wherein
[0444] each R²⁵ is, independently, H, halo, thiol, optionally substituted alkyl, optionally substituted alkenyl, optionally substituted alkynyl, optionally substituted thioalkoxy, or optionally substituted amino;
[0445] each of R^{26a} and R^{26b} is, independently, H, optionally substituted acyl, optionally substituted amino acid, optionally substituted carbamoylalkyl, optionally substituted alkyl, optionally substituted alkenyl, optionally substituted alkynyl, optionally substituted hydroxyalkyl, optionally substituted hydroxyalkenyl, optionally substituted hydroxyalkynyl, optionally substituted alkoxy, or polyethylene glycol group (e.g. —(CH₂)ₛ₂(OCH₂CH₂)ₛ₁(CH₂)ₛ₃OR′, wherein s1 is an integer from 1 to 10 (e.g., from 1 to 6 or from 1 to 4), each of s2 and s3, independently, is an integer from 0 to 10 (e.g., from 0 to 4, from 0 to 6, from 1 to 4, from 1 to 6, or from 1 to 10), and R′ is H or C₁₋₂₀ alkyl); or an amino-polyethylene glycol group (e.g., —NR^{N1}(CH₂)ₛ₂(CH₂CH₂O)ₛ₁(CH₂)ₛ₃NR^{N1}, wherein s1 is an integer from 1 to 10 (e.g., from 1 to 6 or from 1 to 4), each of s2 and s3, independently, is an integer from 0 to 10 (e.g., from 0 to 4, from 0 to 6, from 1 to 4, from 1 to 6, or from 1 to 10), and each R^{N1} is, independently, hydrogen or optionally substituted C₁₋₆ alkyl); and
[0446] each R² is, independently, H, optionally substituted alkyl, optionally substituted alkenyl, optionally substituted alkynyl, optionally substituted alkoxy, optionally substituted thioalkoxy, or optionally substituted amino.

[0447] In some embodiments, R^{26a} is H, and R^{26b} is optionally substituted alkyl. In some embodiments, each of R^{26a} and R^{26b} is, independently, optionally substituted alkyl. In particular embodiments, R²⁷ is optionally substituted alkyl, optionally substituted alkoxy, or optionally substituted thioalkoxy. In other embodiments, R²⁵ is optionally substituted alkyl, optionally substituted alkoxy, or optionally substituted thioalkoxy.

[0448] In particular embodiments, the optional substituent for R^{26a}, R^{26b}, or R²⁹ is a polyethylene glycol group (e.g., —(CH₂)ₛ₂(OCH₂CH₂)ₛ₁(CH₂)ₛ₃OR′, wherein s1 is an integer from 1 to 10 (e.g., from 1 to 6 or from 1 to 4), each of s2 and s3, independently, is an integer from 0 to 10 (e.g., from 0 to 4, from 0 to 6, from 1 to 4, from 1 to 6, or from 1 to 10), and R′ is H or C₁₋₂₀ alkyl); or an amino-polyethylene glycol group (e.g., —NR^{N1}(CH₂)ₛ₂(CH₂CH₂O)ₛ₁(CH₂)ₛ₃NR^{N1}, wherein s1 is an integer from 1 to 10 (e.g., from 1 to 6 or from 1 to 4), each of s2 and s3, independently, is an integer from 0 to 10 (e.g., from 0 to 4, from 0 to 6, from 1 to 4, from 1 to 6, or from 1 to 10), and each R^{N1} is independently, hydrogen or optionally substituted C₁₋₆ alkyl).

[0449] In some embodiments, B may have Formula (b21):

[chemical structure]

wherein X¹² is, independently, O, S, optionally substituted alkylene (e.g., methylene), or optionally substituted heteroalkylene, xa is an integer from 0 to 3, and R^{12a} and T² are as described herein.

[0450] In some embodiments, B may have Formula (b22):

[chemical structure]

wherein R^{10′} is, independently, optionally substituted alkyl, optionally substituted alkenyl, optionally substituted alkynyl, optionally substituted aryl, optionally substituted heterocyclyl, optionally substituted aminoalkyl, optionally substituted aminoalkenyl, optionally substituted aminoalkynyl, optionally substituted alkoxy, optionally substituted alkoxycarbonylalkyl, optionally substituted alkoxycarbonylalkenyl, optionally substituted alkoxycarbonylalkynyl, optionally substituted alkoxycarbonylalkoxy, optionally substituted carboxyalkoxy, optionally substituted carboxyalkyl, or optionally substituted carbamoylalkyl, and R¹¹, R^{12a}, T¹, and T² are as described herein.

[0451] In some embodiments, B may have Formula (b23):

[chemical structure]

wherein R¹⁰ is optionally substituted heterocyclyl (e.g., optionally substituted furyl, optionally substituted thienyl, or optionally substituted pyrrolyl), optionally substituted aryl (e.g., optionally substituted phenyl or optionally substituted naphthyl), or any substituent described herein (e.g., for R¹⁰); and wherein R¹¹ (e.g., H or any substituent described herein), R^{12a} (e.g., H or any substituent described herein), T¹ (e.g., oxo or any substituent described herein), and T² (e.g., oxo or any substituent described herein) are as described herein.

[0452] In some embodiments, B may have Formula (b24):

[chemical structure]

wherein R^{14′} is, independently, optionally substituted alkyl, optionally substituted alkenyl, optionally substituted alkynyl, optionally substituted aryl, optionally substituted heterocyclyl, optionally substituted alkaryl, optionally substituted alkheterocyclyl, optionally substituted aminoalkyl, optionally substituted aminoalkenyl, optionally substituted aminoalkynyl, optionally substituted alkoxy, optionally substituted alkoxycarbonylalkenyl, optionally substituted alkoxycarbonylalkynyl, optionally substituted alkoxycarbonylalkyl, optionally substituted alkoxycarbonylalkoxy, optionally substituted carboxyalkoxy, optionally substituted carboxyalkyl, or optionally substituted carbamoylalkyl, and R^{13a}, R^{13b}, R¹⁵, and T³ are as described herein.

[0453] In some embodiments, B may have Formula (b25):

[chemical structure]

wherein R^{14′} is optionally substituted heterocyclyl (e.g., optionally substituted furyl, optionally substituted thienyl, or optionally substituted pyrrolyl), optionally substituted aryl (e.g., optionally substituted phenyl or optionally substituted naphthyl), or any substituent described herein (e.g., for R¹⁴ or R^{14′}); and wherein R^{13a} (e.g., H or any substituent described herein), R^{13b} (e.g., H or any substituent described herein), R¹⁵ (e.g., H or any substituent described herein), and T³ (e.g., oxo or any substituent described herein) are as described herein.

[0454] In some embodiments, B is a nucleobase selected from the group consisting of cytosine, guanine, adenine, and uracil. In some embodiments, B may be:

[chemical structure]

[0455] In some embodiments, the modified nucleobase is a modified uracil. Exemplary nucleobases and nucleosides having a modified uracil include pseudouridine (ψ), pyridin-4-one ribonucleoside, 5-aza-uridine, 6-aza-uridine, 2-thio-5-aza-uridine, 2-thio-uridine (s²U), 4-thio-uridine (s⁴U), 4-thio-pseudouridine, 2-thio-pseudouridine, 5-hydroxy-uridine (ho⁵U), 5-aminoallyl-uridine, 5-halo-uridine (e.g., 5-iodo-uridine or 5-bromo-uridine), 3-methyl-uridine (m³U), 5-methoxy-uridine (mo⁵U), uridine 5-oxyacetic acid (cmo⁵U), uridine 5-oxyacetic acid methyl ester (memo⁵U), 5-carboxymethyl-uridine (cm⁵U), 1-carboxymethyl-pseudouridine, 5-carboxyhydroxymethyl-uridine (chm⁵U), 5-carboxyhydroxymethyl-uridine methyl ester (mchm⁵U), 5-methoxycarbonylmethyl-uridine (mcm⁵U), 5-methoxycarbonylmethyl-2-thio-uridine (mcm⁵s²U), 5-aminomethyl-2-thio-uridine (nm⁵s²U), 5-methylaminomethyl-uridine (mnm⁵U), 5-methylaminomethyl-2-thio-uridine (mnm⁵s²U), 5-methylaminomethyl-2-seleno-uridine (mnm⁵se²U), 5-carbamoylmethyl-uridine (ncm³U), 5-carboxymethylaminomethyl-uridine (cmnm⁵U), 5-carboxymethylaminomethyl-2-thio-uridine (cmnm⁵s²U), 5-propynyl-uridine, 1-propynyl-pseudouridine, 5-taurinomethyl-uridine (τm⁵U), 1-taurinomethyl-pseudouridine, 5-taurinomethyl-2-thio-uridine(τm⁵s²U), 1-taurinomethyl-4-thio-pseudouridine, 5-methyl-uridine (m⁵U, i.e., having the nucleobase deoxythymine), 1-methylpseudouridine (m¹s⁴ψ), 5-methyl-2-thio-uridine (m⁵s²U), 1-methyl-4-thio-pseudouridine (m¹s⁴ψ), 4-thio-1-methyl-pseudoundine, 3-methyl-pseudouridine (m³ψ), 2-thio-1-methyl-pseudouridine, 1-methyl-1-deaza-pseudouridine, 2-thio-1-methyl-1-deaza-pseudouridine, dihydrouridine (D), dihydropseudouridine, 5,6-dihydrouridine, 5-methyl-dihydrouridine (m⁵D), 2-thio-dihydrouridine, 2-thio-dihydropseudouridine, 2-methoxy-uridine, 2-methoxy-4-thio-uridine, 4-methoxy-pseudouridine, 4-methoxy-2-thio-pseudouridine, N1-methyl-pseudouridine (also known as 1-methylpseudouridine (m¹ψ)), 3-(3-amino-3-carboxypropyl)uridine (acp³U), 1-methyl-3-(3-amino-3-carboxypropyl)pseudouridine (acp³ψ), 5-(isopentenylaminomethyl)uridine (inm⁵U), 5-(isopentenylaminomethyl)-2-thio-uridine (inm⁵s²U), α-thio-uridine, 2′-O-methyl-uridine (Um), 5,2′-O-dimethyl-uridine (m⁵Um), 2′-O-methyl-pseudouridine (ψm), 2-thio-2′-O-methyl-uridine (s²Um), 5-methoxycarbonylmethyl-2′-O-methyl-uridine (mcm⁵Um), 5-carbamoylmethyl-2′-O-methyl-uridine (ncm⁵Um), 5-carboxymethylaminomethyl-2′-O-methyl-uridine (cmnm⁵Um), 3,2′-O-dimethyl-uridine (m³Um), 5-(isopentenylaminomethyl)-2′-O-methyl-uridine (inm⁵Un), 1-thio-uridine, deoxythymidine, 2′-F-ara-uridine, 2′-F-uridine, 2′-OH-ara-uridine, 5-(2-carbomethoxyvinyl) uridine, and 5-[3-(1-E-propenylamino)uridine.

[0456] In some embodiments, the modified nucleobase is a modified cytosine. Exemplary nucleobases and nucleosides having a modified cytosine include 5-aza-cytidine, 6-aza-cytidine, pseudoisocytidine, 3-methyl-cytidine (m³C), N4-acetylcytidine (ac⁴C), 5-formyl-cytidine (f⁵C), N4-methyl-cytidine (m⁴C), 5-methyl-cytidine (m⁵C), 5-halo-cytidine (e.g., 5-iodo-cytidine), 5-hydroxymethyl-cytidine (hm⁵C), 1-methyl-pseudoisocytidine, pyrrolo-cytidine, pyrrolo-pseudoisocytidine, 2-thio-cytidine (s²C), 2-thio-5-methyl-cytidine, 4-thio-pseudoisocytidine, 4-thio-1-methyl-pseudoisocytidine, 4-thio-1-methyl-1-deaza-pseudoisocytidine, 1-methyl-1-deaza-pseudoisocytidine, zebularine, 5-aza-zebularine, 5-methyl-zebularine, 5-aza-2-thio-zebularine, 2-thio-zebularine, 2-methoxy-cytidine, 2-methoxy-5-methyl-cytidine, 4-methoxy-pseudoisocytidine, 4-methoxy-1-methyl-pseudoisocytidine, lysidine (k₂C), α-thio-cytidine, 2′-O-methyl-cytidine (Cm), 5,2′-O-dimethyl-cytidine (m⁵Cm), N4-acetyl-2′-O-methyl-cytidine (ac⁴Cm), N4,2′-O-dimethyl-cytidine (m⁴Cm), 5-formyl-2′-O-methyl-cytidine (f⁵Cm), N4,N4,2′-O-trimethyl-cytidine (m⁴₂Cm), 1-thio-cytidine, 2′-F-aracytidine, 2′-F-cytidine, and 2′-OH-aracytidine.

[0457] In some embodiments, the modified nucleobase is a modified adenine. Exemplary nucleobases and nucleosides having a modified adenine include 2-amino-purine, 2, 6-diaminopurine, 2-amino-6-halo-purine (e.g., 2-amino-6-chloro-purine), 6-halo-purine (e.g., 6-chloro-purine), 2-amino-6-methyl-purine, 8-azido-adenosine, 7-deaza-adenine, 7-deaza-8-aza-adenine, 7-deaza-2-amino-purine, 7-deaza-8-aza-2-amino-purine, 7-deaza-2,6-diaminopurine, 7-deaza-8-aza-2,6-diaminopurine, 1-methyl-adenosine (m¹A), 2-methyl-adenine (m²A), N6-methyl-adenosine (m⁶A), 2-methylthio-N6-methyl-adenosine (ms²m⁶A), N6-isopentenyl-adenosine (i⁶A), 2-methylthio-N6-isopentenyl-adenosine (ms²i⁶A), N6-(cis-hydroxyisopentenyl)adenosine (io⁶A), 2-methylthio-N6-(cis-hydroxyisopentenyl)adenosine (ms²io⁶A), N6-glycinylcarbamoyl-adenosine (g⁶A), N6-threonylcarbamoyl-adenosine (t⁶A), N6-methyl-N6-threonylcarbamoyl-adenosine (n⁶t⁶A), 2-methylthio-N6-threonylcarbamoyl-adenosine (ms²g⁶A), N6,N6-dimethyl-adenosine (m⁶₂A), N6-hydroxynorvalylcarbamoyl-adenosine (hn⁶A), 2-methylthio-N6-hydroxynorvalylcarbamoyl-adenosine (ms²hn⁶A), N6-acetyl-adenosine (ac⁶A), 7-methyl-adenine, 2-methylthio-adenine, 2-methoxy-adenine, α-thio-adenosine, 2′-O-methyl-adenosine (Am), N6,2′-O-dimethyl-adenosine (m⁶Am), N6,N6,2′-O-trimethyl-adenosine (m⁶₂Am), 1,2′-O-dimethyl-adenosine (m⁶Am), 2′-O-ribosyladenosine (phosphate) (Ar(p)), 2-amino-N6-methyl-purine, 1-thio-adenosine, 8-azido-adenosine, 2′-F-ara-adenosine, 2′-F-adenosine, 2′-OH-ara-adenosine, and N6-(19-amino-pentaoxanonadecyl)-adenosine.

[0458] In some embodiments, the modified nucleobase is a modified guanine. Exemplary nucleobases and nucleosides having a modified guanine include inosine (1), 1-methyl-inosine (m¹I), wyosine (imG), methylwyosine (mimG), 4-demethyl-wyosine (imG-14), isowyosine (imG2), wybutosine (yW), peroxywybutosine (o₂yW), hydroxywybutosine ((OHyW), undermodified hydroxywybutosine (OHyW*), 7-deaza-guanosine, queuosine (Q), epoxyqueuosine (oQ), galactosyl-queuosine (galQ), mannosyl-queuosine (manQ), 7-cyano-7-deaza-guanosine (preQ₈), 7-amminomethyl-7-deaza-guanosine (preQ₁), archaeosine (G), 7-deaza-8-aza-guanosine, 6-thio-guanosine, 6-thio-7-deaza-guanosine, 6-thio-7-deaza-8-aza-guanosine, 7-methyl-guanosine (m⁷G), 6-thio-7-methyl-guanosine, 7-methyl-inosine, 6-methoxy-guanosine, 1-methyl-guanosine (m¹G), N2-methyl-guanosine (m²G), N2,N2-dimethyl-guanosine (m²₂G), N2,7-dimethyl-guanosine (m^{2,7}G), N2,N2,7-dimethyl-guanosine (m^{2,2,7}G), 8-oxo-guanosine, 7-methyl-8-oxo-guanosine, 1-methyl-6-thio-guanosine, N2-methyl-6-thio-guanosine, N2,N2-dimethyl-6-thio-guanosine, α-thio-guanosine, 2′-O-methyl-guanosine (Gm), N2-methyl-2′-O-methyl-guanosine (m²Gm), N2,N2-dimethyl-2′-O-methyl-guanosine (m²₂Gm), 1-methyl-2′-O-methyl-guanosine (m¹Gm), N2,7-dimethyl-2′-O-methyl-guanosine (m^{2,7}Gm), 2′-O-methyl-inosine (Im), 1,2′-O-dimethyl-inosine (m¹Im), and 2′-O-ribosylguanosine (phosphate) (Gr(p)).

[0459] The nucleobase of the nucleotide can be independently selected from a purine, a pyrimidine, a purine or pyrimidine analog. For example, the nucleobase can each be independently selected from adenine, cytosine, guanine, uracil, or hypoxanthine. In another embodiment, the nucleobase can also include, for example, naturally-occurring and synthetic derivatives of a base, including pyrazolo[3,4-d]pyrimidines, 5-methylcytosine (5-me-C), 5-hydroxymethyl cytosine, xanthine, hypoxanthine, 2-aminoadenine, 6-methyl and other alkyl derivatives of adenine and guanine, 2-propyl and other alkyl derivatives of adenine and guanine, 2-thiouracil, 2-thiothymine and 2-thiocytosine, 5-propynyl uracil and cytosine, 6-azo uracil, cytosine and thymine, 5-uracil (pseudouracil), 4-thiouracil, 8-halo (e.g., 8-bromo), 8-amino, 8-thiol, 8-thioalkyl, 8-hydroxyl and other 8-substituted adenines and guanines, 5-halo particularly 5-bromo, 5-trifluoromethyl and other 5-substituted uracils and cytosines, 7-methylguanine and 7-methyladenine, 8-azaguanine and 8-azaadenine, deazaguanine, 7-deazaguanine, 3-deazaguanine, deazaadenine, 7-deazaadenine, 3-deazaadenine, pyrazolo[3,4-d]pyrimidiine, imidazo[1,5-a]1,3,5 triazinones, 9-deazapurines, imidazo[4,5-d]pyrazines, thiazolo[4,5-d]pyrimidines, pyrazin-2-ones, 1,2,4-triazine, pyridazine; and 1,3,5 triazine. When the nucleotides are depicted using the shorthand A, G, C, T or U, each letter refers to the representative base and/or derivatives thereof, e.g., A includes adenine or adenine analogs, e.g., 7-deaza adenine).

### Modifications on the Internucleoside Linkage

[0460] The modified nucleotides, which may be incorporated into a polynucleotide, primary construct, or mmRNA molecule, can be modified on the internucleoside linkage (e.g., phosphate backbone). Herein, in the context of the polynucleotide backbone, the phrases “phosphate” and “phosphodiester” are used interchangeably. Backbone phosphate groups can be modified by replacing one or more of the oxygen atoms with a different substituent. Further, the modified nucleosides and nucleotides can include the wholesale replacement of an unmodified phosphate moiety with another internucleoside linkage as described herein. Examples of modified phosphate groups include, but are not limited to, phosphorothioate, phosphoroselenates, boranophosphates, boranophosphate esters, hydrogen phosphonates, phosphoramidates, phosphorodiamidates, alkyl or aryl phosphonates, and phosphotriesters. Phosphorodithioates have both non-linking oxygens replaced by sulfur. The phosphate linker can also be modified by the replacement of a linking oxygen with nitrogen (bridged phosphoramidates), sulfur (bridged phosphorothioates), and carbon (bridged methylene-phosphonates).

[0461] The α-thio substituted phosphate moiety is provided to confer stability to RNA and DNA polymers through the unnatural phosphorothioate backbone linkages. Phosphorothioate DNA and RNA have increased nuclease resistance and subsequently a longer half-life in a cellular environment. Phosphorothioate linked polynucleotides, primary constructs, or mmRNA molecules are expected to also reduce the innate immune response through weaker binding/activation of cellular innate immune molecules.

[0462] In specific embodiments, a modified nucleoside includes an alpha-thio-nucleoside (e.g., 5′-O-(1-thiophosphate)-adenosine, 5′-O-(1-thiophosphate)-cytidine (α-thio-cytidine), 5′-O-(1-thiophosphate)-guanosine, 5′-O-(1-thiophosphate)-uridine, or 5′-O-(1-thiophosphate)-pseudouridine).

[0463] Other internucleoside linkages that may be employed according to the present invention, including internucleoside linkages which do not contain a phosphorous atom, are described herein below.

### Combinations of Modified Sugars, Nucleobases, and Internucleoside Linkages

[0464] The polynucleotides, primary constructs, and mmRNA of the invention can include a combination of modifications to the sugar, the nucleobase, and/or the internucleoside linkage. These combinations can include any one or more modifications described herein. For examples, any of the nucleotides described herein in Formulas (Ia), (Ia-1)-(Ia-3), (Ib)-(If), (IIa)-(IIp), (IIb-1), (IIb-2), (IIc-1)-(IIc-2), (IIn-1), (IIn-2), (IVa)-(IV), and (IXa)-(IXr) can be combined with any of the nucleobases described herein (e.g., in Formulas (b1)-(b43) or any other described herein).

Synthesis of Polypeptides, Primary Constructs, and mmRNA Molecules

[0465] The polypeptides, primary constructs, and mmRNA molecules for use in accordance with the invention may be prepared according to any useful technique, as described herein. The modified nucleosides and nucleotides used in the synthesis of polynucleotides, primary constructs, and mmRNA molecules disclosed herein can be prepared from readily available starting materials using the following general methods and procedures. Where typical or preferred process conditions (e.g., reaction temperatures, times, mole ratios of reactants, solvents, pressures, etc.) are provided, a skilled artisan would be able to optimize and develop additional process conditions. Optimum reaction conditions may vary with the particular reactants or solvent used, but such conditions can be determined by one skilled in the art by routine optimization procedures.

[0466] The processes described herein can be monitored according to any suitable method known in the art. For example, product formation can be monitored by spectroscopic means, such as nuclear magnetic resonance spectroscopy (e.g., ¹H or ¹³C) infrared spectroscopy, spectrophotometry (e.g., UV-visible), or mass spectrometry, or by chromatography such as high performance liquid chromatography (HPLC) or thin layer chromatography.

[0467] Preparation of polypeptides, primary constructs, and mmRNA molecules of the present invention can involve the protection and deprotection of various chemical groups. The need for protection and deprotection, and the selection of appropriate protecting groups can be readily determined by one skilled in the art. The chemistry of protecting groups can be found, for example, in Greene, et al., Protective Groups in Organic Synthesis, 2d. Ed., Wiley & Sons, 1991, which is incorporated herein by reference in its entirety.

[0468] The reactions of the processes described herein can be carried out in suitable solvents, which can be readily selected by one of skill in the art of organic synthesis. Suitable solvents can be substantially nonreactive with the starting materials (reactants), the intermediates, or products at the temperatures at which the reactions are carried out, i.e., temperatures which can range from the solvent's freezing temperature to the solvent's boiling temperature. A given reaction can be carried out in one solvent or a mixture of more than one solvent. Depending on the particular reaction step, suitable solvents for a particular reaction step can be selected.

[0469] Resolution of racemic mixtures of modified nucleosides and nucleotides can be carried out by any of numerous methods known in the art. An example method includes fractional recrystallization using a “chiral resolving acid” which is an optically active, salt-forming organic acid. Suitable resolving agents for fractional recrystallization methods are, for example, optically active acids, such as the D and L forms of tartaric acid, diacetyltartaric acid, dibenzoyltartaric acid, mandelic acid, malic acid, lactic acid or the various optically active camphorsulfonic acids. Resolution of racemic mixtures can also be carried out by elution on a column packed with an optically active resolving agent (e.g., dinitrobenzoylphenylglycine). Suitable elution solvent composition can be determined by one skilled in the art.

[0470] Modified nucleosides and nucleotides (e.g., building block molecules) can be prepared according to the synthetic methods described in Ogata et al., J. Org. Chem. 74:2585-2588 (2009); Purmal et al., Nucl. Acids Res. 22(1): 72-78, (1994); Fukuhara et al., Biochemistry, 1(4): 563-568 (1962); and Xu et al., Tetrahedron, 48(9): 1729-1740 (1992), each of which are incorporated by reference in their entirety.

[0471] The polypeptides, primary constructs, and mmRNA of the invention may or may not be uniformly modified along the entire length of the molecule. For example, one or more or all types of nucleotide (e.g., purine or pyrimidine, or any one or more or all of A, G, U, C) may or may not be uniformly modified in a polynucleotide of the invention, or in a given predetermined sequence region thereof (e.g. one or more of the sequence regions represented in FIG. 1). In some embodiments, all nucleotides X in a polynucleotide of the invention (or in a given sequence region thereof) are modified, wherein X may any one of nucleotides A, G, U, C, or any one of the combinations A+G, A+U, A+C, G+U, G+C, U+C, A+G+U, A+G+C, G+U+C or A+G+C.

[0472] Different sugar modifications, nucleotide modifications, and/or internucleoside linkages (e.g., backbone structures) may exist at various positions in the polynucleotide, primary construct, or mmRNA. One of ordinary skill in the art will appreciate that the nucleotide analogs or other modification(s) may be located at any position(s) of a polynucleotide, primary construct, or mmRNA such that the function of the polynucleotide, primary construct, or mmRNA is not substantially decreased. A modification may also be a 5′ or 3′ terminal modification. The polynucleotide, primary construct, or mmRNA may contain from about 1% to about 100% modified nucleotides (either in relation to overall nucleotide content, or in relation to one or more types of nucleotide, i.e. any one or more of A, G, U or C) or any intervening percentage (e.g., from 1% to 20%, from 1% to 25%, from 1% to 50%, from 1% to 60%, from 1% to 70%, from 1% to 80%, from 1% to 90%, from 1% to 95%, from 10% to 20%, from 10% to 25%, from 10% to 50%, from 10% to 60%, from 10% to 70%, from 10% to 80%, from 10% to 90%, from 10% to 95%, from 10% to 100%, from 20% to 25%, from 20% to 50%, from 20% to 60%, from 20% to 70%, from 20% to 80%, from 20% to 90%, from 20% to 95%, from 20% to 100%, from 50% to 60%, from 50% to 70%, from 50% to 80%, from 50% to 90%, from 50% to 95%, from 50% to 100%, from 70% to 80%, from 70% to 90%, from 70% to 95%, from 70% to 100%, from 80% to 90%, from 80% to 95%, from 80% to 100%, from 90% to 95%, from 90% to 100%, and from 95% to 100%).

[0473] In some embodiments, the polynucleotide, primary construct, or mmRNA includes a modified pyrimidine (e.g., a modified uracil/uridine/U or modified cytosine/cytidine/C). In some embodiments, the uracil or uridine (generally: U) in the polynucleotide, primary construct, or mmRNA molecule may be replaced with from about 1% to about 100% of a modified uracil or modified uridine (e.g., from 1% to 20%, from 1% to 25%, from 1% to 50%, from 1% to 60%, from 1% to 70%, from 1% to 80%, from 1% to 90%, from 1% to 95%, from 10% to 20%, from 10% to 25%, from 10% to 50%, from 10% to 60%, from 10% to 70%, from 10% to 80%, from 10% to 90%, from 10% to 95%, from 10% to 100%, from 20% to 25%, from 20% to 50%, from 20% to 60%, from 20% to 70%, from 20% to 80%, from 20% to 90%, from 20% to 95%, from 20% to 100%, from 50% to 60%, from 50% to 70%, from 50% to 80%, from 50% to 90%, from 50% to 95%, from 50% to 100%, from 70% to 80%, from 70% to 90%, from 70% to 95%, from 70% to 100%, from 80% to 90%, from 80% to 95%, from 80% to 100%, from 90% to 95%, from 90% to 100%, and from 95% to 100% of a modified uracil or modified uridine). The modified uracil or uridine can be replaced by a compound having a single unique structure or by a plurality of compounds having different structures (e.g., 2, 3, 4 or more unique structures, as described herein). In some embodiments, the cytosine or cytidine (generally: C) in the polynucleotide, primary construct, or mmRNA molecule may be replaced with from about 1% to about I00% of a modified cytosine or modified cytidine (e.g., from 1% to 20%, from 1% to 25%, from 1% to 50%, from 1% to 60%, from 1% to 70%, from 1% to 80%, from 1% to 90%, from 1% to 95%, from 10% to 20%, from 10% to 25%, from 10% to 50%, from 10% to 60%, from 10% to 70%, from 10% to 80%, from 10% to 90%, from 10% to 95%, from 10% to 100%, from 20% to 25%, from 20% to 50%, from 20% to 60%, from 20% to 70%, from 20% to 80%, from 20% to 90%, from 20% to 95%, from 20% to 100%, from 50% to 60%, from 50% to 70%, from 50% to 80%, from 50% to 90%, from 50% to 95%, from 50% to 100%, from 70% to 80%, from 70% to 90%, from 70% to 95%, from 70% to 100%, from 80% to 90%, from 80% to 95%, from 80% to 100%, from 90% to 95%, from 90% to 100%, and from 95% to 100% of a modified cytosine or modified cytidine). The modified cytosine or cytidine can be replaced by a compound having a single unique structure or by a plurality of compounds having different structures (e.g., 2, 3, 4 or more unique structures, as described herein).

[0474] In some embodiments, the present disclosure provides methods of synthesizing a polynucleotide, primary construct, or mmRNA (e.g., the first region, first flanking region, or second flanking region) including n number of linked nucleosides having Formula (Ia-1):

[chemical structure]

comprising:
[0475] a) reacting a nucleotide of Formula (IV-1):

[chemical structure]

with a phosphoramidite compound of Formula (V-1):

[chemical structure]

wherein Y⁹ is H, hydroxy, phosphoryl, pyrophosphate, sulfate, amino, thiol, optionally substituted amino acid, or a peptide (e.g., including from 2 to 12 amino acids); and each P¹, P², and P³ is, independently, a suitable protecting group; and [symbol] denotes a solid support;
to provide a polynucleotide, primary construct, or mmRNA of Formula (VI-1):

[chemical structure]

and
[0476] b) oxidizing or sulfurizing the polynucleotide, primary construct, or mmRNA of Formula (V) to yield a polynucleotide, primary construct, or mmRNA of Formula (VII-1):

[chemical structure]

and
[0477] c) removing the protecting groups to yield the polynucleotide, primary construct, or mmRNA of Formula (Ia).

[0478] In some embodiments, steps a) and b) are repeated from 1 to about 10,000 times. In some embodiments, the methods further comprise a nucleotide (e.g., mmRNA molecule) selected from the group consisting of A, C, G and U adenosine, cytosine, guanosine, and uracil. In some embodiments, the nucleobase may be a pyrimidine or derivative thereof. In some embodiments, the polynucleotide, primary construct, or mmRNA is translatable.

[0479] Other components of polynucleotides, primary constructs, and mmRNA are optional, and are beneficial in some embodiments. For example, a 5 untranslated region (UTR) and/or a 3′UTR are provided, wherein either or both may independently contain one or more different nucleotide modifications. In such embodiments, nucleotide modifications may also be present in the translatable region. Also provided are polynucleotides, primary constructs, and mmRNA containing a Kozak sequence.

[0480] Exemplary syntheses of modified nucleotides, which are incorporated into a modified nucleic acid or mmRNA, e.g., RNA or mRNA, are provided below in Scheme 1 through Scheme 11. Scheme 1 provides a general method for phosphorylation of nucleosides, including modified nucleosides.

[chemical structure]

[0481] Various protecting groups may be used to control the reaction. For example, Scheme 2 provides the use of multiple protecting and deprotecting steps to promote phosphorylation at the 5′ position of the sugar, rather than the 2′ and 3′ hydroxyl groups.

[chemical structure]

[0482] Modified nucleotides can be synthesized in any useful manner. Schemes 3, 4, and 7 provide exemplary methods for synthesizing modified nucleotides having a modified purine nucleobase; and Schemes 5 and 6 provide exemplary methods for synthesizing modified nucleotides having a modified pseudouridine or pseudoisocytidine, respectively.

[chemical structure]

[chemical structure]

[chemical structure]

[chemical structure]

[chemical structure]

[0483] Schemes 8 and 9 provide exemplary syntheses of modified nucleotides. Scheme 10 provides a non-limiting, biocatalytic method for producing nucleotides.

[chemical structure]

[chemical structure]

[chemical structure]

[0484] Scheme 11 provides an exemplary synthesis of a modified uracil, where the N1 position is modified with R^{12b}, as provided elsewhere, and the 5′-position of ribose is phosphorylated. T¹, T², R^{12a}, R^{12b}, and r are as provided herein. This synthesis, as well as optimized versions thereof, can be used to modify other pyrimidine nucleobases and purine nucleobases (see e.g., Formulas (b1)-(b43)) and/or to install one or more phosphate groups (e.g., at the 5′ position of the sugar). This alkylating reaction can also be used to include one or more optionally substituted alkyl group at any reactive group (e.g., amino group) in any nucleobase described herein (e.g., the amino groups in the Watson-Crick base-pairing face for cytosine, uracil, adenine, and guanine).

[chemical structure]

Combinations of Nucleotides in mmRNA

[0485] Further examples of modified nucleotides and modified nucleotide combinations are provided below in Table 9. These combinations of modified nucleotides can be used to form the polypeptides, primary constructs, or mmRNA of the invention. Unless otherwise noted, the modified nucleotides may be completely substituted for the natural nucleotides of the modified nucleic acids or mmRNA of the invention. As a non-limiting example, the natural nucleotide uridine may be substituted with a modified nucleoside described herein. In another non-limiting example, the natural nucleotide uridine may be partially substituted (e.g., about 0.1%, 1%, 5%, 10%, 15%, 20%, 25%, 30%, 35%, 40%, 45%, 50%, 55%, 60%, 65%, 70%, 75%, 80%, 85%, 90%, 95% or 99.9%) with at least one of the modified nucleoside disclosed herein.

TABLE 9

| Modified | |
|---|---|
| Nucleotide | Modified Nucleotide Combination |
| α-thio-cytidine | α-thio-cytidine/5-iodo-uridine |
| | α-thio-cytidine/N1-methyl-pseudouridine |
| | α-thio-cytidine/α-thio-uridine |
| | α-thio-cytidine/5-methyl-uridine |
| | α-thio-cytidine/pseudouridine |
| | about 50% of the cytosines are α-thio-cytidine |
| pseudoisocytidine | pseudoisocytidine/5-iodo-uridine |
| | pseudoisocytidine/N1-methyl-pseudouridine |
| | pseudoisocytidine/α-thio-uridine |
| | pseudoisocytidine/5-methyl-uridine |
| | pseudoisocytidine/pseudouridine |
| | about 25% of cytosines are pseudoisocytidine |
| | pseudoisocytidine/about 50% of uridines are N1- |
| | methyl-pseudouridine and about 50% of uridines |
| | are pseudo uridine |
| | pseudoisocytidine/about 25% of uridines are N1- |
| | methyl-pseudouridine and about 25% of uridines |
| | are pseudo uridine |
| pyrrolocytidine | pyrrolo-cytidine/5-iodo-uridine |
| | pyrrolo-cytidine/N1-methyl-pseudouridine |
| | pyrrolo-cytidine/α-thio-uridine |
| | pyrrolo-cytidine/5-methyl-uridine |
| | pyrrolo-cytidine/pseudouridine |
| | about 50% of the cytosines are pyrrolo-cytidine |
| 5-methyl- | 5-methyl-cytidine/5-iodo-uridine |
| cytidine | 5-methyl-cytidine/N1-methyl-pseudouridine |
| | 5-methyl-cytidine/α-thio-uridine |
| | 5-methyl-cytidine/5-methyl-uridine |
| | 5-methyl-cytidine/pseudouridine |
| | about 25% of cytosines are 5-methyl-cytidine |
| | about 50% of cytosines are 5-methyl-cytidine |
| | 5-methyl-cytidine/5-methoxy-uridine |
| | 5-methyl-cytidine/5-bromo-uridine |
| | 5-methyl-cytidine/2-thio-uridine |
| | 5-methyl-cytidine/about 50% of uridines are 2- |
| | thio-uridine |
| | about 50% of uridines are 5-methyl-cytidine/ |
| | about 50% of uridines are 2-thio-uridine |
| N4-acetyl- | N4-acetyl-cytidine/5-iodo-uridine |
| cytidine | N4-acetyl-cytidine/N1-methyl-pseudouridine |
| | N4-acetyl-cytidine/α-thio-uridine |
| | N4-acetyl-cytidine/5-methyl-uridine |
| | N4-acetyl-cytidine/pseudouridine |
| | about 50% of cytosines are N4-acetyl-cytidine |
| | about 25% of cytosines are N4-acetyl-cytidine |
| | N4-acetyl-cytidine/5-methoxy-uridine |
| | N4-acetyl-cytidine/5-bromo-uridine |
| | N4-acetyl-cytidine/2-thio-uridine |
| | about 50% of cytosines are N4-acetyl-cytidine/ |
| | about 50% of uridines are 2-thio-uridine |

[0486] Further examples of modified nucleotide combinations are provided, below in Table 10. These combinations of modified nucleotides can be used to form the polypeptides, primary constructs, or n-mRNA of the invention.

TABLE 10

| Modified | |
|---|---|
| Nucleotide | Modified Nucleotide Combination |
| modified cytidine | modified cytidine with (b10)/pseudouridine |
| having one or | modified cytidine with (b10)/N1-methyl-pseudouridine |
| more nucleobases | modified cytidine with (b10)/5-methoxy-uridine |
| of Formula (b10) | modified cytidine with (b10)/5-methyl-uridine |
| | modified cytidine with (b10)/5-bromo-uridine |
| | modified cytidine with (b10)/2-thio-uridine |
| | about 50% of cytidine substituted with modified |
| | cytidine (b10)/about 50% of uridines are 2-thio- |
| | uridine |
| modified cytidine | modified cytidine with (b32)/pseudouridine |
| having one or | modified cytidine with (b32)/N1-methyl-pseudouridine |
| more nucleobases | modified cytidine with (b32)/5-methoxy-uridine |
| of Formula (b32) | modified cytidine with (b32)/5-methyl-uridine |
| | modified cytidine with (b32)/5-bromo-uridine |
| | modified cytidine with (b32)/2-thio-uridine |
| | about 50% of cytidine substituted with modified |
| | cytidine (b32)/about 50% of uridines are 2-thio- |
| | uridine |
| modified uridine | modified uridine with (b1)/N4-acetyl-cytidine |
| having one or | modified uridine with (b1)/5-methyl-cytidine |
| more nucleobases | |
| of Formula (b1) | |
| modified uridine | modified uridine with (b8)/N4-acetyl-cytidine |
| having one or | modified uridine with (b8)/5-methyl-cytidine |
| more nucleobases | |
| of Formula (b8) | |
| modified uridine | modified uridine with (b28)/N4-acetyl-cytidine |
| having one or | modified uridine with (b28)/5-methyl-cytidine |
| more nucleobases | |
| of Formula (b28) | |
| modified uridine | modified uridine with (b29)/N4-acetyl-cytidine |
| having one or | modified uridine with (b29)/5-methyl-cytidine |
| more nucleobases | |
| of Formula (b29) | |
| modified uridine | modified uridine with (b30)/N4-acetyl-cytidine |
| having one or | modified uridine with (b30)/5-methyl-cytidine |
| more nucleobases | |
| of Formula (b30) | |

[0487] In some embodiments, at least 25% of the cytosines are replaced by a compound of Formula (b10)-(b14) (e.g., at least about 30%, at least about 35%, at least about 40%, at least about 45%, at least about 50%, at least about 55%, at least about 60%, at least about 65%, at least about 70%, at least about 75%, at least about 80%, at least about 85%, at least about 90%, at least about 95%, or about 100%).

[0488] In some embodiments, at least 25% of the uracils are replaced by a compound of Formula (b1)-(b9) (e.g., at least about 30%, at least about 35%, at least about 40%, at least about 45%, at least about 50%, at least about 55%, at least about 60%, at least about 65%, at least about 70%, at least about 75%, at least about 80%, at least about 85%, at least about 90%, at least about 95%, or about 100%).

[0489] In some embodiments, at least 25% of the cytosines are replaced by a compound of Formula (b10)-(b14), and at least 25% of the uracils are replaced by a compound of Formula (b1)-(b9) (e.g., at least about 30%, at least about 35%, at least about 40%, at least about 45%, at least about 50%, at least about 55%, at least about 60%, at least about 65%, at least about 70%, at least about 75%, at least about 80%, at least about 85%, at least about 90%, at least about 95%, or about 100%).

### IV. Pharmaceutical Compositions

### Formulation, Administration, Delivery and Dosing

[0490] The present invention provides polynucleotides, primary constructs and mmRNA compositions and complexes in combination with one or more pharmaceutically acceptable excipients. Pharmaceutical compositions may optionally comprise one or more additional active substances, e.g. therapeutically and/or prophylactically active substances. General considerations in the formulation and/or manufacture of pharmaceutical agents may be found, for example, in Remington: The Science and Practice of Pharmacy 21^{st} ed., Lippincott Williams & Wilkins, 2005 (incorporated herein by reference).

[0491] In some embodiments, compositions are administered to humans, human patients or subjects. For the purposes of the present disclosure, the phrase “active ingredient” generally refers to polynucleotides, primary constructs and mmRNA to be delivered as described herein.

[0492] Although the descriptions of pharmaceutical compositions provided herein are principally directed to pharmaceutical compositions which are suitable for administration to humans, it will be understood by the skilled artisan that such compositions are generally suitable for administration to any other animal, e.g., to non-human animals, e.g. non-human mammals. Modification of pharmaceutical compositions suitable for administration to humans in order to render the compositions suitable for administration to various animals is well understood, and the ordinarily skilled veterinary pharmacologist can design and/or perform such modification with merely ordinary, if any, experimentation. Subjects to which administration of the pharmaceutical compositions is contemplated include, but are not limited to, humans and/or other primates; mammals, including commercially relevant mammals such as cattle, pigs, horses, sheep, cats, dogs, mice, and/or rats; and/or birds, including commercially relevant birds such as poultry, chickens, ducks, geese, and/or turkeys.

[0493] Formulations of the pharmaceutical compositions described herein may be prepared by any method known or hereafter developed in the art of pharmacology. In general, such preparatory methods include the step of bringing the active ingredient into association with an excipient and/or one or more other accessory ingredients, and then, if necessary and/or desirable, dividing, shaping and/or packaging the product into a desired single- or multi-dose unit.

[0494] A pharmaceutical composition in accordance with the invention may be prepared, packaged, and/or sold in bulk, as a single unit dose, and/or as a plurality of single unit doses. As used herein, a “unit dose” is discrete amount of the pharmaceutical composition comprising a predetermined amount of the active ingredient. The amount of the active ingredient is generally equal to the dosage of the active ingredient which would be administered to a subject and/or a convenient fraction of such a dosage such as, for example, one-half or one-third of such a dosage.

[0495] Relative amounts of the active ingredient, the pharmaceutically acceptable excipient, and/or any additional ingredients in a pharmaceutical composition in accordance with the invention will vary, depending upon the identity, size, and/or condition of the subject treated and further depending upon the route by which the composition is to be administered. By way of example, the composition may comprise between 0.1% and 100%, e.g., between 0.5 and 50%, between 1-30%, between 5-80%, at least 80% (w/w) active ingredient.

### Formulations

[0496] The polynucleotide, primary construct, and mmRNA of the invention can be formulated using one or more excipients to: (1) increase stability; (2) increase cell transfection; (3) permit the sustained or delayed release (e.g., from a depot formulation of the polynucleotide, primary construct, or mmRNA); (4) alter the biodistribution (e.g., target the polynucleotide, primary construct, or mmRNA to specific tissues or cell types); (5) increase the translation of encoded protein in vivo; and/or (6) alter the release profile of encoded protein in vivo. In addition to traditional excipients such as any and all solvents, dispersion media, diluents, or other liquid vehicles, dispersion or suspension aids, surface active agents, isotonic agents, thickening or emulsifying agents, preservatives, excipients of the present invention can include, without limitation, lipidoids, liposomes, lipid nanoparticles, polymers, lipoplexes, core-shell nanoparticles, peptides, proteins, cells transfected with polynucleotide, primary construct, or mmRNA (e.g., for transplantation into a subject), hyaluronidase, nanoparticle mimics and combinations thereof. Accordingly, the formulations of the invention can include one or more excipients, each in an amount that together increases the stability of the polynucleotide, primary construct, or mmRNA, increases cell transfection by the polynucleotide, primary construct, or mmRNA, increases the expression of polynucleotide, primary construct, or mmRNA encoded protein, and/or alters the release profile of polynucleotide, primary construct, or mmRNA encoded proteins. Further, the primary construct and mmRNA of the present invention may be formulated using self-assembled nucleic acid nanoparticles.

[0497] Formulations of the pharmaceutical compositions described herein may be prepared by any method known or hereafter developed in the art of pharmacology. In general, such preparatory methods include the step of associating the active ingredient with an excipient and/or one or more other accessory ingredients.

[0498] A pharmaceutical composition in accordance with the present disclosure may be prepared, packaged, and/or sold in bulk, as a single unit dose, and/or as a plurality of single unit doses. As used herein, a “unit dose” refers to a discrete amount of the pharmaceutical composition comprising a predetermined amount of the active ingredient. The amount of the active ingredient may generally be equal to the dosage of the active ingredient which would be administered to a subject and/or a convenient fraction of such a dosage including, but not limited to, one-half or one-third of such a dosage.

[0499] Relative amounts of the active ingredient, the pharmaceutically acceptable excipient, and/or any additional ingredients in a pharmaceutical composition in accordance with the present disclosure may vary, depending upon the identity, size, and/or condition of the subject being treated and further depending upon the route by which the composition is to be administered. For example, the composition may comprise between 0.1% and 99% (w/w) of the active ingredient.

[0500] In some embodiments, the formulations described herein may contain at least one mmRNA. As a non-limiting example, the formulations may contain 1, 2, 3, 4 or 5 mmRNA. In one embodiment the formulation may contain modified mRNA encoding proteins selected from categories such as, but not limited to, human proteins, veterinary proteins, bacterial proteins, biological proteins, antibodies, immunogenic proteins, therapeutic peptides and proteins, secreted proteins, plasma membrane proteins, cytoplasmic and cytoskeletal proteins, intracellular membrane bound proteins, nuclear proteins, proteins associated with human disease and/or proteins associated with non-human diseases. In one embodiment, the formulation contains at least three modified mRNA encoding proteins. In one embodiment, the formulation contains at least five modified mRNA encoding proteins.

[0501] Pharmaceutical formulations may additionally comprise a pharmaceutically acceptable excipient, which, as used herein, includes, but is not limited to, any and all solvents, dispersion media, diluents, or other liquid vehicles, dispersion or suspension aids, surface active agents, isotonic agents, thickening or emulsifying agents, preservatives, and the like, as suited to the particular dosage form desired. Various excipients for formulating pharmaceutical compositions and techniques for preparing the composition are known in the art (see Remington: The Science and Practice of Pharmacy, 21^{st} Edition, A. R. Gennaro, Lippincott, Williams & Wilkins, Baltimore, MD, 2006; incorporated herein by reference in its entirety). The use of a conventional excipient medium may be contemplated within the scope of the present disclosure, except insofar as any conventional excipient medium may be incompatible with a substance or its derivatives, such as by producing any undesirable biological effect or otherwise interacting in a deleterious manner with any other component(s) of the pharmaceutical composition.

[0502] In some embodiments, the particle size of the lipid nanoparticle may be increased and/or decreased. The change in particle size may be able to help counter biological reaction such as, but not limited to, inflammation or may increase the biological effect of the modified mRNA delivered to mammals.

[0503] Pharmaceutically acceptable excipients used in the manufacture of pharmaceutical compositions include, but are not limited to, inert diluents, surface active agents and/or emulsifiers, preservatives, buffering agents, lubricating agents, and/or oils. Such excipients may optionally be included in the pharmaceutical formulations of the invention.

### Lipidoids

[0504] The synthesis of lipidoids has been extensively described and formulations containing these compounds are particularly suited for delivery of polynucleotides, primary constructs or mmRNA (see Mahon et al., Bioconjug Chem. 2010 21:1448-1454; Schroeder et al., J Intern Med. 2010 267:9-21; Akinc et al., Nat Biotechnol. 2008 26:561-569; Love et al., Proc Natl Acad Sci USA. 2010 107:1864-1869; Siegwart et al., Proc Natl Acad Sci USA. 2011 108:12996-3001; all of which are incorporated herein in their entireties).

[0505] While these lipidoids have been used to effectively deliver double stranded small interfering RNA molecules in rodents and non-human primates (see Akinc et al., Nat Biotechnol. 2008 26:561-569; Frank-Kamenetsky et al., Proc Natl Acad Sci USA. 2008 105:11915-11920; Akinc et al., Mol Ther. 2009 17:872-879; Love et al., Proc Natl Acad Sci USA. 2010 107:1864-1869; Leuschner et al., Nat Biotechnol. 2011 29:1005-1010; all of which is incorporated herein in their entirety), the present disclosure describes their formulation and use in delivering single stranded polynucleotides, primary constructs, or mmRNA. Complexes, micelles, liposomes or particles can be prepared containing these lipidoids and therefore, can result in an effective delivery of the polynucleotide, primary construct, or mmRNA, as judged by the production of an encoded protein, following the injection of a lipidoid formulation via localized and/or systemic routes of administration. Lipidoid complexes of polynucleotides, primary constructs, or mmRNA can be administered by various means including, but not limited to, intravenous, intramuscular, or subcutaneous routes.

[0506] In vivo delivery of nucleic acids may be affected by many parameters, including, but not limited to, the formulation composition, nature of particle PEGylation, degree of loading, oligonucleotide to lipid ratio, and biophysical parameters such as, but not limited to, particle size (Akinc et al., Mol Ther. 2009 17:872-879; herein incorporated by reference in its entirety). As an example, small changes in the anchor chain length of poly(ethylene glycol) (PEG) lipids may result in significant effects on in vivo efficacy. Formulations with the different lipidoids, including, but not limited to penta.[3-(1-laurylaminopropionyl)]-triethylenetetramine hydrochloride (TIETA-5LAP; aka 98N12-5, see Murugaiah et al., Analytical Biochemistry, 401:61 (2010); herein incorporated by reference in its entirety), C12-200 (including derivatives and variants), and MD1, can be tested for in vivo activity.

[0507] The lipidoid referred to herein as “98N12-5” is disclosed by Akine et al., Mol Ther. 2009 17:872-879 and is incorporated by reference in its entirety. (See FIG. 2)

[0508] The lipidoid referred to herein as “C12-200” is disclosed by Love et al., Proc Natl Acad Sci USA. 2010 107:1864-1869 (see FIG. 2) and Liu and Huang, Molecular Therapy. 2010 669-670 (see FIG. 2); both of which are herein incorporated by reference in their entirety. The lipidoid formulations can include particles comprising either 3 or 4 or more components in addition to polynucleotide, primary construct, or mmRNA. As an example, formulations with certain lipidoids, include, but are not limited to, 98N12-5 and may contain 42% lipidoid, 48% cholesterol and 10% PEG (C714 alkyl chain length). As another example, formulations with certain lipidoids, include, but are not limited to, C12-200 and may contain 50% lipidoid, 10% disteroylphosphatidyl choline, 38.5% cholesterol, and 1.5% PEG-DMG.

[0509] In one embodiment, a polynucleotide, primary construct, or mmRNA formulated with a lipidoid for systemic intravenous administration can target the liver. For example, a final optimized intravenous formulation using polynucleotide, primary construct, or mmRNA, and comprising a lipid molar composition of 42% 98N12-5, 48% cholesterol, and 10% PEG-lipid with a final weight ratio of about 7.5 to 1 total lipid to polynucleotide, primary construct, or mmRNA, and a (C14 alkyl chain length on the PEG lipid, with a mean particle size of roughly 50-60 nm, can result in the distribution of the formulation to be greater than 90% to the liver. (see, Akinc et al., Mol Ther. 2009 17:872-879; herein incorporated by reference in its entirety). In another example, an intravenous formulation using a C12-200 (see US provisional application 61/1 75,770 and published international application WO2010129709, each of which is herein incorporated by reference in their entirety) lipidoid may have a molar ratio of 50/10/38.5/1.5 of C12-200/disteroylphosphatidyl choline/cholesterol/PEG-DMG, with a weight ratio of 7 to 1 total lipid to polynucleotide, primary construct, or mmRNA, and a mean particle size of 80 nm may be effective to deliver polynucleotide, primary construct, or mmRNA to hepatocytes (see, Love et al, Proc Natl Acad Sci USA. 2010 107:1864-1869 herein incorporated by reference in its entirety). In another embodiment, an MD1 lipidoid-containing formulation may be used to effectively deliver polynucleotide, primary construct, or mmRNA to hepatocytes in vivo. The characteristics of optimized lipidoid formulations for intramuscular or subcutaneous routes may vary significantly depending on the target cell type and the ability of formulations to diffuse through the extracellular matrix into the blood stream. While a particle size of less than 150 nm may be desired for effective hepatocyte delivery due to the size of the endothelial fenestrae (see, Akine et al., Mol Ther. 2009 17:872-879 herein incorporated by reference in its entirety), use of a lipidoid-formulated polynucleotide, primary construct, or mmRNA to deliver the formulation to other cells types including, but not limited to, endothelial cells, myeloid cells, and muscle cells may not be similarly size-limited. Use of lipidoid formulations to deliver siRNA in vivo to other non-hepatocyte cells such as myeloid cells and endothelium has been reported (see Akinc et al., Nat Biotechnol. 2008 26:561-569; Leuschner et al., Nat Biotechnol. 2011 29:1005-1010; Cho et al. Adv. Fund. Mater. 2009 19:3112-3118; 8^{th} International Judah Folkman Conference, Cambridge, MA Oct. 8-9, 2010; each of which is herein incorporated by reference in its entirety). Effective delivery to myeloid cells, such as monocytes, lipidoid formulations may have a similar component molar ratio. Different ratios of lipidoids and other components including, but not limited to, disteroylphosphatidyl choline, cholesterol and PEG-DMG, may be used to optimize the formulation of the polynucleotide, primary construct, or mmRNA for delivery to different cell types including, but not limited to, hepatocytes, myeloid cells, muscle cells, etc. For example, the component molar ratio may include, but is not limited to, 50% C12-200, 10% disteroylphosphatidyl choline, 38.5% cholesterol, and % 1.5 PEG-DMG (see Leuschner et al., Nat Biotechnol 2011 29:1005-1010; herein incorporated by reference in its entirety). The use of lipidoid formulations for the localized delivery of nucleic acids to cells (such as, but not limited to, adipose cells and muscle cells) via either subcutaneous or intramuscular delivery, may not require all of the formulation components desired for systemic delivery, and as such may comprise only the lipidoid and the polynucleotide, primary construct, or mmRNA.

[0510] Combinations of different lipidoids may be used to improve the efficacy of polynucleotide, primary construct, or mmRNA directed protein production as the lipidoids may be able to increase cell transfection by the polynucleotide, primary construct, or mmRNA; and/or increase the translation of encoded protein (see Whitehead et al., Mol. Ther. 2011, 19:1688-1694, herein incorporated by reference in its entirety).

### Liposones, Lipopiexes, and Lipid Nanoparticles

[0511] The polynucleotide, primary construct, and mmRNA of the invention can be formulated using one or more liposomes, lipoplexes, or lipid nanoparticles. In one embodiment, pharmaceutical compositions of polynucleotide, primary construct, or mmRNA include liposomes. Liposomes are artificially-prepared vesicles which may primarily be composed of a lipid bilayer and may be used as a delivery vehicle for the administration of nutrients and pharmaceutical formulations. Liposomes can be of different sizes such as, but not limited to, a multilamellar vesicle (MLV) which may be hundreds of nanometers in diameter and may contain a series of concentric bilayers separated by narrow aqueous compartments, a small unicellular vesicle (SUV) which may be smaller than 50 nm in diameter, and a large unilamellar vesicle (LUV) which may be between 50 and 500 nm in diameter. Liposome design may include, but is not limited to, opsonins or ligands in order to improve the attachment of liposomes to unhealthy tissue or to activate events such as, but not limited to, endocytosis. Liposomes may contain a low or a high pH in order to improve the delivery of the pharmaceutical formulations.

[0512] The formation of liposomes may depend on the physicochemical characteristics such as, but not limited to, the pharmaceutical formulation entrapped and the liposomal ingredients, the nature of the medium in which the lipid vesicles are dispersed, the effective concentration of the entrapped substance and its potential toxicity, any additional processes involved during the application and/or delivery of the vesicles, the optimization size, polydispersity and the shelf-life of the vesicles for the intended application, and the batch-to-batch reproducibility and possibility of large-scale production of safe and efficient liposomal products,

[0513] In one embodiment, pharmaceutical compositions described herein may include, without limitation, liposomes such as those formed from 1,2-dioleyloxy-N,N-dimethylaminopropane (DODMA) liposomes, DiLa2 liposomes from Marina Biotech (Bothell, WA), 1,2-dilinoleyloxy-3-dimethylaminopropane (DLin-DMA), 2,2-dilinoleyl-4-(2-dimethylaminoethyl)-[1,3]-dioxolane (DLin-KC2-DMA), and MC3 (US20100324120; herein incorporated by reference in its entirety) and liposomes which may deliver small molecule drugs such as, but not limited to, DOXIL● from Janssen Biotech, Inc. (Horsham, PA).

[0514] In one embodiment, pharmaceutical compositions described herein may include, without limitation, liposomes such as those formed from the synthesis of stabilized plasmid-lipid particles (SPLP) or stabilized nucleic acid lipid particle (SNALP) that have been previously described and shown to be suitable for oligonucleotide delivery in vitro and in vivo (see Wheeler et al. Gene Therapy. 1999 6:271-281; Zhang et al. Gene Therapy. 1999 6:1438-1447; Jeffs et al. Pharm Res. 2005 22:362-372; Morrissey et al., Nat Biotechnol. 2005 2:1002-1007; Zimmermann et al., Nature. 2006 441:111-114; H J eyes et al. J Contr Rel. 2005 107:276-287; Semple et al, Nature Biotech. 2010 28:172-176; Judge et al. J Clin Invest. 2009 119:661-673; deFougerolles Hum Gene Ther. 2008 19:125-132; all of which are incorporated herein in their entireties). The original manufacture method by Wheeler et al. was a detergent dialysis method, which was later improved by Jeffs et al. and is referred to as the spontaneous vesicle formation method. The liposome formulations are composed of 3 to 4 lipid components in addition to the polynucleotide, primary construct, or mmRNA. As an example a liposome can contain, but is not limited to, 55% cholesterol, 20% disteroylphosphatidyl choline (DSPC), 10% PEG-S-DSG, and 15% 1,2-dioleyloxy-N,N-dimethylaminopropane (DODMA), as described by Jeffs et al. As another example, certain liposome formulations may contain, but are not limited to, 48% cholesterol, 20% DSPC, 2% PEG-c-DMA, and 30% cationic lipid, where the cationic lipid can be 1,2-distearloxy-N,N-dimethylaminopropane (DSDMA), DODMA, DLin-DMA, or 1,2-dilinolenyloxy-3-dimethylaminopropane (DLenDMA), as described by Heyes et al.

[0515] In one embodiment, pharmaceutical compositions may include liposomes which may be formed to deliver mmRNA which may encode at least one immunogen. The mmRNA may be encapsulated by the liposome and/or it may be contained in an aqueous core which may then be encapsulated by the liposome (see International Pub. Nos. WO2012031046, WO2012031043, WO2012030901 and WO2012006378; each of which is herein incorporated by reference in their entirety). In another embodiment, the mmRNA which may encode an immunogen may be formulated in a cationic oil-in-water emulsion where the emulsion particle comprises an oil core and a cationic lipid which can interact with the mmRNA anchoring the molecule to the emulsion particle (see International Pub. No. WO2012006380; herein incorporated by reference in its entirety). In yet another embodiment, the lipid formulation may include at least cationic lipid, a lipid which may enhance transfection and a least one lipid which contains a hydrophilic head group linked to a lipid moiety (International Pub. No. WO2011076807 and U.S. Pub. No. 20110200582; each of which is herein incorporated by reference in their entirety). In another embodiment, the polynucleotides, primary constructs and/or mmRNA encoding an immunogen may be formulated in a lipid vesicle which may have crosslinks between functionalized lipid bilayers (see U.S. Pub. No. 20120177724, herein incorporated by reference in its entirety).

[0516] In one embodiment, the polynucleotides, primary constructs and/or mmRNA may be formulated in a lipid vesicle which may have crosslinks between functionalized lipid bilayers.

[0517] In one embodiment, the polynucleotides, primary constructs and/or mmRNA may be formulated in a liposome comprising a cationic lipid. The liposome may have a molar ratio of nitrogen atoms in the cationic lipid to the phosphates in the RNA (N:P ratio) of between 1:1 and 20:1 as described in International Publication No. WO2013006825, herein incorporated by reference in its entirety. In another embodiment, the liposome may have a N:P ratio of greater than 20:1 or less than 1:1.

[0518] In one embodiment, the polynucleotides, primary constructs and/or mmRNA may be formulated in a lipid-polycation complex. The formation of the lipid-polycation complex may be accomplished by methods known in the art and/or as described in U.S. Pub. No. 20120178702, herein incorporated by reference in its entirety. As a non-limiting example, the polycation may include a cationic peptide or a polypeptide such as, but not limited to, polylysine, polyornithine and/or polyarginine and the cationic peptides described in International Pub. No. WO2012013326; herein incorporated by reference in its entirety. In another embodiment, the polynucleotides, primary constructs and/or mmRNA may be formulated in a lipid-polycation complex which may further include a neutral lipid such as, but not limited to, cholesterol or dioleoyl phosphatidylethanolamine (DOPE).

[0519] The liposome formulation may be influenced by, but not limited to, the selection of the cationic lipid component, the degree of cationic lipid saturation, the nature of the PEGylation, ratio of all components and biophysical parameters such as size. In one example by Semple et al. (Semple et al. Nature Biotech. 2010 28:172-176; herein incorporated by reference in its entirety), the liposome formulation was composed of 57.1% cationic lipid, 7.1% dipalmitoylphosphatidylcholine, 34.3% cholesterol, and 1.4% PEG-c-DMA. As another example, changing the composition of the cationic lipid could more effectively deliver siRNA to various antigen presenting cells (Basha et al. Mol Ther. 2011 19:2186-2200; herein incorporated by reference in its entirety).

[0520] In some embodiments, the ratio of PEG in the lipid nanoparticle (LNP) formulations may be increased or decreased and/or the carbon chain length of the PEG lipid may be modified from C14 to C18 to alter the pharmacokinetics and/or biodistribution of the LNP formulations. As a non-limiting example, LNP formulations may contain 1-5% of the lipid molar ratio of PEG-c-DOMG as compared to the cationic lipid, DSPC and cholesterol. In another embodiment the PEG-c-DOMG may be replaced with a PEG lipid such as, but not limited to, PEG-DSG (1,2-Distearoyl-sn-glycerol, methoxypolyethylene glycol) or PEG-DPG (1,2-Dipalmitoyl-sn-glycerol, methoxypolyethylene glycol). The cationic lipid may be selected from any lipid known in the art such as, but not limited to, DLin-MC3-DMA, DLin-DMA, C12-200 and DLin-KC2-DMA.

[0521] In one embodiment, the polynucleotides, primary constructs or mmRNA may be formulated in a lipid nanoparticle such as those described in International Publication No. WO2012170930, herein incorporated by reference in its entirety.

[0522] In one embodiment, the cationic lipid may be selected from, but not limited to, a cationic lipid described in International Publication Nos. WO2012040184, WO2011153120, WO2011149733, WO2011090965, WO2011043913, WO2011022460, WO2012061259, WO2012054365, WO2012044638, WO2010080724, WO201021865 and WO2008103276, U.S. Pat. Nos. 7,893,302, 7,404,969 and 8,283,333 and US Patent Publication No. US20100036115 and US20120202871; each of which is herein incorporated by reference in their entirety. In another embodiment, the cationic lipid may be selected from, but not limited to, formula A described in International Publication Nos. WO2012040184, WO2011153120, WO2011149733, WO2011090965, WO2011043913, WO2011022460, WO2012061259, WO2012054365 and WO2012044638; each of which is herein incorporated by reference in their entirety. In yet another embodiment, the cationic lipid may be selected from, but not limited to, formula CLI-CLXXIX of International Publication No. WO2008103276, formula CLI-CLXXIX of U.S. Pat. No. 7,893,302, formula CLI-CLXXXXII of U.S. Pat. No. 7,404,969 and formula I-VI of US Patent Publication No. US20100036115; each of which is herein incorporated by reference in their entirety. As a non-limiting example, the cationic lipid may be selected from (20Z,23Z)—N,N-dimethylnonacosa-20,23-dien-10-amine, (17Z,20Z)—N,N-dimemylhexacosa-17,20-dien-9-amine, (1Z,19Z)—N5N-dimethylpentacosa-16,19-dien-8-amine, (13Z,16Z)—N,N-dimethyldocosa-13,16-dien-5-amine, (12Z,15Z)—N,N-dimethylhenicosa-12,15-dien-4-amine, (14Z,17Z)—N,N-dimethyltricosa-14,17-dien-6-amine, (15Z,18Z)—N,N-dimethyltetracosa-15,18-dien-7-amine, (18Z,21Z)—N,N-dimethylheptacosa-18,21-dien-10-amine, (15Z,18Z)—N,N-dimethyltetracosa-15,18-dien-5-amine, (14Z,17Z)—N,N-dimethyltricosa-14,17-dien-4-amine, (19Z,22Z)—N,N-dimeihyloctacosa-19,22-dien-9-amine, (18Z,21Z)—N,N-dimethylheptacosa-18,21-dien-8-amine, (17Z,20Z)—N,N-dimethylhexacosa-17,20-dien-7-amine, (16Z,19Z)—N,N-dimethylpentacosa-16,19-dien-6-amine, (22Z,25Z)—N,N-dimethylhentriaconta-22,25-dien-10-amine, (21Z,24Z)—N,N-dimethyltriaconta-21,24-dien-9-amine, (18Z)—N,N-dimetylheptacos-18-en-10-amine, (17Z)—N,N-dimethylhexacos-17-en-9-amine, (19Z,22Z)—N,N-dimethyloctacosa-19,22-dien-7-amine, N,N-dimethylheptacosan-10-amine, (20Z,23Z)—N-ethyl-N-methylnonacosa-20,23-dien-10-amine, 1-[(11Z,14Z)-1-nonylicosa-11,14-dien-1-yl]pyrrolidine, (20Z)—N,N-dimethylheptacos-20-en-10-amine, (15Z)—N,N-dimethyleptacos-15-en-10-amine, (14Z)—N,N-dimethyinonacos-14-en-10-amine, (17Z)—N,N-dimethylnonacos-17-en-10-amine, (24Z)—N,N-dimethyltritriacont-24-en-10-amine, (20Z)—N,N-dimethyinonacos-20-en-10-amine, (22Z)—N,N-dimethylhentriacont-22-en-10-amine, (16Z)—N,N-dimethylpentacos-16-en-8-amine, (12Z,15Z)—N,N-dimethyl-2-nonylhenicosa-12,15-dien-1-amine, (13Z,16Z)—N,N-dimethyl-3-nonyldocosa-13,16-dien-1-amine, N,N-dimethyl-1-[(1S,2R)-2-octylcyclopropyl]eptadecan-8-amine, 1-[(1S,2R)-2-hexylcyclopropyl]-N,N-dimethylnonadecan-10-amine, N,N-dimethyl-1-[(1S,2R)-2-octylcyclopropyl]nonadecan-10-amine, N,N-dimethyl-21-[(1S,2R)-2-octylyclopropyl]henicosan-10-amine,N,N-dimethyl-1-[(1S,2S)-2-{[(1R,2R)-2-pentylcyclopropyl]methyl}cyclopropyl]nonadecan-10-amine,N,N-dimethyl-1-[(1S,2R)-2-octylcyclopropyl]hexadecan-8-amine, N,N-dimethyl-[(1R,2S)-2-undecylcyclopropyl]tetradecan-5-amine, N,N-dimethyl-3-{7-[(1S,2R)-2-octylcyclopropyl]heptyl}dodecan-1-amine, 1-[(1R,2S)-2-heptylcyclopropyl]-N,N-dimethyloctadecan-9-amine, 1-[(1 S,2R)-2-decylcyclopropyl]-N,N-dimethylpentadecan-6-amine, N,N-dimethyl-[(1S,2R)-2-octylcyclopropyl]pentadecan-8-amine, R—N,N-dimethyl-1-[(9Z,12Z)-octadeca-9,12-dien-1-yloxy]-3-(octyloxy)propan-2-amine, S—N,N-dimethyl-1-[(9Z,12Z)-octadeca-9,12-dien-1-yloxy]-3-(octyloxy)propan-2-amine, 1-{2-[(9Z,12Z)-octadeca-9,12-dien-1-yloxy]-1-[(octyloxy)methyl]ethyl}pyrrolidine, (2S)—N,N-dimethyl-1-[(9Z,12Z)-octadeca-9,12-dien-1-yloxy]-3-[(5Z)-oct-5-en-1-yloxy]propan-2-amine, 1-{2-[(9Z,12Z)-octadeca-9,12-dien-1-yloxy]-1-[(octyloxy)methyl]ethyl}azetidine, (2S)-1-(hexyloxy)-N,N-dimethyl-3-[(9Z,12Z)-octadeca-9,12-dien-1-yloxy]propan-2-amine, (2S)-1-(heptyloxy)-N,N-dimethyl-3-[(9Z,12Z)-octadeca-9,12-dien-1-yloxy]propan-2-amine, N,N-dimethyl-1-(nonyloxy)-3-[(9Z,12Z)-octadeca-9,12-dien-1-yloxy]propan-2-amine, N,N-dimethyl-1-[(9Z)-octadec-9-en-1-yloxy]-3-(octyloxy)propan-2-amine; (2S)—N,N-dimethyl-1-[(6Z,9Z,12Z)-octadeca-6,9,12-trien-1-yloxy]-3-(octyloxy)propan-2-amine, (2S)-1-[(11Z,14Z)-icosa-11,14-dien-1-yloxy]-N,N-dimethyl-3-(pentyloxy)propan-2-amine, (2S)-1-(hexyloxy)-3-[(11Z,14Z)-icosa-11,14-dien-1-yloxy]-N,N-dimethylpropan-2-amine, 1-[(11Z,14Z)-icosa-11,14-dien-1-yloxy]-N,N-dimethyl-3-(octyloxy)propan-2-amine, 1-[(13Z,16Z)-docosa-13,16-dien-1-yloxy]-N,N-dimethyl-3-(octyloxy)propan-2-anine, (2S)-1-[(13Z,16Z)-docosa-13,16-dien-1-yloxy]-3-(hexyloxy)-N,N-dimethylpropan-2-amine, (2S)-1-[(13Z)-docos-13-en-1-yloxy]-3-(hexyloxy)-N,N-dimethylpropan-2-amine, 1-[(13Z)-docos-13-en-1-yloxy]-N,N-dimethyl-3-(octyloxy)propan-2-amine, 1-[(9Z)-hexadec-9-en-1-yloxy]-N,N-dimethyl-3-(octyloxy)propan-2-amine, (2R)—N,N-dimethyl-H(1-metoylo etyl)oxy]-3-[(9Z,12Z)-octadeca-9,12-dien-1-yloxy]propan-2-amine, (2R)-1-[(3,7-dimethyloctyl)oxy]-N,N-dimethyl-3-[(9Z,12Z)-octadeca-9,I2-dien-1-yloxy]propan-2-amine, N,N-dimethyl-1-(octyloxy)-3-({8-[(1S,2S)-2-{[(1R,2R)-2-pentylcyclopropyl]methyl}cyclopropyl]octyl}oxy)propan-2-amine, N,N-dimethyl-1-{[8-(2-octylcyclopropyl)octyl]oxy}-3-(octyloxy)propan-2-amine and (11E,20Z,23Z)—N,N-dimethylnonacosa-11,20,2-trien-10-amine or a pharmaceutically acceptable salt or stereoisomer thereof.

[0523] In one embodiment, the lipid may be a cleavable lipid such as those described in International Publication No. WO2012170889, herein incorporated by reference in its entirety.

[0524] In one embodiment, the cationic lipid may be synthesized by methods known in the art and/or as described in International Publication Nos. WO2012040184, WO2011153120, WO2011149733, WO2011090965, WO2011043913, WO2011022460, WO2012061259, WO2012054365, WO2012044638, WO2010080724 and WO201021865; each of which is herein incorporated by reference in their entirety.

[0525] In one embodiment, the LNP formulations of the polynucleotides, primary constructs and/or mmRNA may contain PEG-c-DOMG at 3% lipid molar ratio. In another embodiment, the LNP formulations polynucleotides, primary constructs and/or mmRNA may contain PEG-c-DOMG at 1.5% lipid molar ratio.

[0526] In one embodiment, the pharmaceutical compositions of the polynucleotides, primary constructs and/or mmRNA may include at least one of the PEGylated lipids described in International Publication No. 2012099755, herein incorporated by reference.

[0527] In one embodiment, the LNP formulation may contain PEG-DMG 2000 (1,2-dimyristoyl-sn-glycero-3-phophoethanolamine-N-[methoxy(polyethylene glycol)-2000). In one embodiment, the LNP formulation may contain PEG-DMG 2000, a cationic lipid known in the art and at least one other component. In another embodiment, the LNP formulation may contain PEG-DMG 2000, a cationic lipid known in the art, DSPC and cholesterol. As a non-limiting example, the LNP formulation may contain PEG-DMG 2000, DLin-D MA, DSPC and cholesterol. As another non-limiting example the LN]P formulation may contain PEG-DMG 2000, DLin-DMA, DSPC and cholesterol in a molar ratio of 2:40:10:48 (see e.g., Geall et al., Nonviral delivery of self-amplifying RNA vaccines, PNAS 2012; PMID 22908294; herein incorporated by reference in its entirety).

[0528] As another non-limiting example, modified RNA described herein may be formulated in a nanoparticle to be delivered by a parenteral route as described in U.S. Pub. No. 20120207845; herein incorporated by reference in its entirety.

[0529] In one embodiment, the LNP formulation may be formulated by the methods described in International Publication Nos. WO2011127255 or WO2008103276, each of which is herein incorporated by reference in their entirety. As a non-limiting example, modified RNA described herein may be encapsulated in LNP formulations as described in WO2011127255 and/or WO2008103276; each of which is herein incorporated by reference in their entirety.

[0530] In one embodiment, LNP formulations described herein may comprise a polycationic composition. As a non-limiting example, the polycationic composition may be selected from formula 1-60 of US Patent Publication No. US20050222064; herein incorporated by reference in its entirety. In another embodiment, the LNP formulations comprising a polycationic composition may be used for the delivery of the modified RNA described herein in vivo and/or in vitro.

[0531] In one embodiment, the LNP formulations described herein may additionally comprise a permeability enhancer molecule. Non-limiting permeability enhancer molecules are described in US Patent Publication No. US20050222064; herein incorporated by reference in its entirety.

[0532] In one embodiment, the pharmaceutical compositions may be formulated in liposomes such as, but not limited to, DiLa2 liposomes (Marina Biotech, Bothell, WA), SMARTICLES● (Marina Biotech, Bothell, WA), neutral DOPC (1,2-dioleoyl-sn-glycero-3-phosphocholine) based liposomes (e.g., siRNA delivery for ovarian cancer (Landen et al. Cancer Biology & Therapy 2006 5(12)1708-1713); herein incorporated by reference in its entirety) and hyaluronan-coated liposomes (Quiet Therapeutics, Israel).

[0533] The nanoparticle formulations may be a carbohydrate nanoparticle comprising a carbohydrate carrier and a modified nucleic acid molecule (e.g., mmRNA). As a non-limiting example, the carbohydrate carrier may include, but is not limited to, an anhydride-modified phytoglycogen or glycogen-type material, phytoglycogen octenyl succinate, phytoglycogen beta-dextrin, anhydride-modified phytoglycogen beta-dextrin. (See e.g., International Publication No. WO2012109121; herein incorporated by reference in its entirety).

[0534] Lipid nanoparticle formulations may be improved by replacing the cationic lipid with a biodegradable cationic lipid which is known as a rapidly eliminated lipid nanoparticle (reLNP). Ionizable cationic lipids, such as, but not limited to, DLinDMA, DLin-KC2-DMA, and DLin-MC3-DMA, have been shown to accumulate in plasma and tissues over time and may be a potential source of toxicity. The rapid metabolism of the rapidly eliminated lipids can improve the tolerability and therapeutic index of the lipid nanoparticles by an order of magnitude from a 1 mg/kg dose to a 10 mg/kg dose in rat. Inclusion of an enzymatically degraded ester linkage can improve the degradation and metabolism profile of the cationic component, while still maintaining the activity of the reLNP formulation. The ester linkage can be internally located within the lipid chain or it may be terminally located at the terminal end of the lipid chain. The internal ester linkage may replace any carbon in the lipid chain.

[0535] In one embodiment, the internal ester linkage may be located on either side of the saturated carbon. Non-limiting examples of reLNPs include,

[chemical structure]

[0536] In one embodiment, an immune response may be elicited by delivering a lipid nanoparticle which may include a nanospecies, a polymer and an immunogen. (U.S. Publication No. 20120189700 and International Publication No. WO2012099805; each of which is herein incorporated by reference in their entirety). The polymer may encapsulate the nanospecies or partially encapsulate the nanospecies. The immunogen may be a recombinant protein, a modified RNA and/or a primary construct described herein. In one embodiment, the lipid nanoparticle may be formulated for use in a vaccine such as, but not limited to, against a pathogen.

[0537] Lipid nanoparticles may be engineered to alter the surface properties of particles so the lipid nanoparticles may penetrate the mucosal barrier. Mucus is located on mucosal tissue such as, but not limited to, oral (e.g., the buccal and esophageal membranes and tonsil tissue), ophthalmic, gastrointestinal (e.g., stomach, small intestine, large intestine, colon, rectum), nasal, respiratory (e.g., nasal, pharyngeal, tracheal and bronchial membranes), genital (e.g., vaginal, cervical and urethral membranes). Nanoparticles larger than 10-200 nm which are preferred for higher drug encapsulation efficiency and the ability to provide the sustained delivery of a wide array of drugs have been thought to be too large to rapidly diffuse through mucosal barriers. Mucus is continuously secreted, shed, discarded or digested and recycled so most of the trapped particles may be removed from the mucosla tissue within seconds or within a few hours. Large polymeric nanoparticles (200 nm-500 nm in diameter) which have been coated densely with a low molecular weight polyethylene glycol (PEG) diffused through mucus only 4 to 6-fold lower than the same particles diffusing in water (Lai et al. PNAS 2007 104(5):1482-487; Lai et al. Adv Drug Deliv Rev. 2009 61(2): 158-171; each of which is herein incorporated by reference in their entirety). The transport of nanoparticles may be determined using rates of permeation and/or fluorescent microscopy techniques including, but not limited to, fluorescence recovery after photobleaching (FRAP) and high resolution multiple particle tracking (MPT). As a non-limiting example, compositions which can penetrate a mucosal barrier may be made as described in U.S. Pat. No. 8,241,670, herein incorporated by reference in its entirety.

[0538] The lipid nanoparticle engineered to penetrate mucus may comprise a polymeric material (i.e. a polymeric core) and/or a polymer-vitamin conjugate and/or a tri-block co-polymer. The polymeric material may include, but is not limited to, polyamines, polyethers, polyamides, polyesters, polycarbamates, polyureas, polycarbonates, poly(styrenes), polyimides, polysulfones, polyurethanes, polyacetylenes, polyethylenes, polyethyleneimines, polyisocyanates, polyacrylates, polymethacrylates, polyacrylonitriles, and polyarylates. The polymeric material may be biodegradable and/or biocompatible. The polymeric material may additionally be irradiated. As a non-limiting example, the polymeric material may be gamma irradiated (See e.g., International App. No. WO201282165, herein incorporated by reference in its entirety). Non-limiting examples of specific polymers include poly(caprolactone) (PCL), ethylene vinyl acetate polymer (EVA), poly(lactic acid) (PLA), poly(L-lactic acid) (PLLA), poly(glycolic acid) (PGA), poly(lactic acid-co-glycolic acid) (PLGA), poly(L-lactic acid-co-glycolic acid) (PLLGA), poly(D,L-lactide) (PDLA), poly(L-lactide) (PLLA), poly(D,L-lactide-co-caprolactone), poly(D,L-lactide-co-caprolactone-co-glycolide), poly(D,L-lactide-co-PEO-co-D,L-lactide), poly(D,L-lactide-co-PPO-co-D,L-lactide), polyalkyl cyanoacrylate, polyurethane, poly-L-lysine (PLL), hydroxypropyl methacrylate (HPMA), polyethyleneglycol, poly-L-glutamic acid, poly(hydroxy acids), polyanhydrides, polyorthoesters, poly(ester amides), polyamides, poly(ester ethers), polycarbonates, polyalkylenes such as polyethylene and polypropylene, polyalkylene glycols such as poly(ethylene glycol) (PEG), polyalkylene oxides (PEO), polyalkylene terephthalates such as poly(ethylene terephthalate), polyvinyl alcohols (PVA), polyvinyl ethers, polyvinyl esters such as poly(vinyl acetate), polyvinyl halides such as poly(vinyl chloride) (PVC), polyvinylpyrrolidone, polysiloxanes, polystyrene (PS), polyurethanes, derivatized celluloses such as alkyl celluloses, hydroxyalkyl celluloses, cellulose ethers, cellulose esters, nitro celluloses, hydroxypropylcellulose, carboxylmethylcellulose, polymers of acrylic acids, such as poly(methyl(meth)acrylate) (PMMA), poly(ethyl(meth)acrylate), poly(butyl(meth)acrylate), poly(isobutyl(meth)acrylate), poly(hexyl(meth)acrylate), poly(isodecyl(meth)acrylate), poly(lauryl(meth)acrylate), poly(phenyl(meth)acrylate), poly(methyl acrylate), poly(isopropyl acrylate), poly(isobutyl acrylate), poly(octadecyl acrylate) and copolymers and mixtures thereof, polydioxanone and its copolymers, polyhydroxyalkanoates, polypropylene fumarate, polyoxymethylene, poloxamers, poly(ortho)esters, poly(butyric acid), poly(valeric acid), poly(lactide-co-caprolactone), and trimethylene carbonate, polyvinylpyrrolidone. The lipid nanoparticle may be coated or associated with a co-polymer such as, but not limited to, a block co-polymer (such as a branched polyether-polyamide block copolymer described in International Publication No. WO2013012476, herein incorporated by reference in its entirety), and (poly(ethylene glycol))-(poly(propylene oxide))-(poly(ethylene glycol)) triblock copolymer (se e.g., US Publication 20120121718 and US Publication 20100003337 and U.S. Pat. No. 8,263,665; each of which is herein incorporated by reference in their entirety). The co-polymer may be a polymer that is generally regarded as safe (GRAS) and the formation of the lipid nanoparticle may be in such a way that no new chemical entities are created. For example, the lipid nanoparticle may comprise poloxamers coating PLGA nanoparticles without forming new chemical entities which are still able to rapidly penetrate human mucus (Yang et al. Angew. Chem. Int. Ed. 2011 50:2597-2600; herein incorporated by reference in its entirety).

[0539] The vitamin of the polymer-vitamin conjugate may be vitamin E. The vitamin portion of the conjugate may be substituted with other suitable components such as, but not limited to, vitamin A, vitamin E, other vitamins, cholesterol, a hydrophobic moiety, or a hydrophobic component of other surfactants (e.g., sterol chains, fatty acids, hydrocarbon chains and alkylene oxide chains).

[0540] The lipid nanoparticle engineered to penetrate mucus may include surface altering agents such as, but not limited to, mmRNA, anionic proteins (e.g., bovine serum albumin), surfactants (e.g., cationic surfactants such as for example dimethyldioctadecylammonium bromide), sugars or sugar derivatives (e.g., cyclodextrin), nucleic acids, polymers (e.g., heparin, polyethylene glycol and poloxamer), mucolytic agents (e.g., N-acetylcysteine, mugwort, bromelain, papain, clerodendrum, acetylcysteine, bromhexine, carbocisteine, eprazinone, mesna, ambroxol, sobrerol, domiodol, letosteine, stepronin, tiopronin, gelsolin, thymosin β4 dornase alfa, neltenexine, erdosteine) and various DNases including rhDNase. The surface altering agent may be embedded or enmeshed in the particle's surface or disposed (e.g., by coating, adsorption, covalent linkage, or other process) on the surface of the lipid nanoparticle. (see e.g., US Publication 20100215580 and US Publication 20080166414; each of which is herein incorporated by reference in their entirety).

[0541] The mucus penetrating lipid nanoparticles may comprise at least one mmRNA described herein. The mmRNA may be encapsulated in the lipid nanoparticle and/or disposed on the surface of the particle. The mmRNA may be covalently coupled to the lipid nanoparticle. Formulations of mucus penetrating lipid nanoparticles may comprise a plurality of nanoparticles. Further, the formulations may contain particles which may interact with the mucus and alter the structural and/or adhesive properties of the surrounding mucus to decrease mucoadhesion which may increase the delivery of the mucus penetrating lipid nanoparticles to the mucosal tissue.

[0542] In one embodiment, the polynucleotide, primary construct, or mmRNA is formulated as a lipoplex, such as, without limitation, the ATiPLEX™ system, the DACC system, the DBTC system and other siRNA-lipoplex technology from Silence Therapeutics (London, United Kingdom), STEMFECT™ from STEMGENT● (Cambridge, MA), and polyethylenimine (PEI) or protamine-based targeted and non-targeted delivery of nucleic acids acids (Aleku et al. Cancer Res. 2008 68:9788-9798; Strumberg et al. Int J Clin Pharmacol Ther 2012 50:76-78; Santel et al., Gene Ther 2006 13:1222-1234; Santel et al., Gene Ther 2006 13:1360-1370; Gutbier et al., Pulm Pharmacol. Ther. 2010 23:334-344; Kaufmann et al. Microvasc Res 2010 80:286-293Weide et al. J Immunother. 2009 32:498-507; Weide et al. J Immunother. 2008 31:180-188; Pascolo Expert Opin. Biol. Ther. 4:1285-1294; Fotin-Mleczek et al., 2011 J. Immunother. 34:1-15; Song et al., Nature Biotechnol. 2005, 23:709-717; Peer et al., Proc Natl Acad Sci USA. 2007 6; 104:4095-4100; deFougerolles Hum Gene Ther. 2008 19:125-132; all of which are incorporated herein by reference in its entirety).

[0543] In one embodiment such formulations may also be constructed or compositions altered such that they passively or actively are directed to different cell types in vivo, including but not limited to hepatocytes, immune cells, tumor cells, endothelial cells, antigen presenting cells, and leukocytes (Akinc et al. Mol Ther. 2010 18:1357-1364; Song et al., Nat Biotechnol. 2005 23:709-717; Judge et al., J Clin Invest. 2009 119:661-673; Kaufmann et al., Microvasc Res 2010 80:286-293; Santel et al., Gene Ther 2006 13:1222-1234; Santel et al., Gene Ther 2006 13:1360-1370; Gutbier et al., Pulm Pharmacol. Ther. 2010 23:334-344; Basha et al., Mol. Ther. 2011 19:2186-2200; Fenske and Cullis, Expert Opin Drug Deliv. 2008 5:25-44; Peer et al., Science. 2008 319:627-630; Peer and Lieberman, Gene Ther. 2011 18:1127-1133; all of which are incorporated herein by reference in its entirety). One example of passive targeting of formulations to liver cells includes the DLin-DMA, DLin-KC2-DMA and DLin-MC3-DMA-based lipid nanoparticle formulations which have been shown to bind to apolipoprotein E and promote binding and uptake of these formulations into hepatocytes in vivo (Akinc et al. Mol Ther. 2010 18:1357-1364; herein incorporated by reference in its entirety). Formulations can also be selectively targeted through expression of different ligands on their surface as exemplified by, but not limited by, folate, transferrin, N-acetylgalactosamine (GalNAc), and antibody targeted approaches (Kolhatkar et al., Curr Drug Discov Technol. 2011 8:197-206; Musacchio and Torchilin, Front Biosci. 2011 16:1388-1412; Yu et al., Mo Membr Biol. 2010 27:286-298; Patil et al., Crit Rev Ther Drug Carrier Syst. 2008 25:1-61; Benoit et al., Biomacromolecules. 2011 12:2708-2714; Zhao et al, Expert Opin Drug Deliv. 2008 5:309-319; Akine et al, Mol Ther. 2010 18:1357-1364; Srinivasan et al., Methods Mol Biol. 2012 820:105-116; Ben-Arie et al., Methods Mol Biol. 2012 757:497-507; Peer 2010 J Control Release. 20:63-68; Peer et al., Proc Natl Acad Sci USA. 2007 104:4095-4100; Kim et al., Methods Mol Biol. 2011 721:339-353; Subramanya et al., Mol Ther. 2010 18:2028-2037; Song et al., Nat Biotechnol. 2005 23:709-717; Peer et al., Science. 2008 319:627-630; Peer and Lieberman, Gene Ther. 2011 18:1127-1133; all of which are incorporated herein by reference in its entirety).

[0544] In one embodiment, the polynucleotide, primary construct, or mmRNA is formulated as a solid lipid nanoparticle. A solid lipid nanoparticle (SLN) may be spherical with an average diameter between 10 to 1000 nm. SLN possess a solid lipid core matrix that can solubilize lipophilic molecules and may be stabilized with surfactants and/or emulsifiers. In a further embodiment, the lipid nanoparticle may be a self-assembly lipid-polymer nanoparticle (see Zhang et al., ACS Nano, 2008, 2 (8), pp 1696-1702; herein incorporated by reference in its entirety).

[0545] Liposomes, lipoplexes, or lipid nanoparticles may be used to improve the efficacy of polynucleotide, primary construct, or mmRNA directed protein production as these formulations may be able to increase cell transfection by the polynucleotide, primary construct, or mmRNA; and/or increase the translation of encoded protein. One such example involves the use of lipid encapsulation to enable the effective systemic delivery of polyplex plasmid DNA (Heyes et al., Mol Ther. 2007 15:713-720; herein incorporated by reference in its entirety). The liposomes, lipoplexes, or lipid nanoparticles may also be used to increase the stability of the polynucleotide, primary construct, or mmRNA.

[0546] In one embodiment, the the polynucleotides, primary constructs, and/or the mmRNA of the present invention can be formulated for controlled release and/or targeted delivery. As used herein, “controlled release” refers to a pharmaceutical composition or compound release profile that conforms to a particular pattern of release to effect a therapeutic outcome. In one embodiment, the polynucleotides, primary constructs or the mmRNA may be encapsulated into a delivery agent described herein and/or known in the art for controlled release and/or targeted delivery. As used herein, the term “encapsulate” means to enclose, surround or encase. As it relates to the formulation of the compounds of the invention, encapsulation may be substantial, complete or partial. The term “substantially encapsulated” means that at least greater than 50, 60, 70, 80, 85, 90, 95, 96, 97, 98, 99, 999, 99.9 or greater than 99.999% of the pharmaceutical composition or compound of the invention may be enclosed, surrounded or encased within the delivery agent. “Partially encapsulation” means that less than 10, 10, 20, 30, 40 50 or less of the pharmaceutical composition or compound of the invention may be enclosed, surrounded or encased within the delivery agent. Advantageously, encapsulation may be determined by measuring the escape or the activity of the pharmaceutical composition or compound of the invention using fluorescence and/or electron micrograph. For example, at least 1, 5, 10, 20, 30, 40, 50, 60, 70, 80, 85, 90, 95, 96, 97, 98, 99, 99.9, 99.99 or greater than 99.99% of the pharmaceutical composition or compound of the invention are encapsulated in the delivery agent.

[0547] In one embodiment, the controlled release formulation may include, but is not limited to, tri-block co-polymers. As a non-limiting example, the formulation may include two different types of tri-block co-polymers (International Pub. No. WO2012131104 and WO2012131106; each of which is herein incorporated by reference in its entirety).

[0548] In another embodiment, the the polynucleotides, primary constructs, or the mmRNA may be encapsulated into a lipid nanoparticle or a rapidly eliminated lipid nanoparticle and the lipid nanoparticles or a rapidly eliminated lipid nanoparticle may then be encapsulated into a polymer, hydrogel and/or surgical sealant described herein and/or known in the art. As a non-limiting example, the polymer, hydrogel or surgical sealant may be PLGA, ethylene vinyl acetate (EVAc), poloxamer, GELSITE● (Nanotherapeutics, Inc. Alachua, FL), HYLENEX● (Halozyme Therapeutics, San Diego CA), surgical sealants such as fibrinogen polymers (Ethicon Inc. Cornelia, GA), TISSELL● (Baxter International, Inc Deerfield, IL), PEG-based sealants, and COSEAL● (Baxter International, Inc Deerfield, IL).

[0549] In another embodiment, the lipid nanoparticle may be encapsulated into any polymer known in the art which may form a gel when injected into a subject. As another non-limiting example, the lipid nanoparticle may be encapsulated into a polymer matrix which may be biodegradable.

[0550] In one embodiment, the the polynucleotide, primary construct, or mmRNA formulation for controlled release and/or targeted delivery may also include at least one controlled release coating. Controlled release coatings include, but are not limited to, OPADRY●, polyvinylpyrrolidone/vinyl acetate copolymer, polyvinylpyrrolidone, hydroxypropyl methylcellulose, hydroxypropyl cellulose, hydroxyethyl cellulose, EUDRAGIT RL●, EUDRAGIT RS● and cellulose derivatives such as ethylcellulose aqueous dispersions (AQUACOAT● and SURELEASE●).

[0551] In one embodiment, the controlled release and/or targeted delivery formulation may comprise at least one degradable polyester which may contain polycationic side chains. Degradeable polyesters include, but are not limited to, poly(serine ester), poly(L-lactide-co-L-lysine), poly(4-hydroxy-L-proline ester), and combinations thereof. In another embodiment, the degradable polyesters may include a PEG conjugation to form a PEGylated polymer.

[0552] In one embodiment, the the polynucleotides, primary constructs, and/or the mmRNA of the present invention may be encapsulated in a therapeutic nanoparticle. Therapeutic nanoparticles may be formulated by methods described herein and known in the art such as, but not limited to, International Pub Nos. WO20110005740, WO2010030763, WO2010005721, WO2010005723, WO2012054923, US Pub. Nos. US20110262491. US20100104645, US20100087337, US20100068285, US20110274759, US20100068286 and US20120288541 and U.S. Pat. Nos. 8,206,747, 8,293,276, 8,318,208 and 8,318,211 each of which is herein incorporated by reference in their entirety. In another embodiment, therapeutic polymer nanoparticles may be identified by the methods described in US Pub No. US20120140790, herein incorporated by reference in its entirety.

[0553] In one embodiment, the therapeutic nanoparticle may be formulated for sustained release. As used herein, “sustained release” refers to a pharmaceutical composition or compound that conforms to a release rate over a specific period of time. The period of time may include, but is not limited to, hours, days, weeks, months and years. As a non-limiting example, the sustained release nanoparticle may comprise a polymer and a therapeutic agent such as, but not limited to, the the polynucleotides, primary constructs, and mmRNA of the present invention (see international Pub No. 2010075072 and US Pub No. US20100216804, US201 10217377 and US20120201859, each of which is herein incorporated by reference in their entirety).

[0554] In one embodiment, the therapeutic nanoparticles may be formulated to be target specific. As a non-limiting example, the therapeutic nanoparticles may include a corticosteroid (see International Pub. No. WO2011084518; herein incorporated by reference in its entirety). In one embodiment, the therapeutic nanoparticles may be formulated to be cancer specific. As a non-limiting example, the therapeutic nanoparticles may be formulated in nanoparticles described in International Pub No. WO2008121949, WO2010005726, WO2010005725, WO201 1084521 and US Pub No. US20100069426, US20120004293 and US20100104655, each of which is herein incorporated by reference in their entirety.

[0555] In one embodiment, the nanoparticles of the present invention may comprise a polymeric matrix. As a non-limiting example, the nanoparticle may comprise two or more polymers such as, but not limited to, polyethylenes, poly carbonates, polyanhydrides, polyhydroxyacids, polypropylfumerates, polycaprolactones, polyamides, polyacetals, polyethers, polyesters, poly(orthoesters), polycyanoacrylates, polyvinyl alcohols, polyurethanes, polyphosphazenes, polyacrylates, polymethacrylates, polycyanoacrylates, polyureas, polystyrenes, polyamines, polylysine, poly(ethylene imine), poly(serine ester), poly(L-lactide-co-L-lysine), poly(4-hydroxy-L-proline ester) or combinations thereof.

[0556] In one embodiment, the therapeutic nanoparticle comprises a diblock copolymer. In one embodiment, the diblock copolymer may include PEG in combination with a polymer such as, but not limited to, polyethylenes, polycarbonates, polyanhydrides, polyhydroxyacids, polypropylfumerates, polycaprolactones, polyamides, polyacetals, polyethers, polyesters, poly(orthoesters), polycyanoacrylates, polyvinyl alcohols, polyurethanes, polyphosphazenes, polyacrylates, polymethacrylates, polycyanoacrylates, polyureas, polystyrenes, polyamines, polylysine, poly(ethylene imine), poly(serine ester), poly(L-lactide-co-L-lysine), poly(4-hydroxy-L-proline ester) or combinations thereof.

[0557] As a non-limiting example the therapeutic nanoparticle comprises a PLGA-PEG block copolymer (see US Pub. No. US20120004293 and U.S. Pat. No. 8,236,330, each of which is herein incorporated by reference in their entirety). In another non-limiting example, the therapeutic nanoparticle is a stealth nanoparticle comprising a diblock copolymer of PEG and PLA or PEG and PLGA (see U.S. Pat. No. 8,246,968 and International Publication No. WO2012166923, each of which is herein incorporated by reference in its entirety).

[0558] In one embodiment, the therapeutic nanoparticle may comprise a multiblock copolymer (See e.g., U.S. Pat. Nos. 8,263,665 and 8,287,910; each of which is herein incorporated by reference in its entirety).

[0559] In one embodiment, the block copolymers described herein may be included in a polyion complex comprising a non-polymeric micelle and the block copolymer. (See e.g., U.S. Pub. No. 20120076836; herein incorporated by reference in its entirety).

[0560] In one embodiment, the therapeutic nanoparticle may comprise at least one acrylic polymer. Acrylic polymers include but are not limited to, acrylic acid, methacrylic acid, acrylic acid and methacrylic acid copolymers, methyl methacrylate copolymers, ethoxyethyl methacrylates, cyanoethyl methacrylate, amino alkyl methacrylate copolymer, poly(acrylic acid), poly(methacrylic acid), polycyanoacrylates and combinations thereof.

[0561] In one embodiment, the therapeutic nanoparticles may comprise at least one cationic polymer described herein and/or known in the art.

[0562] In one embodiment, the therapeutic nanoparticles may comprise at least one amine-containing polymer such as, but not limited to polylysine, polyethylene imine, poly(amidoamine) dendrimers, poly(beta-amino esters) (See e.g., U.S. Pat. No. 8,287,849; herein incorporated by reference in its entirety) and combinations thereof.

[0563] In one embodiment, the therapeutic nanoparticles may comprise at least one degradable polyester which may contain polycationic side chains. Degradeable polyesters include, but are not limited to, poly(serine ester), poly(L-lactide-co-L-lysine), poly(4-hydroxy-L-proline ester), and combinations thereof. In another embodiment, the degradable polyesters may include a PEG conjugation to form a PEGylated polymer.

[0564] In another embodiment, the therapeutic nanoparticle may include a conjugation of at least one targeting ligand. The targeting ligand may be any ligand known in the art such as, but not limited to, a monoclonal antibody. (Kirpotin et al, Cancer Res. 2006 66:6732-6740; herein incorporated by reference in its entirety).

[0565] In one embodiment, the therapeutic nanoparticle may be formulated in an aqueous solution which may be used to target cancer (see international Pub No. WO2011084513 and US Pub No. US20110294717, each of which is herein incorporated by reference in their entirety).

[0566] In one embodiment, the polynucleotides, primary constructs, or mmRNA may be encapsulated in, linked to and/or associated with synthetic nanocarriers. Synthetic nanocarriers include, but are not limited to, those described in International Pub. Nos. WO2010005740, WO2010030763, WO201213501, WO2012149252, WO2012149255, WO2012149259, WO2012149265, WO2012149268, WO2012149282, WO2012149301, WO2012149393, WO2012149405, WO2012149411, WO2012149454 and WO2013019669, and US Pub. Nos. US20110262491, US20100104645, US20100087337 and US20120244222, each of which is herein incorporated by reference in their entirety. The synthetic nanocarriers may be formulated using methods known in the art and/or described herein. As a non-limiting example, the synthetic nanocarriers may be formulated by the methods described in International Pub Nos. WO2010005740, WO2010030763 and WO201213501and US Pub. Nos. US20110262491, US20100104645, US20100087337 and US2012024422, each of which is herein incorporated by reference in their entirety. In another embodiment, the synthetic nanocarrier formulations may be lyophilized by methods described in International Pub. No. WO2011072218 and U.S. Pat. No. 8,211,473; each of which is herein incorporated by reference in their entirety.

[0567] In one embodiment, the synthetic nanocarriers may contain reactive groups to release the polynucleotides, primary constructs and/or mmRNA described herein (see International Pub. No. WO20120952552 and US Pub No. US20120171229, each of which is herein incorporated by reference in their entirety).

[0568] In one embodiment, the synthetic nanocarriers may contain an immunostimulatory agent to enhance the immune response from delivery of the synthetic nanocarrier. As a non-limiting example, the synthetic nanocarrier may comprise a Th1 immunostimulatory agent which may enhance a Th1-based response of the immune system (see International Pub No. WO2010123569 and US Pub. No. US20110223201, each of which is herein incorporated by reference in its entirety).

[0569] In one embodiment, the synthetic nanocarriers may be formulated for targeted release. In one embodiment, the synthetic nanocarrier is formulated to release the polynucleotides, primary constructs and/or mmRNA at a specified pH and/or after a desired time interval. As a non-limiting example, the synthetic nanoparticle may be formulated to release the polynucleotides, primary constructs and/or mmRNA after 24 hours and/or at a pH of 4.5 (see International Pub. Nos. WO2010138193 and WO2010138194 and US Pub Nos. US20 110020388 and US20110027217, each of which is herein incorporated by reference in their entireties).

[0570] In one embodiment, the synthetic nanocarriers may be formulated for controlled and/or sustained release of the polynucleotides, primary constructs and/or mmRNA described herein. As a non-limiting example, the synthetic nanocarriers for sustained release may be formulated by methods known in the art, described herein and/or as described in International Pub No. WO2010138 192 and US Pub No. 20100303850, each of which is herein incorporated by reference in their entirety.

[0571] In one embodiment, the synthetic nanocarrier may be formulated for use as a vaccine. In one embodiment, the synthetic nanocarrier may encapsulate at least one polynucleotide, primary construct and/or mmRNA which encode at least one antigen. As a non-limiting example, the synthetic nanocarrier may include at least one antigen and an excipient for a vaccine dosage form (see International Pub No. WO2011150264 and US Pub No. US20110293723, each of which is herein incorporated by reference in their entirety). As another non-limiting example, a vaccine dosage form may include at least two synthetic nanocarriers with the same or different antigens and an excipient (see International Pub No. WO2011150249 and US Pub No. US20110293701, each of which is herein incorporated by reference in their entirety). The vaccine dosage form may be selected by methods described herein, known in the art and/or described in International Pub No. WO2011150258 and US Pub No. US20120027806, each of which is herein incorporated by reference in their entirety).

[0572] In one embodiment, the synthetic nanocarrier may comprise at least one polynucleotide, primary construct and/or mmRNA which encodes at least one adjuvant. As non-limiting example, the adjuvant may comprise dimethyldioctadecylammonium-bromide, dimethyldioctadecylammonium-chloride, dimethyldioctadecylammonium-phosphate or dimethyldioctadecylammonium-acetate (DDA) and an apolar fraction or part of said apolar fraction of a total lipid extract of a mycobacterium (See e.g., U.S. Pat. No. 8,241,610; herein incorporated by reference in its entirety). In another embodiment, the synthetic nanocarrier may comprise at least one polynucleotide, primary construct and/or mmRNA and an adjuvant. As a non-limiting example, the synthetic nanocarrier comprising and adjuvant may be formulated by the methods described in International Pub No. WO2011150240 and US Pub No. US20110293700, each of which is herein incorporated by reference in its entirety.

[0573] In one embodiment, the synthetic nanocarrier may encapsulate at least one polynucleotide, primary construct and/or mmRNA which encodes a peptide, fragment or region from a virus. As a non-limiting example, the synthetic nanocarrier may include, but is not limited to, the nanocarriers described in International Pub No. WO2012024621, WO201202629, WO2012024632 and US Pub No. US20120064110, US20120058153 and US20120058154, each of which is herein incorporated by reference in their entirety.

[0574] In one embodiment, the synthetic nanocarrier may be coupled to a polynucleotide, primary construct or mmRNA which may be able to trigger a humoral and/or cytotoxic T lymphocyte (CTL) response (See e.g., International Publication No. WO2013019669, herein incorporated by reference in its entirety).

[0575] In one embodiment, the nanoparticle may be optimized for oral administration. The nanoparticle may comprise at least one cationic biopolymer such as, but not limited to, chitosan or a derivative thereof. As a non-limiting example, the nanoparticle may be formulated by the methods described in U.S. Pub. No. 20120282343; herein incorporated by reference in its entirety.

### Polymers, Biodegradable Nanoparticles, and Core-Shell Nanoparticles

[0576] The polynucleotide, primary construct, and mmRNA of the invention can be formulated using natural and/or synthetic polymers. Non-limiting examples of polymers which may be used for delivery include, but are not limited to, DYNAMIC POLYCONJUGATE● (Arrowhead Research Corp., Pasadena, CA) formulations from MIRUS● Bio (Madison, WI) and Roche Madison (Madison., WI), PHASERX™ polymer formulations such as, without limitation, SMARTT POLYMER TECHNOLOGY™ (PHASERX●, Seattle, WA), DMRI/DOPE, poloxamer, VAXFECTIN● adjuvant from Vical (San Diego, CA), chitosan, cyclodextrin from Calando Pharmaceuticals (Pasadena, CA), dendrimers and poly(lactic-co-glycolic acid) (PLGA) polymers. RONDEL™ (RNAi/Oligonucleotides Nanoparticle Delivery) polymers (Arrowhead Research Corporation, Pasadena, CA) and pH responsive co-block polymers such as, but not limited to, PHASERX● (Seattle, WA).

[0577] A non-limiting example of chitosan formulation includes a core of positively charged chitosan and an outer portion of negatively charged substrate (U.S. Pub. No. 20120258176; herein incorporated by reference in its entirety). Chitosan includes, but is not limited to N-trimethyl chitosan, mono-N-carboxymethyl chitosan (MCC), N-palmitoyl chitosan (NPCS), EDTA-chitosan, low molecular weight chitosan, chitosan derivatives, or combinations thereof.

[0578] In one embodiment, the polymers used in the present invention have undergone processing to reduce and/or inhibit the attachment of unwanted substances such as, but not limited to, bacteria, to the surface of the polymer. The polymer may be processed by methods known and/or described in the art and/or described in International Pub. No. WO2012150467, herein incorporated by reference in its entirety.

[0579] A non-limiting example of PLGA formulations include, but are not limited to, PLGA injectable depots (e.g., ELIGARD which is formed by dissolving PLGA in 66% N-methyl-2-pyrrolidone (NMP) and the remainder being aqueous solvent and leuprolide. Once injected, the PLGA and leuprolide peptide precipitates into the subcutaneous space).

[0580] Many of these polymer approaches have demonstrated efficacy in delivering oligonucleotides in vivo into the cell cytoplasm (reviewed in deFougerolles Hum Gene Ther. 2008 19:125-132; herein incorporated by reference in its entirety). Two polymer approaches that have yielded robust in vivo delivery of nucleic acids, in this case with small interfering RNA (siRNA), are dynamic polyconjugates and cyclodextrin-based nanoparticles. The first of these delivery approaches uses dynamic polyconjugates and has been shown in vivo in mice to effectively deliver siRNA and silence endogenous target mRNA in hepatocytes (Rozema et al, Proc Natl Acad Sci USA. 2007 104:12982-12887; herein incorporated by reference in its entirety). This particular approach is a multicomponent polymer system whose key features include a membrane-active polymer to which nucleic acid, in this case siRNA, is covalently coupled via a disulfide bond and where both PEG (for charge masking) and N-acetylgalactosamine (for hepatocyte targeting) groups are linked via pH-sensitive bonds (Rozema et al., Proc Natl Acad Sci USA. 2007 104:12982-12887; herein incorporated by reference in its entirety). On binding to the hepatocyte and entry into the endosome, the polymer complex disassembles in the low-pH environment, with the polymer exposing its positive charge, leading to endosomal escape and cytoplasmic release of the siRNA from the polymer, Through replacement of the N-acetylgalactosamine group with a mannose group, it was shown one could alter targeting from asialoglycoprotein receptor-expressing hepatocytes to sinusoidal endothelium and Kupffer cells. Another polymer approach involves using transferrin-targeted cyclodextrin-containing polycation nanoparticles. These nanoparticles have demonstrated targeted silencing of the EWS-FLI1 gene product in transferrin receptor-expressing Ewing's sarcoma tumor cells (Hu-Lieskovan et al, Cancer Res. 2005 65: 8984-8982; herein incorporated by reference in its entirety) and siRNA formulated in these nanoparticles was well tolerated in non-human primates (Heidel et al., Proc Natl Acad Sci USA 2007 104:5715-21; herein incorporated by reference in its entirety). Both of these delivery strategies incorporate rational approaches using both targeted delivery and endosomal escape mechanisms.

[0581] The polymer formulation can permit the sustained or delayed release of polynucleotide, primary construct, or mmRNA (e.g., following intramuscular or subcutaneous injection). The altered release profile for the polynucleotide, primary construct, or mmRNA can result in, for example, translation of an encoded protein over an extended period of time. The polymer formulation may also be used to increase the stability of the polynucleotide, primary construct, or mmRNA. Biodegradable polymers have been previously used to protect nucleic acids other than mmRNA from degradation and been shown to result in sustained release of payloads in vivo (Rozema et al., Proc Natl Acad Sci USA. 2007 104:12982-12887; Sullivan et al., Expert Opin Drug Deliv. 2010 7:1433-1446; Converting et al., Biomacromolecules. 2010 Oct. 1; Chu et al., Ace Chem Res. 2012 Jan. 13; Manganiello et al., Biomaterials. 2012 33:2301-2309; Benoit et al., Biomacromolecules. 2011 12:2708-2714; Singha et al., Nucleic Acid Ther. 2011 2:133-147; deFougerolles Hum Gene Ther. 2008 19:125-132; Schaffert and Wagner, Gene Ther. 2008 16:1131-1138; Chaturvedi et al., Expert Opin Drug Deliv. 2011 8:1455-1468; Davis, Mol Pharm. 2009 6:659-668; Davis, Nature 2010 464:1067-1070; each of which is herein incorporated by reference in its entirety).

[0582] In one embodiment, the pharmaceutical compositions may be sustained release formulations. In a further embodiment, the sustained release formulations may be for subcutaneous delivery. Sustained release formulations may include, but are not limited to, PLGA microspheres, ethylene vinyl acetate (EVAc), poloxamer, GELSITE● (Nanotherapeutics, Inc. Alachua, FL), HYLENEX● (Halozyme Therapeutics, San Diego CA), surgical sealants such as fibrinogen polymers (Ethicon Inc. Cornelia, GA), TISSELL● (Baxter International, Inc Deerfield, IL), PEG-based sealants, and COSEAL● (Baxter International, Inc Deerfield, IL).

[0583] As a non-limiting example modified mRNA may be formulated in PLGA microspheres by preparing the PLGA microspheres with tunable release rates (e.g., days and weeks) and encapsulating the modified mRNA in the PLGA microspheres while maintaining the integrity of the modified mRNA during the encapsulation process. EVAc are non-biodegradeable, biocompatible polymers which are used extensively in pre-clinical sustained release implant applications (e.g., extended release products Ocusert a pilocarpine ophthalmic insert for glaucoma or progestasert a sustained release progesterone intrauterine device; transdermal delivery systems Testoderm, Duragesic and Selegiline; catheters). Poloxamer F-407 NF is a hydrophilic, non-ionic surfactant triblock copolymer of polyoxyethylene-polyoxypropylene-polyoxyethylene having a low viscosity at temperatures less than 5° C. and forms a solid gel at temperatures greater than 15° C. PEG-based surgical sealants comprise two synthetic PEG components mixed in a delivery device which can be prepared in one minute, seals in 3 minutes and is reabsorbed within 30 days. GELSITE● and natural polymers are capable of in-situ gelation at the site of administration. They have been shown to interact with protein and peptide therapeutic candidates through ionic interaction to provide a stabilizing effect.

[0584] Polymer formulations can also be selectively targeted through expression of different ligands as exemplified by, but not limited by, folate, transferrin, and N-acetylgalactosamine (GalNAc) (Benoit et al., Biomacromolecules. 2011 12:2708-2714; Rozema et al., Proc Natl Acad Sci USA. 2007 104:12982-12887; Davis, Mol Pharm. 2009 6:659-668; Davis, Nature 2010 464:1067-1070; each of which is herein incorporated by reference in its entirety).

[0585] The modified nucleic acid, and mmRNA of the invention may be formulated with or in a polymeric compound. The polymer may include at least one polymer such as, but not limited to, polyethenes, polyethylene glycol (PEG), poly(l-lysine)(PLL), PEG grafted to PLL, cationic lipopolymer, biodegradable cationic lipopolymer, polyethyleneimine (PEI), cross-linked branched poly(alkylene imnines), a polyenyne derivative, a modified poloxamer, a biodegradable polymer, elastic biodegradable polymer, biodegradable block copolymer, biodegradable random copolymer, biodegradable polyester copolymer, biodegradable polyester block copolymer, biodegradable polyester block random copolymer, multiblock copolymers, linear biodegradable copolymer, poly[α-(4-aminobutyl)-L-glycolic acid) (PAGA), biodegradable cross-linked cationic multi-block copolymers, polycarbonates, polyanhydrides, polyhydroxyacids, polypropylfumerates, polycaprolactones, polyamides, polyacetals, polyethers, polyesters, poly(orthoesters), polycyanoacrylates, polyvinyl alcohols, polyurethanes, polyphosphazenes, polyacrylates, polymethacrylates, polycyanoacrylates, polyureas, polystyrenes, polyamines, polylysine, poly(ethylene imine), poly(serine ester), poly(L-lactide-co-L-lysine), poly(4-hydroxy-L-proline ester), acrylic polymers, amine-containing polymers, dextran polymers, dextran polymer derivatives or or combinations thereof.

[0586] As a non-limiting example, the modified nucleic acid or mmRNA of the invention may be formulated with the polymeric compound of PEG grafted with PILL as described in U.S. Pat. No. 6,177,274; herein incorporated by reference in its entirety. The formulation may be used for transfecting cells in vitro or for in vivo delivery of the modified nucleic acid and mmRNA. In another example, the modified nucleic acid and mmRNA may be suspended in a solution or medium with a cationic polymer, in a dry pharmaceutical composition or in a solution that is capable of being dried as described in U.S. Pub. Nos. 20090042829 and 20090042825; each of which are herein incorporated by reference in their entireties.

[0587] As another non-limiting example the polynucleotides, primary constructs or mmRNA of the invention may be formulated with a PLGA-PEG block copolymer (see US Pub. No. US20120004293 and U.S. Pat. No. 8,236,330, herein incorporated by reference in their entireties) or PLGA-PEG-PLGA block copolymers (See U.S. Pat. No. 6,004,573, herein incorporated by reference in its entirety). As a non-limiting example, the polynucleotides, primary constructs or mmRNA of the invention may be formulated with a diblock copolymer of PEG and PLA or PEG and PLGA (see U.S. Pat. No. 8,246,968, herein incorporated by reference in its entirety).

[0588] A polyamine derivative may be used to deliver nucleic acids or to treat and/or prevent a disease or to be included in an implantable or injectable device (U.S. Pub. No. 20100260817 herein incorporated by reference in its entirety). As a non-limiting example, a pharmaceutical composition may include the modified nucleic acids and mmRNA and the polyamine derivative described in U.S. Pub. No. 20100260817 (the contents of which are incorporated herein by reference in its entirety. As a non-limiting example the polynucleotides, primary constructs and mmRNA of the present invention may be delivered using a polyamide polymer such as, but not limited to, a polymer comprising a 1,3-dipolar addition polymer prepared by combining a carbohydrate diazide monomer with a dilkyne unite comprising oligoamines (U.S. Pat. No. 8,236,280; herein incorporated by reference in its entirety).

[0589] In one embodiment, the polynucleotides, primary constructs or mmRNA of the present invention may be formulated with at least one polymer and/or derivatives thereof described in International Publication Nos. WO201 1115862, WO2012082574 and WO2012068187 and U.S. Pub. No. 20120283427, each of which are herein incorporated by reference in their entireties. In another embodiment, the modified nucleic acid or mmRNA of the present invention may be formulated with a polymer of formula Z as described in WO2011115862, herein incorporated by reference in its entirety. In yet another embodiment, the modified nucleic acid or mmRNA may be formulated with a polymer of formula Z, Z′ or Z″ as described in International Pub. Nos. WO2012082574 or WO2012068187 and U.S. Pub. No. 2012028342, each of which are herein incorporated by reference in their entireties. The polymers formulated with the modified RNA of the present invention may be synthesized by the methods described in International Pub. Nos. WO2012082574 or WO2012068187, each of which are herein incorporated by reference in their entireties.

[0590] The polynucleotides, primary constructs or mmRNA of the invention may be formulated with at least one acrylic polymer. Acrylic polymers include but are not limited to, acrylic acid, methacrylic acid, acrylic acid and methacrylic acid copolymers, methyl methacrylate copolymers, ethoxyethyl methacrylates, cyanoethyl methacrylate, amino alkyl methacrylate copolymer, poly(acrylic acid), poly(methacrylic acid), polycyanoacrylates and combinations thereof.

[0591] Formulations of polynucleotides, primary constructs or mmRNA of the invention may include at least one amine-containing polymer such as, but not limited to polylysine, polyethylene imine, poly(amidoamine) dendrimers or combinations thereof.

[0592] For example, the modified nucleic acid or mmRNA of the invention may be formulated in a pharmaceutical compound including a poly(alkylene imine), a biodegradable cationic lipopolymer, a biodegradable block copolymer, a biodegradable polymer, or a biodegradable random copolymer, a biodegradable polyester block copolymer, a biodegradable polyester polymer, a biodegradable polyester random copolymer, a linear biodegradable copolymer, PAGA, a biodegradable cross-linked cationic multi-block copolymer or combinations thereof. The biodegradable cationic lipopolymer may be made by methods known in the art and/or described in U.S. Pat. No. 6,696,038, U.S. App. Nos. 20030073619 and 20040142474 each of which is herein incorporated by reference in their entireties. The poly(alkylene imine) may be made using methods known in the art and/or as described in U.S. Pub. No. 20100004315, herein incorporated by reference in its entirety. The biodegradable polymer, biodegradable block copolymer, the biodegradable random copolymer, biodegradable polyester block copolymer, biodegradable polyester polymer, or biodegradable polyester random copolymer may be made using methods known in the art and/or as described in U.S. Pat. Nos. 6,517,869 and 6,267,987, the contents of which are each incorporated herein by reference in their entirety. The linear biodegradable copolymer may be made using methods known in the art and/or as described in U.S. Pat. No. 6,652,886. The PAGA polymer may be made using methods known in the art and/or as described in U.S. Pat. No. 6,217,912 herein incorporated by reference in its entirety. The PAGA polymer may be copolymerized to form a copolymer or block copolymer with polymers such as but not limited to, poly-L-lysine, polyarginine, polyornithine, histones, avidin, protamines, polylactides and poly(lactide-co-glycolides). The biodegradable cross-linked cationic multi-block copolymers may be made my methods known in the art and/or as described in U.S. Pat. No. 8,057,821 or U.S. Pub. No. 2012009145 each of which are herein incorporated by reference in their entireties. For example, the multi-block copolymers may be synthesized using linear polyethyleneimine (LPEI) blocks which have distinct patterns as compared to branched polyethyleneimines. Further, the composition or pharmaceutical composition may be made by the methods known in the art, described herein, or as described in U.S. Pub. No. 20100004315 or U.S. Pat. Nos. 6,267,987 and 6,217,912 each of which are herein incorporated by reference in their entireties.

[0593] The polynucleotides, primary constructs, and mmRNA of the invention may be formulated with at least one degradable polyester which may contain polycationic side chains. Degradeable polyesters include, but are not limited to, poly(serine ester), poly(L-lactide-co-L-lysine), poly(4-hydroxy-L-proline ester), and combinations thereof. In another embodiment, the degradable polyesters may include a PEG conjugation to form a PEGylated polymer.

[0594] The polynucleotides, primary construct, mmRNA of the invention may be formulated with at least one crosslinkable polyester. Crosslinkable polyesters include those known in the art and described in US Pub. No. 20120269761, herein incorporated by reference in its entirety.

[0595] In one embodiment, the polymers described herein may be conjugated to a lipid-terminating PEG. As a non-limiting example, PLGA may be conjugated to a lipid-terminating PEG forming PLGA-DSPE-PEG. As another non-limiting example, PEG conjugates for use with the present invention are described in International Publication No. WO2008103276, herein incorporated by reference in its entirety. The polymers may be conjugated using a ligand conjugate such as, but not limited to, the conjugates described in U.S. Pat. No. 8,273,363, herein incorporated by reference in its entirety.

[0596] In one embodiment, the modified RNA described herein may be conjugated with another compound. Non-limiting examples of conjugates are described in U.S. Pat. Nos. 7,964,578 and 7,833,992, each of which are herein incorporated by reference in their entireties. In another embodiment, modified RNA of the present invention may be conjugated, with conjugates of formula 1-122 as described in U.S. Pat. Nos. 7,964,578 and 7,833,992, each of which are herein incorporated by reference in their entireties. The polynucleotides, primary constructs and/or mmRNA described herein may be conjugated with a metal such as, but not limited to, gold. (See e.g., Giljohann et al. Journ. Amer. Chem. Soc. 2009 131(6): 2072-2073; herein incorporated by reference in its entirety). In another embodiment, the polynucleotides, primary constructs and/or mmRNA described herein may be conjugated and/or encapsulated in gold-nanoparticles. (International Pub. No. WO201216269 and U.S. Pub. No. 20120302940; each of which is herein incorporated by reference in its entirety).

[0597] As described in U.S. Pub. No. 20100004313, herein incorporated by reference in its entirety, a gene delivery composition may include a nucleotide sequence and a poloxamer. For example, the modified nucleic acid and mmRNA of the present inveition may be used in a gene delivery composition with the poloxamer described in U.S. Pub. No. 20100004313.

[0598] In one embodiment, the polymer formulation of the present invention may be stabilized by contacting the polymer formulation, which may include a cationic carrier, with a cationic lipopolymer which may be covalently linked to cholesterol and polyethylene glycol groups. The polymer formulation may be contacted with a cationic lipopolymer using the methods described in U.S. Pub. No. 20090042829 herein incorporated by reference in its entirety. The cationic carrier may include, but is not limited to, polyethylenimine, poly(trimethylenimine), poly(tetramethylenimine), polypropylenimine, aminoglycoside-polyamine, dideoxy-diamino-b-cyclodextrin, spermine, spermidine, poly(2-dimethylamino)ethyl methacrylate, poly(lysine), poly(histidine), poly(arginine), cationized gelatin, dendrimers, chitosan, 1,2-Dioleoyl-3-Trimethylammonium-Propane(DOTAP), N-[1-(2,3-diolcoyloxy)propyl]-N,N,N-trimethylammonium chloride (DOTMA), 1-[2-(oleoyloxy)ethyl]-2-oleyl-3-(2-hydroxyethyl)imidazoliniurm chloride (DOT IM), 2,3-dioleyloxy-N-[2(sperminecarboxamido)ethyl]-N,N-dimethyl-1-propanaminium trifluoroacetate (DOSPA), 3B-[N (N′,N′-Dimethylaminoethane)-carbamoyl]Cholesterol Hydrochloride (DC-Cholesterol H C1) diheptadecylamidoglycyl spermidine (DOGS), N,N-distearyl-N,N-dimethylammonium bromide (DDAIB), N-(1,2-dimyristyloxypropy-3-yl)-N,N-dimethyl-N-hydroxyethyl ammonium bromide (DMRIE), N,N-dioleyl-N,N-dimethylammonium chloride DODAC) and combinations thereof.

[0599] The polynucleotides, primary constructs and/or mmRNA of the invention may be formulated in a polyplex of one or more polymers (U.S. Pub. No. 20120237565 and 20120270927; each of which is herein incorporated by reference in its entirety). In one embodiment, the polyplex comprises two or more cationic polymers. The catioinic polymer may comprise a poly(ethylene imine) (PEI) such as linear PEL.

[0600] The polynucleotide, primary construct, and mmRNA of the invention can also be formulated as a nanoparticle using a combination of polymers, lipids, and/or other biodegradable agents, such as, but not limited to, calcium phosphate. Components may be combined in a core-shell, hybrid, and/or layer-by-layer architecture, to allow for fine-tuning of the nanoparticle so to delivery of the polynucleotide, primary construct and mmRNA may be enhanced (Wang et al., Nat Mater. 2006 5:791-796; Fuller et al., Biomaterials. 2008 29:1526-1532; DeKoker et al., Adv Drug Deliv Rev. 2011 63:748-761; Endres et al., Biomaterials. 2011 32:7721-7731; Su et al., Mol Pharm. 2011 Jun. 6; 8(3):774-87; herein incorporated by reference in its entirety). As a non-limiting example, the nanoparticle may comprise a plurality of polymers such as, but not limited to hydrophilic-hydrophobic polymers (e.g., PEG-PLGA), hydrophobic polymers (e.g., PEG) and/or hydrophilic polymers (International Pub. No. WO20120225129; herein incorporated by reference in its entirety).

[0601] Biodegradable calcium phosphate nanoparticles in combination with lipids and/or polymers have been shown to deliver polynucleotides, primary constructs and mmRNA in vivo. In one embodiment, a lipid coated calcium phosphate nanoparticle, which may also contain a targeting ligand such as anisamide, may be used to deliver the polynucleotide, primary construct and mmRNA of the present invention. For example, to effectively deliver siRNA in a mouse metastatic lung model a lipid coated calcium phosphate nanoparticle was used (Li et al., J Contr Rel. 2010 142: 416-421; Li et al., J Contr Rel. 2012 158:108-114; Yang et al., Mol Ther. 2012 20:609-615; herein incorporated by reference in its entirety). This delivery system combines both a targeted nanoparticle and a component to enhance the endosomal escape, calcium phosphate, in order to improve delivery of the siRNA.

[0602] In one embodiment, calcium phosphate with a PEG-polvanion block copolymer may be used to delivery polynucleotides, primary constructs and mmRNA (Kazikawa et al., J Contr Rel. 2004 97:345-356; Kazikawa et al., J Contr Rel. 2006 111:368-370; herein incorporated by reference in its entirety).

[0603] In one embodiment, a PEG-charge-conversional polymer (Pitella et al., Biomaterials. 2011 32:3106-3114) may be used to form a nanoparticle to deliver the polynucleotides, primary constructs and mmRNA of the present invention. The PEG-charge-conversional polymer may improve upon the PEG-polyanion block copolymers by being cleaved into a polycation at acidic pH, thus enhancing endosomal escape.

[0604] The use of core-shell nanoparticles has additionally focused on a high-throughput approach to synthesize cationic cross-linked nanogel cores and various shells (Siegwart et al., Proc Natl Acad Sci USA. 2011 108:12996-13001). The complexation, delivery, and internalization of the polymeric nanoparticles can be precisely controlled by altering the chemical composition in both the core and shell components of the nanoparticle. For example, the core-shell nanoparticles may efficiently deliver siRNA to mouse hepatocytes after they covalently attach cholesterol to the nanoparticle.

[0605] In one embodiment, a hollow lipid core comprising a middle PLGA layer and an outer neutral lipid layer containing PEG may be used to delivery of the polynucleotide, primary construct and mmRNA of the present invention. As a non-limiting example, in mice bearing a luciferase-expressing tumor, it was determined that the lipid-polymer-lipid hybrid nanoparticle significantly suppressed luciferase expression, as compared to a conventional lipoplex (Shi et al, Angew Chem Int Ed. 2011 50:7027-7031; herein incorporated by reference in its entirety).

[0606] In one embodiment, the lipid nanoparticles may comprise a core of the modified nucleic acid molecules disclosed herein and a polymer shell. The polymer shell may be any of the polymers described herein and are known in the art. In an additional embodiment, the polymer shell may be used to protect the modified nucleic acids in the core.

[0607] Core-shell nanoparticles for use with the modified nucleic acid molecules of the present invention are described and may be formed by the methods described in U.S. Pat. No. 8,313,777 herein incorporated by reference in its entirety.

[0608] In one embodiment, the core-shell nanoparticles may comprise a core of the modified nucleic acid molecules disclosed herein and a polymer shell. The polymer shell may be any of the polymers described herein and are known in the art. In an additional embodiment, the polymer shell may be used to protect the modified nucleic acid molecules in the core. As a non-limiting example, the core-shell nanoparticle may be used to treat an eye disease or disorder (See e.g. US Publication No. 20120321719, herein incorporated by reference in its entirety).

[0609] In one embodiment, the polymer used with the formulations described herein may be a modified polymer (such as, but not limited to, a modified polyacetal) as described in International Publication No. WO2011120053, herein incorporated by reference in its entirety.

### Peptides and Proteins

[0610] The polynucleotide, primary construct, and mmRNA of the invention can be formulated with peptides and/or proteins in order to increase transfection of cells by the polynucleotide, primary construct, or mmRNA. In one embodiment, peptides such as, but not limited to, cell penetrating peptides and proteins and peptides that enable intracellular delivery may be used to deliver pharmaceutical formulations. A non-limiting example of a cell penetrating peptide which may be used with the pharmaceutical formulations of the present invention includes a cell-penetrating peptide sequence attached to polycations that facilitates delivery to the intracellular space, e.g., HIV-derived TAT peptide, penetratins, transportans, or hCT derived cell-penetrating peptides (see, e.g., Caron et al., Mol. Ther. 3(3):310-8 (2001); Langel, Cell-Penetrating Peptides: Processes and Applications (CRC Press, Boca Raton FL, 2002); El-Andaloussi et al., Curr. Pharm. Des. 11(28):3597-611 (2003); and Deshayes et al., Cell. Mol. Life Sci. 62(16):1839-49 (2005), all of which are incorporated herein by reference in their entirety). The compositions can also be formulated to include a cell penetrating agent, e.g., liposomes, which enhance delivery of the compositions to the intracellular space. Polynucleotides, primary constructs, and mmRNA of the invention may be complexed to peptides and/or proteins such as, but not limited to, peptides and/or proteins from Aileron Therapeutics (Cambridge, MA) and Permeon Biologies (Cambridge, MA) in order to enable intracellular delivery (Cronican et al., ACS Chem. Biol 2010 5:747-752; McNaughton et al., Proc. Natl. Acad. Sci. USA 2009 106:6111-6116; Sawyer, Chem Biol Drag Des. 2009 73:3-6; Verdine and Hilinski, Methods Enzymol. 2012; 503:3-33; all of which are herein incorporated by reference in its entirety).

[0611] In one embodiment, the cell-penetrating polypeptide may comprise a first domain and a second domain. The first domain may comprise a supercharged polypeptide. The second domain may comprise a protein-binding partner. As used herein, “protein-binding partner” includes, but are not limited to, antibodies and functional fragments thereof, scaffold proteins, or peptides. The cell-penetrating polypeptide may further comprise an intracellular binding partner for the protein-binding partner. The cell-penetrating polypeptide may be capable of being secreted from a cell where the polynucleotide, primary construct, or mmRNA may be introduced.

[0612] Formulations of the including peptides or proteins may be used to increase cell transfection by the polynucleotide, primary construct, or mmRNA, alter the biodistribution of the polynucleotide, primary construct, or mmRNA (e.g., by targeting specific tissues or cell types), and/or increase the translation of encoded protein. (See e.g., International Pub. No. WO2012110636; herein incorporated by reference in its entirety).

### Cells

[0613] The polynucleotide, primary construct, and mmRNA of the invention can be transfected ex vivo into cells, which are subsequently transplanted into a subject. As non-limiting examples, the pharmaceutical compositions may include red blood cells to deliver modified RNA to liver and myeloid cells, virosomes to deliver modified RNA in virus-like particles (VLPs), and electroporated cells such as, but not limited to, from MAXCYTE● (Gaithersburg, MD) and from ERYTECH● (Lyon, France) to deliver modified RNA. Examples of use of red blood cells, viral particles and electroporated cells to deliver payloads other than mmRNA have been documented (Godfrin et al., Expert Opin Biol Ther. 2012 12:127-133; Fang et al., Expert Opin Biol Ther. 2012 12:385-389; Hu et al., Proc Natl Acad Sci USA. 2011 108:10980-10985; Lund et al., Pharm Res. 2010 27:400-420; Huckriede et al., J Liposome Res. 2007; 17:39-47; Cusi, Hum Vaccin. 2006 2:1-7; de Jonge et al., Gene Ther. 2006 13:400-411; all of which are herein incorporated by reference in its entirety).

[0614] The polynucleotides, primary constructs and mmRNA may be delivered in synthetic VLPs synthesized by the methods described in International Pub No, WO2011085231 and US Pub No. 20110171248, each of which are herein incorporated by reference in their entireties.

[0615] Cell-based formulations of the polynucleotide, primary construct, and mmRNA of the invention may be used to ensure cell transfection (e.g., in the cellular carrier), alter the biodistribution of the polynucleotide, primary construct, or mmRNA (e.g., by targeting the cell carrier to specific tissues or cell types), and/or increase the translation of encoded protein.

[0616] A variety of methods are known in the art and suitable for introduction of nucleic acid into a cell, including viral and non-viral mediated techniques. Examples of typical non-viral mediated techniques include, but are not limited to, electroporation, calcium phosphate mediated transfer, nucleofection, sonoporation, heat shock, magnetofection, liposome mediated transfer, microinjection, microprojectile mediated transfer (nanoparticles), cationic polymer mediated transfer (DEAE-dextran, polyethylenimine, polyethylene glycol (PEG) and the like) or cell fusion.

[0617] The technique of sonoporation, or cellular sonication, is the use of sound (e.g., ultrasonic frequencies) for modifying the permeability of the cell plasma membrane. Sonoporation methods are known to those in the art and are used to deliver nucleic acids in vivo (Yoon and Park, Expert Opin Drug Deliv. 2010 7:321-330; Postema and Gilja, Curr Pharm Biotechnol. 2007 8:355-361; Newman and Bettinger, Gene Ther. 2007 14:465-475; all herein incorporated by reference in their entirety). Sonoporation methods are known in the art and are also taught for example as it relates to bacteria in US Patent Publication 20100196983 and as it relates to other cell types in, for example, US Patent Publication 20100009424, each of which are incorporated herein by reference in their entirety.

[0618] Electroporation techniques are also well known in the art and are used to deliver nucleic acids in vivo and clinically (Andre et al., Curr Gene Ther. 2010 10:267-280; Chiarella et al., Curr Gene Ther. 2010 10:281-286; Hiojmnan, Curr Gene Ther % 2010 10:128-138; all herein incorporated by reference in their entirety). In one embodiment, polynucleotides, primary constructs or mmRNA may be delivered by electroporation as described in Example 8.

### Hyaluronidase

[0619] The intramuscular or subcutaneous localized injection of polynucleotide, primary construct, or mmRNA of the invention can include hyaluronidase, which catalyzes the hydrolysis of hyaluronan. By catalyzing the hydrolysis of hyaluronan, a constituent of the interstitial barrier, hyaluronidase lowers the viscosity of hyaluronan, thereby increasing tissue permeability (Frost, Expert Opin. Drug Deliv. (2007) 4:427-440; herein incorporated by reference in its entirety). It is useful to speed their dispersion and systemic distribution of encoded proteins produced by transfected cells. Alternatively, the hyaluronidase can be used to increase the number of cells exposed to a polynucleotide, primary construct, or mmRNA of the invention administered intramuscularly or subcutaneously.

### Nanoparticle Mimics

[0620] The polynucleotide, primary construct or mmRNA of the invention may be encapsulated within and/or absorbed to a nanoparticle mimic. A nanoparticle mimic can mimic the delivery function organisms or particles such as, but not limited to, pathogens, viruses, bacteria, fungus, parasites, prions and cells. As a non-limiting example the polynucleotide, primary construct or mmRNA of the invention may be encapsulated in a non-viron particle which can mimic the delivery function of a virus (see International Pub. No. WO20122006376 herein incorporated by reference in its entirety).

### Nanotubes

[0621] The polynucleotides, primary constructs or mmRNA of the invention can be attached or otherwise bound to at least one nanotube such as, but not limited to, rosette nanotubes, rosette nanotubes having twin bases with a linker, carbon nanotubes and/or single-walled carbon nanotubes. The polynucleotides, primary constructs or mmRNA may be bound to the nanotubes through forces such as, but not limited to, steric, ionic, covalent and/or other forces.

[0622] In one embodiment, the nanotube can release one or more polynucleotides, primary constructs or mmRNA into cells. The size and/or the surface structure of at least one nanotube may be altered so as to govern the interaction of the nanotubes within the body and/or to attach or bind to the polynucleotides, primary constructs or mmRNA disclosed herein. In one embodiment, the building block and/or the functional groups attached to the building block of the at least one nanotube may be altered to adjust the dimensions and/or properties of the nanotube. As a non-limiting example, the length of the nanotubes may be altered to hinder the nanotubes from passing through the holes in the walls of normal blood vessels but still small enough to pass through the larger holes in the blood vessels of tumor tissue.

[0623] In one embodiment, at least one nanotube may also be coated with delivery enhancing compounds including polymers, such as, but not limited to, polyethylene glycol. In another embodiment, at least one nanotube and/or the polynucleotides, primary constructs or mmRNA may be mixed with pharmaceutically acceptable excipients and/or delivery vehicles.

[0624] In one embodiment, the polynucleotides, primary constructs or mmRNA are attached and/or otherwise bound to at least one rosette nanotube. The rosette nanotubes may be formed by a process known in the art and/or by the process described in International Publication No. WO2012094304, herein incorporated by reference in its entirety. At least one polynucleotide, primary construct and/or mmRNA may be attached and/or otherwise bound to at least one rosette nanotube by a process as described in International Publication No. WO2012094304, herein incorporated by reference in its entirety, where rosette nanotubes or modules forming rosette nanotubes are mixed in aqueous media with at least one polynucleotide, primary construct and/or mmRNA under conditions which may cause at least one polynucleotide, primary construct or mmRNA to attach or otherwise bind to the rosette nanotubes.

[0625] In one embodiment, the polynucleotides, primary constructs or mmRNA may be attached to and/or otherwise bound to at least one carbon nanotube. As a non-limiting example, the polynucleotides, primary constructs or mmRNA may be bound to a linking agent and the linked agent may be bound to the carbon nanotube (See e.g., U.S. Pat. No. 8,246,995; herein incorporated by reference in its entirety). The carbon nanotube may be a single-walled nanotube (See e.g., U.S. Pat. No. 8,246,995; herein incorporated by reference in its entirety).

### Conjugates

[0626] The polynucleotides, primary constructs, and mmRNA of the invention include conjugates, such as a polynucleotide, primary construct, or mmRNA covalently linked to a carrier or targeting group, or including two encoding regions that together produce a fusion protein (e.g., bearing a targeting group and therapeutic protein or peptide).

[0627] The conjugates of the invention include a naturally occurring substance, such as a protein (e.g., human serum albumin (HSA), low-density lipoprotein (LDL), high-density lipoprotein (HDL), or globulin); an carbohydrate (e.g., a dextran, pullulan, chitin, chitosan, inulin, cyclodextrin or hyaluronic acid); or a lipid. The ligand may also be a recombinant or synthetic molecule, such as a synthetic polymer, e.g., a synthetic polyamino acid, an oligonucleotide (e.g. an aptamer). Examples of polyamino acids include polyamino acid is a polylysine (PLL), poly L-aspartic acid, poly L-glutamic acid, styrene-maleic acid anhydride copolymer, poly(L-lactide-co-glycolied) copolymer, divinyl ether-maleic anhydride copolymer, N-(2-hydroxypropyl)methacrylamide copolymer (HMPA), polyethylene glycol (PEG), polyvinyl alcohol (PVA), polyurethane, poly(2-ethylacryllic acid), N-isopropylacrylamide polymers, or polyphosphazine. Example of polyamines include: polyethylenimine, polylysine (PLL), spermine, spermidine, polyamine, pseudopeptide-polyamine, peptidomimetic polyamine, dendrimer polyamine, arginine, amidine, protamine, cationic lipid, cationic porphyrin, quaternary salt of a polyamine, or an alpha helical peptide.

[0628] Representative U.S. patents that teach the preparation of polynucleotide conjugates, particularly to RNA, include, but are not limited to, U.S. Pat. Nos. 4,828,979; 4,948,882; 5,218,105; 5,525,465; 5,541,313; 5,545,730; 5,552,538; 5,578,717, 5,580,731; 5,591,584; 5,109,124; 5,118,802; 5,138,045; 5,414,077; 5,486,603; 5,512,439; 5,578,718; 5,608,046; 4,587,044; 4,605,735; 4,667,025; 4,762,779; 4,789,737; 4,824,941; 4,835,263; 4,876,335; 4,904,582; 4,958,013; 5,082,830; 5,112,963; 5,214,136; 5,082,830; 5,112,963; 5,214,136; 5,245,022; 5,254,469; 5,258,506; 5,262,536; 5,272,250; 5,292,873; 5,317,098; 5,371,241, 5,391,723; 5,416,203, 5,451,463; 5,510,475; 5,512,667; 5,514,785; 5,565,552; 5,567,810; 5,574,142; 5,585,481; 5,587,371; 5,595,726; 5,597,696; 5,599,923; 5,599,928 and 5,688,941; 6,294,664; 6,320,017; 6,576,752; 6,783,931; 6,900,297; 7,037,646; each of which is herein incorporated by reference in their entireties.

[0629] In one embodiment, the conjugate of the present invention may function as a carrier for the modified nucleic acids and mmRNA of the present invention. The conjugate may comprise a cationic polymer such as, but not limited to, polyamine, polylysine, polyalkylenimine, and polyethylenimine which may be grafted to with poly(ethylene glycol). As a non-limiting example, the conjugate may be similar to the polymeric conjugate and the method of synthesizing the polymeric conjugate described in U.S. Pat. No. 6,586,524 herein incorporated by reference in its entirety.

[0630] The conjugates can also include targeting groups, e.g., a cell or tissue targeting agent, e.g., a lectin, glycoprotein, lipid or protein, e.g., an antibody, that binds to a specified cell type such as a kidney cell. A targeting group can be a thyrotropin, melanotropin, lectin, glycoprotein, surfactant protein A, Mucin carbohydrate, multivalent lactose, multivalent galactose, N-acetyl-galactosamine, N-acetyl-glucosamine multivalent mannose, multivalent fucose, glycosylated polyaminoacids, multivalent galactose, transferrin, bisphosphonate, polyglutamate, polyaspartate, a lipid, cholesterol, a steroid, bile acid, folate, vitamin B12, biotin, an RGD peptide, an RGD peptide mimetic or an aptamer.

[0631] Targeting groups can be proteins, e.g., glycoproteins, or peptides, e.g., molecules having a specific affinity for a co-ligand, or antibodies e.g., an antibody, that binds to a specified cell type such as a cancer cell, endothelial cell, or bone cell. Targeting groups may also include hormones and hormone receptors. They can also include non-peptidic species, such as lipids, lectins, carbohydrates, vitamins, cofactors, multivalent lactose, multivalent galactose. N-acetyl-galactosamine, N-acetyl-glucosamine multivalent mannose, multivalent fucose, or aptamers. The ligand can be, for example, a lipopolysaccharide, or an activator of p38 MAP kinase.

[0632] The targeting group can be any ligand that is capable of targeting a specific receptor. Examples include, without limitation, folate, GalNAc, galactose, mannose, mannose-6P, apatamers, integrin receptor ligands, chemokine receptor ligands, transferrin, biotin, serotonin receptor ligands, PSMA, endothelin, GCPII, somatostatin, LDL, and HDL ligands. In particular embodiments, the targeting group is an aptamer. The aptamer can be unmodified or have any combination of modifications disclosed herein.

[0633] In one embodiment, pharmaceutical compositions of the present invention may include chemical modifications such as, but not limited to, modifications similar to locked nucleic acids.

[0634] Representative U.S. patents that teach the preparation of locked nucleic acid (LNA) such as those from Santaris, include, but are not limited to, the following: U.S. Pat. Nos. 6,268,490; 6,670,461; 6,794,499; 6,998,484; 7,053,207; 7,084,125; and 7,399,845, each of which is herein incorporated by reference in its entirety.

[0635] Representative U.S. patents that teach the preparation of PNA compounds include, but are not limited to, U.S. Pat. Nos. 5,539,082; 5,714,331; and 5,719,262, each of which is herein incorporated by reference. Further teaching of PNA compounds can be found, for example, in Nielsen et al., Science, 1991, 254, 1497-1500.

[0636] Some embodiments featured in the invention include polynucleotides, primary constructs or mmRNA with phosphorothioate backbones and oligonucleosides with other modified backbones, and in particular —CH₂—NH—CH₂—, —CH₂—N(CH)—O—C₂— [known as a methylene (methylimino) or MM1 backbone], —CH₂—O—N(CH₃)—CH₂—, CH₂—N(CH₃)—N(CH₃)—CH₂— and —N(CH₃)—CH₂—CH— [wherein the native phosphodiester backbone is represented as —O—P(O)₂—O—CH₂—] of the above-referenced U.S. Pat. No. 5,489,677, and the amide backbones of the above-referenced U.S. Pat. No. 5,602,240. In some embodiments, the polynucleotides featured herein have morpholino backbone structures of the above-referenced U.S. Pat. No. 5,034,506.

[0637] Modifications at the 2′ position may also aid in delivery. Preferably, modifications at the 2′ position are not located in a polypeptide-coding sequence, i.e., not in a translatable region. Modifications at the 2 position may be located in a 5′UTR, a 3′UTR and/or a tailing region. Modifications at the 2′ position can include one of the following at the 2′ position: H (i.e., 2′-deoxy); F; O—, S—, or N-alkyl; O—, S—, or N-alkenyl; O—, S- or N-alkynyl; or O-alkyl-O-alkyl, wherein the alkyl, alkenyl and alkynyl may be substituted or unsubstituted C₁ to C₁₀ alkyl or C₂ to C₁₀ alkenyl and alkynyl. Exemplary suitable modifications include C[(CH₂)ₙO]ₘCH₃, O(CH₂)ₙOCH₃, O(CH₂)ₙNH₂, O(CH₂)ₙCH₃, O(CH₂)ₙONH₂, and O(CH₂)ₙON[(CH₂)ₙCH₃)]₂, where n and m are from 1 to about 10. In other embodiments, the polynucleotides, primary constructs or mmRNA include one of the following at the 2′ position: C₁ to C₁₀ lower alkyl, substituted lower alkyl, alkaryl, aralkyl, C-alkaryl or O-aralkyl, SH, SCH₃, OCN, Cl, Br, CN, CF₃, OCF₃, SOCH₃, SO₂CH₃, ONO₂, NO₂, N₃, NH, heterocycloalkyl, heterocycloalkaryl, aminoalkylamino, polyalkylamino, substituted silyl, an RNA cleaving group, a reporter group, an intercalator, a group for improving the pharmacokinetic properties, or a group for improving the pharmacodynamic properties, and other substituents having similar properties. In some embodiments, the modification includes a 2′-methoxyethoxy (2′-O—CH₂CH₂OCH₃, also known as 2′-O-(2-methoxyethyl) or 2′-MOE) (Martin et al., Helv. Chim Acta, 1995, 78:486-504) i.e., an alkoxy-alkoxy group. Another exemplary modification is 2′-dimethylaminooxyethoxy, i.e., a O(CH₂)₂ON(CH₃)₂ group, also known as 2′-DMAOE, as described in examples herein below, and 2′-dimethylaminoethoxyethoxy (also known in the art as 2′-O-dimethylaminoethoxyethyl or 2′-DMAEOE), i.e., 2′-O—CH₂—O—CH₂—N(CH₂)₂, also described in examples herein below. Other modifications include 2′-methoxy (2′-OCH₃), 2′-aminopropoxy (2′-OCH₂CH₂CH₂NH₂) and 2′-fluoro (2′-F). Similar modifications may also be made at other positions, particularly the 3′ position of the sugar on the 3′ terminal nucleotide or in 2′-5′ linked dsRNAs and the 5′ position of 5′ terminal nucleotide. Polynucleotides of the invention may also have sugar mimetics such as cyclobutyl moieties in place of the pentofuranosyl sugar. Representative U.S. patents that teach the preparation of such modified sugar structures include, but are not limited to, U.S. Pat. Nos. 4,981,957; 5,118,800; 5,319,080; 5,359,044; 5,393,878; 5,446,137; 5,466,786; 5,514,785; 5,519,134; 5,567,811; 5,576,427; 5,591,722; 5,597,909; 5,610,300; 5,627,053; 5,639,873; 5,646,265; 5,658,873; 5,670,633; and 5,700,920 and each of which is herein incorporated by reference.

[0638] In still other embodiments, the polynucleotide, primary construct, or mmRNA is covalently conjugated to a cell penetrating polypeptide. The cell-penetrating peptide may also include a signal sequence. The conjugates of the invention can be designed to have increased stability; increased cell transfection; and/or altered the biodistribution (e.g., targeted to specific tissues or cell types).

[0639] In one embodiment, the polynucleotides, primary constructs or mmRNA may be conjugated to an agent to enhance delivery. As a non-limiting example, the agent may be a monomer or polymer such as a targeting monomer or a polymer having targeting blocks as described in International Publication No. WO20 1062965, herein incorporated by reference in its entirety. In another non-limiting example, the agent may be a transport agent covalently coupled to the polynucleotides, primary constructs or mmRNA of the present invention (See e.g., U.S. Pat. Nos. 6,835,393 and 7,374,778, each of which is herein incorporated by reference in its entirety). In yet another non-limiting example, the agent may be a membrane barrier transport enhancing agent such as those described in U.S. Pat. Nos. 7,737,108 and 8,003,129, each of which is herein incorporated by reference in its entirety.

[0640] In another embodiment, polynucleotides, primary constructs or mmRNA may be conjugated to SMARTT POLYMER TECHNOLOGY● (PHASERX●, Inc. Seattle, WA).

### Self-Assembled Nanoparticles

### Nucleic Acid Self-Assembled Nanoparticles

[0641] Self-assembled nanoparticles have a well-defined size which may be precisely controlled as the nucleic acid strands may be easily reprogrammable. For example, the optimal particle size for a cancer-targeting nanodelivery carrier is 20-100 nm as a diameter greater than 20 nm avoids renal clearance and enhances delivery to certain tumors through enhanced permeability and retention effect. Using self-assembled nucleic acid nanoparticles a single uniform population in size and shape having a precisely controlled spatial orientation and density of cancer-targeting ligands for enhanced delivery. As a non-limiting example, oligonucleotide nanoparticles were prepared using programmable self-assembly of short DNA fragments and therapeutic siRNAs. These nanoparticles are molecularly identical with controllable particle size and target ligand location and density. The DNA fragments and siRNAs self-assembled into a one-step reaction to generate DNA/siRNA tetrahedral nanoparticles for targeted in vivo delivery. (Lee et al., Nature Nanotechnology 2012 7:389-393; herein incorporated by reference in its entirety).

[0642] In one embodiment, the polynucleotides, primary constructs and/or mmRNA disclosed herein may be formulated as self-assembled nanoparticles. As a non-limiting example, nucleic acids may be used to make nanoparticles which may be used in a delivery system for the polynucleotides, primary constructs and/or mmRNA of the present invention (See e.g., International Pub. No. WO2012125987; herein incorporated by reference in its entirety).

[0643] In one embodiment, the nucleic acid self-assembled nanoparticles may comprise a core of the polynucleotides, primary constructs or mmRNA disclosed herein and a polymer shell. The polymer shell may be any of the polymers described herein and are known in the art. In an additional embodiment, the polymer shell may be used to protect the polynucleotides, primary contructs and mmRNA in the core.

### Polymer-Based Self-Assembled Nanoparticles

[0644] Polymers may be used to form sheets which self-assembled into nanoparticles. These nanoparticles may be used to deliver the polynucleotides, primary constructs and mmRNA of the present invention. In one embodiment, these self-assembled nanoparticles may be microsponges formed of long polymers of RNA hairpins which form into crystalline ‘pleated’ sheets before self-assembling into microsponges. These microsponges are densely-packed sponge like microparticles which may function as an efficient carrier and may be able to deliver cargo to a cell. The microsponges may be from 1 um to 300 nm in diameter. The microsponges may be complexed with other agents known in the art to form larger microsponges. As a non-limiting example, the microsponge may be complexed with an agent to form an outer layer to promote cellular uptake such as polycation polyethyleneimine (PEI). This complex can form a 250-nm diameter particle that can remain stable at high temperatures (150° C.) (Grabow and Jaegar, Nature Materials 2012, 11:269-269; herein incorporated by reference in its entirety). Additionally these microsponges may be able to exhibit an extraordinary degree of protection from degradation by ribonucleases.

[0645] In another embodiment, the polymer-based self-assembled nanoparticles such as, but not limited to, microsponges, may be fully programmable nanoparticles. The geometry, size and stoichiometry of the nanoparticle may be precisely controlled to create the optimal nanoparticle for delivery of cargo such as, but not limited to, polynucleotides, primary constructs and/or mmRNA.

[0646] In one embodiment, the polymer based nanoparticles may comprise a core of the polynucleotides, primary constructs and/or mmRNA disclosed herein and a polymer shell. The polymer shell may be any of the polymers described herein and are known in the art. In an additional embodiment, the polymer shell may be used to protect the polynucleotides, primary construct and/or mmRNA in the core.

[0647] In yet another embodiment, the polymer based nanoparticle may comprise a non-nucleic acid polymer comprising a plurality of heterogenous monomers such as those described in International Publication No. WO2013009736, herein incorporated by reference in its entirety.

### Inorganic Nanoparticles

[0648] The polynucleotides, primary constructs and/or mmRNAs of the present invention may be formulated in inorganic nanoparticles (U.S. Pat. No. 8,257,745, herein incorporated by reference in its entirety). The inorganic nanoparticles may include, but are not limited to, clay substances that are water swellable. As a non-limiting example, the inorganic nanoparticle may include synthetic smectite clays which are made from simple silicates (See e.g., U.S. Pat. Nos. 5,585,108 and 8,257,745 each of which are herein incorporated by reference in their entirety).

[0649] In one embodiment, the inorganic nanoparticles may comprise a core of the modified nucleic acids disclosed herein and a polymer shell. The polymer shell may be any of the polymers described herein and are known in the art. In an additional embodiment, the polymer shell may be used to protect the modified nucleic acids in the core.

### Semi-Conductive and Metallic Nanoparticles

[0650] The polynucleotides, primary constructs and/or mmRNAs of the present invention may be formulated in water-dispersible nanoparticle comprising a semiconductive or metallic material (U.S. Pub. No. 20120228565; herein incorporated by reference in its entirety) or formed in a magnetic nanoparticle (U.S. Pub. No. 20120265001 and 20120283503; each of which is herein incorporated by reference in its entirety). The water-dispersible nanoparticles may be hydrophobic nanoparticles or hydrophilic nanoparticles.

[0651] In one embodiment, the semi-conductive and/or metallic nanoparticles may comprise a core of the polynucleotides, primary constructs and/or mmRNA disclos^{e}d herein and a polymer shell. The polymer shell may be any of the polymers described herein and are known in the art. In an additional embodiment, the polymer shell may be used to protect the polynucleotides, primary constructs and/or mmRNA in the core.

### Gels and Hydrogels

[0652] In one embodiment, the polynucleotides, primary constructs and/or mmRNA disclosed herein may be encapsulated into any hydrogel known in the art which may form a gel when injected into a subject. Hydrogels are a network of polymer chains that are hydrophilic, and are sometimes found as a colloidal gel in which water is the dispersion medium. Hydrogels are highly absorbent (they can contain over 99% water) natural or synthetic polymers. Hydrogels also possess a degree of flexibility very similar to natural tissue, due to their significant water content. The hydrogel described herein may used to encapsulate lipid nanoparticles which are biocompatible, biodegradable and/or porous.

[0653] As a non-limiting example, the hydrogel may be an aptamer-functionalized hydrogel. The aptamer-functionalized hydrogel may be programmed to release one or more polynucleotides, primary constructs and/or mmRNA using nucleic acid hybridization. (Battig et al., J. Am. Chem. Society. 2012 134:12410-12413; herein incorporated by reference in its entirety).

[0654] As another non-limiting example, the hydrogel may be a shaped as an inverted opal. The opal hydrogels exhibit higher swelling ratios and the swelling kinetics is an order of magnitude faster as well. Methods of producing opal hydrogels and description of opal hydrogels are described in International Pub. No. WO2012148684, herein incorporated by reference in its entirety.

[0655] In yet another non-limiting example, the hydrogel may be an antibacterial hydrogel. The antibacterial hydrogel may comprise a pharmaceutical acceptable salt or organic material such as, but not limited to pharmaceutical grade and/or medical grade silver salt and aloe vera gel or extract. (International Pub. No. WO2012151438, herein incorporated by reference in its entirety).

[0656] In one embodiment, the modified mRNA may be encapsulated in a lipid nanoparticle and then the lipid nanoparticle may be encapsulated into a hydrogel.

[0657] In one embodiment, the polynucleotides, primary constructs and/or mmRNA disclosed herein may be encapsulated into any gel known in the art. As a non-limiting example the gel may be a fluorouracil injectable gel or a fluorouracil injectable gel containing a chemical compound and/or drug known in the art. As another example, the polynucleotides, primary constructs and/or mmRNA may be encapsulated in a fluorouracil gel containing epinephrine (See e.g., Smith et al. Cancer Chemotherapy and Pharmacology, 1999 44(4):267-274; herein incorporated by reference in its entirety).

[0658] In one embodiment, the polynucleotides, primary constructs and/or mmRNA disclosed herein may be encapsulated into a fibrin gel, fibrin hydrogel or fibrin glue. In another embodiment, the polynucleotides, primary constructs and/or mmRNA may be formulated in a lipid nanoparticle or a rapidly eliminated lipid nanoparticle prior to being encapsulated into a fibrin gel, fibrin hydrogel or a fibrin glue. In yet another embodiment, the polynucleotides, primary constructs and/or mmRNA may be formulated as a lipoplex prior to being encapsulated into a fibrin gel, hydrogel or a fibrin glue. Fibrin gels, hydrogels and glues comprise two components, a fibrinogen solution and a thrombin solution which is rich in calcium (See e.g., Spicer and Mikos, Journal of Controlled Release 2010. 148: 49-55; Kidd et al. Journal of Controlled Release 2012. 157:80-85; each of which is herein incorporated by reference in its entirety). The concentration of the components of the fibrin gel, hydrogel and/or glue can be altered to change the characteristics, the network mesh size, and/or the degradation characteristics of the gel, hydrogel and/or glue such as, but not limited to changing the release characteristics of the fibrin gel, hydrogel and/or glue. (See e.g., Spicer and Mikos, Journal of Controlled Release 2010. 148: 49-55; Kidd et al. Journal of Controlled Release 2012. 157:80-85; Catelas et al. Tissue Engineering 2008. 14:119-128; each of which is herein incorporated by reference in its entirety). This feature may be advantageous when used to deliver the modified mRNA disclosed herein. (See e.g., Kidd et al. Journal of Controlled Release 2012. 157:80-85; Catelas et a. Tissue Engineering 2008. 14:119-128; each of which is herein incorporated by reference in its entirety).

### Cations and Anions

[0659] Formulations of polynucleotides, primary constructs and/or mmRNA disclosed herein may include cations or anions. In one embodiment, the formulations include metal cations such as, but not limited to, Zn2+, Ca2+, Cu2+, Mg+ and combinations thereof. As a non-limiting example, formulations may include polymers and a polynucleotides, primary constructs and/or mmRNA complexed with a metal cation (See e.g., U.S. Pat. Nos. 6,265,389 and 6,555,525, each of which is herein incorporated by reference in its entirety).

### Molded Nanoparticles and Microparticles

[0660] The polynucleotides, primary constructs and/or mmRNA disclosed herein may be formulated in nanoparticles and/or microparticles. These nanoparticles and/or microparticles may be molded into any size shape and chemistry. As an example, the nanoparticles and/or microparticles may be made using the PRINT● technology by LIQUIDA TECHNOLOGIES● (Morrisville, NC) (See e.g., International Pub. No. WO2007024323; herein incorporated by reference in its entirety).

[0661] In one embodiment, the molded nanoparticles may comprise a core of the polynucleotides, primary constructs and/or mmRNA disclosed herein and a polymer shell. The polymer shell may be any of the polymers described herein and are known in the art. In an additional embodiment, the polymer shell may be used to protect the polynucleotides, primary construct and/or mmRNA in the core.

### NanoJackets and NanoLiposomes

[0662] The polynucleotides, primary constructs and/or mmRNA disclosed herein may be formulated in NanoJackets and NanoLiposomes by Keystone Nano (State College, PA). NanoJackets are made of compounds that are naturally found in the body including calcium, phosphate and may also include a small amount of silicates. Nanojackets may range in size from 5 to 50 nm and may be used to deliver hydrophilic and hydrophobic compounds such as, but not limited to, polynucleotides, primary constructs and/or mmRNA.

[0663] NanoLiposomes are made of lipids such as, but not limited to, lipids which naturally occur in the body. NanoLiposomes may range in size from 60-80 nm and may be used to deliver hydrophilic and hydrophobic compounds such as, but not limited to, polynucleotides, primary constructs and/or mmRNA. In one aspect, the polynucleotides, primary constructs and/or mmRNA disclosed herein are formulated in a NanoLiposome such as, but not limited to, Ceramide NanoLiposomes.

### Excipients

[0664] Pharmaceutical formulations may additionally comprise a pharmaceutically acceptable excipient, which, as used herein, includes any and all solvents, dispersion media, diluents, or other liquid vehicles, dispersion or suspension aids, surface active agents, isotonic agents, thickening or emulsifying agents, preservatives, solid binders, lubricants and the like, as suited to the particular dosage form desired. Remington's The Science and Practice of Pharmacy, 21^{st} Edition, A. R. Gennaro (Lippincott., Williams & Wilkins, Baltimore, MD, 2006; incorporated herein by reference in its entirety) discloses various excipients used in formulating pharmaceutical compositions and known techniques for the preparation thereof. Except insofar as any conventional excipient medium is incompatible with a substance or its derivatives, such as by producing any undesirable biological effect or otherwise interacting in a deleterious manner with any other component(s) of the pharmaceutical composition, its use is contemplated to be within the scope of this invention.

[0665] In some embodiments, a pharmaceutically acceptable excipient is at least 95%, at least 96%, at least 97%, at least 98%, at least 99%, or 100% pure. In some embodiments, an excipient is approved for use in humans and for veterinary use. In some embodiments, an excipient is approved by United States Food and Drug Administration. In some embodiments, an excipient is pharmaceutical grade. In some embodiments, an excipient meets the standards of the United States Pharmacopoeia (USP), the European Pharmacopoeia (EP), the British Pharmacopoeia, and/or the International Pharmacopoeia.

[0666] Pharmaceutically acceptable excipients used in the manufacture of pharmaceutical compositions include, but are not limited to, inert diluents, dispersing and/or granulating agents, surface active agents and/or emulsifiers, disintegrating agents, binding agents, preservatives, buffering agents, lubricating agents, and/or oils. Such excipients may optionally be included in pharmaceutical compositions.

[0667] Exemplary diluents include, but are not limited to, calcium carbonate, sodium carbonate, calcium phosphate, dicalcium phosphate, calcium sulfate, calcium hydrogen phosphate, sodium phosphate lactose, sucrose, cellulose, microcrystalline cellulose, kaolin, mannitol, sorbitol, inositol, sodium chloride, dry starch, cornstarch, powdered sugar, etc., and/or combinations thereof.

[0668] Exemplary granulating and/or dispersing agents include, but are not limited to, potato starch, corn starch, tapioca starch, sodium starch glycolate, clays, alginic acid, guar gum, citrus pulp, agar, bentonite, cellulose and wood products, natural sponge, cation-exchange resins, calcium carbonate, silicates, sodium carbonate, cross-linked poly(vinyl-pyrrolidone) (crospovidone), sodium carboxymethyl starch (sodium starch glycolate), carboxymethyl cellulose, cross-linked sodium carboxymethyl cellulose (croscarmellose), methylcellulose, pregelatinized starch (starch 1500), microcrystalline starch, water insoluble starch, calcium carboxymethyl cellulose, magnesium aluminum silicate (VEEGUM●), sodium lauryl sulfate, quaternary ammonium compounds, etc., and/or combinations thereof.

[0669] Exemplary surface active agents and/or emulsifiers include, but are not limited to, natural emulsifiers (e.g. acacia, agar, alginic acid, sodium alginate, tragacanth, chondrux, cholesterol, xanthan, pectin, gelatin, egg yolk, casein, wool fat, cholesterol, wax, and lecithin), colloidal clays (e.g. bentonite [aluminum silicate] and VEEGUM● [magnesium aluminum silicate]), long chain amino acid derivatives, high molecular weight alcohols (e.g. stearyl alcohol, cetyl alcohol, oleyl alcohol, triacetin monostearate, ethylene glycol distearate, glyceryl monostearate, and propylene glycol monostearate, polyvinyl alcohol), carbomers (e.g. carboxy polymethylene, polyacrylic acid, acrylic acid polymer, and carboxyvinyl polymer), carrageenan, cellulosic derivatives (e.g. carboxymethylcellulose sodium, powdered cellulose, hydroxymethyl cellulose, hydroxypropyl cellulose, hydroxypropyl methylcellulose, methylcellulose), sorbitan fatty acid esters (e.g. polyoxyethylene sorbitan monolaurate [TWEEN●20], polyoxyethylene sorbitan [TWEENn●60], polyoxyethylene sorbitan monooleate [TWEEN●80], sorbitan monopalmitate [SPAN●40], sorbitan monostearate [SPAN●60], sorbitan tristearate [SPAN●65], glyceryl monooleate, sorbitan monooleate [SPAN●80]), polyoxyethylene esters (e.g. polyoxyethylene monostearate [MYRJ●45], polyoxyethylene hydrogenated castor oil, polyethoxylated castor oil, polyoxymethylene stearate, and SOLUTOL●), sucrose fatty acid esters, polyethylene glycol fatty acid esters (e.g. CREMOPHOR●), polyoxyethylene ethers, (e.g. polyoxyethylene lauryl ether [BRUJ●30]), poly(vinyl-pyrrolidone), diethylene glycol monolaurate, triethanolamine oleate, sodium oleate, potassium oleate, ethyl oleate, oleic acid, ethyl laurate, sodium lauryl sulfate, PLUORINC●F 68, POLOXAMER●188, cetrimonium bromide, cetylpyridinium chloride, benzalkonium chloride, docusate sodium, etc. and/or combinations thereof.

[0670] Exemplary binding agents include, but are not limited to, starch (e.g. cornstarch and starch paste); gelatin; sugars (e.g. sucrose, glucose, dextrose, dextrin, molasses, lactose, lactitol, mannitol,); natural and synthetic gums (e.g. acacia, sodium alginate, extract of Irish moss, panwar gum, ghatti gum, mucilage of isapol husks, carboxymethylcellulose, methylcellulose, ethylcellulose, hydroxyethylcellulose, hydroxypropyl cellulose, hydroxypropyl methylcellulose, microcrystalline cellulose, cellulose acetate, poly(vinyl-pyrrolidone), magnesium aluminum silicate (Veegum●), and larch arabogalactan); alginates; polyethylene oxide; polyethylene glycol; inorganic calcium salts; silicic acid; polymethacrylates; waxes; water; alcohol; etc.; and combinations thereof.

[0671] Exemplary preservatives may include, but are not limited to, antioxidants, chelating agents, antimicrobial preservatives, antifungal preservatives, alcohol preservatives, acidic preservatives, and/or other preservatives. Exemplary antioxidants include, but are not limited to, alpha tocopherol, ascorbic acid, acorbyl palmitate, butylated hydroxyanisole, butylated hydroxytoluene, monothioglycerol, potassium metabisulfite, propionic acid, propyl gallate, sodium ascorbate, sodium bisulfite, sodium metabisulfite, and/or sodium sulfite. Exemplary chelating agents include ethylenediaminetetraacetic acid (EDTA), citric acid monohydrate, disodium edetate, dipotassium edetate, edetic acid, fumaric acid, malic acid, phosphoric acid, sodium edetate, tartaric acid, and/or trisodium edetate. Exemplary antimicrobial preservatives include, but are not limited to, benzalkonium chloride, benzethonium chloride, benzyl alcohol, bronopol, cetrimide, cetylpyridinium chloride, chlorhexidine, chlorobutanol, chlorocresol, chloroxylenol, cresol, ethyl alcohol, glycerin, hexetidine, imidurea, phenol, phenoxyethanol, phenylethyl alcohol, phenylmercuric nitrate, propylene glycol, and/or thimerosal. Exemplary antifungal preservatives include, but are not limited to, butyl paraben, methyl paraben, ethyl paraben, propyl paraben, benzoic acid, hydroxybenzoic acid, potassium benzoate, potassium sorbate, sodium benzoate, sodium propionate, and/or sorbic acid. Exemplary alcohol preservatives include, but are not limited to, ethanol, polyethylene glycol, phenol, phenolic compounds, bisphenol, chlorobutanol, hydroxybenzoate, and/or phenylethyl alcohol. Exemplary acidic preservatives include, but are not limited to, vitamin A, vitamin C, vitamin E, beta-carotene, citric acid, acetic acid, dehydroacetic acid, ascorbic acid, sorbic acid, and/or phytic acid. Other preservatives include, but are not limited to, tocopherol, tocopherol acetate, deteroxime mesylate, cetrimide, butylated hydroxyanisol (BHA), butylated hydroxytoluened (BHT), ethylenediamine, sodium lauryl sulfate (SLS), sodium lauryl ether sulfate (SLES), sodium bisulfite, sodium metabisulfite, potassium sulfite, potassiumr metabisulfite, GLYDANT PLUS●, PHENONIP●, methylparaben, GERMALL●115, GERMABEN●II, NEOLONE™, KATHON™, and/or EUXYL●.

[0672] Exemplary buffering agents include, but are not limited to, citrate buffer solutions, acetate buffer solutions, phosphate buffer solutions, ammonium chloride, calcium carbonate, calcium chloride, calcium citrate, calcium glubionate, calcium gluceptate, calcium gluconate, D-gluconic acid, calcium glycerophosphate, calcium lactate, propanoic acid, calcium levulinate, pentanoic acid, dibasic calcium phosphate, phosphoric acid, tribasic calcium phosphate, calcium hydroxide phosphate, potassium acetate, potassium chloride, potassium gluconate, potassium mixtures, dibasic potassium phosphate, monobasic potassium phosphate, potassium phosphate mixtures, sodium acetate, sodium bicarbonate, sodium chloride, sodium citrate, sodium lactate, dibasic sodium phosphate, monobasic sodium phosphate, sodium phosphate mixtures, tromethamine, magnesium hydroxide, aluminum hydroxide, alginic acid, pyrogen-free water, isotonic saline, Ringer's solution, ethyl alcohol, etc., and/or combinations thereof.

[0673] Exemplary lubricating agents include, but are not limited to, magnesium stearate, calcium stearate, stearic acid, silica, tale, malt, glyceryl behenate, hydrogenated vegetable oils, polyethylene glycol, sodium benzoate, sodium acetate, sodium chloride, leucine, magnesium lauryl sulfate, sodium lauryl sulfate, etc., and combinations thereof.

[0674] Exemplary oils include, but are not limited to, almond, apricot kernel, avocado, babassu, bergamot, black current seed, borage, cade, camomile, canola, caraway, carnauba, castor, cinnamon, cocoa butter, coconut, cod liver, coffee, corn, cotton seed, emu, eucalyptus, evening primrose, fish, flaxseed, geraniol, gourd, grape seed, hazel nut, hyssop, isopropyl myristate, jojoba, kukui nut, lavandin, lavender, lemon, litsea cubeba, macademia nut, mallow, mango seed, meadowfoamn seed, mink, nutmeg, olive, orange, orange roughy, palm, palm kernel, peach kernel, peanut, poppy seed, pumpkin seed, rapeseed, rice bran, rosemary, safflower, sandalwood, sasquana, savoury, sea buckthorn, sesame, shea butter, silicone, soybean, sunflower, tea tree, thistle, tsubaki, vetiver, walnut, and wheat germ oils. Exemplary oils include, but are not limited to, butyl stearate, caprylic triglyceride, capric triglyceride, cyclomethicone, diethyl sebacate, dimethicone 360, isopropyl myristate, mineral oil, octyldodecanol, oleyl alcohol, silicone oil, and/or combinations thereof.

[0675] Excipients such as cocoa butter and suppository waxes, coloring agents, coating agents, sweetening, flavoring, and/or perfuming agents can be present in the composition, according to the judgment of the formulator.

### Delivery

[0676] The present disclosure encompasses the delivery of polynucleotides, primary constructs or mmRNA for any of therapeutic, pharmaceutical, diagnostic or imaging by any appropriate route taking into consideration likely advances in the sciences of drug delivery. Delivery may be naked or formulated.

### Naked Delivery

[0677] The polynucleotides, primary constructs or mmRNA of the present invention may be delivered to a cell naked. As used herein in, “naked” refers to delivering polynucleotides, primary constructs or mmRNA free from agents which promote transfection. For example, the polynucleotides, primary constructs or mmRNA, delivered to the cell may contain no modifications. The naked polynucleotides, primary constructs or mmRNA may be delivered to the cell using routes of administration known in the art and described herein.

### Formulated Delivery

[0678] The polynucleotides, primary constructs or mmRNA of the present invention may be formulated, using the methods described herein. The formulations may contain polynucleotides, primary constructs or mmRNA which may be modified and/or unmodified. The formulations may further include, but are not limited to, cell penetration agents, a pharmaceutically acceptable carrier, a delivery agent, a bioerodible or biocompatible polymer, a solvent, and a sustained-release delivery depot. The formulated polynucleotides, primary constructs or mmRNA may be delivered to the cell using routes of administration known in the art and described herein.

[0679] The compositions may also be formulated for direct delivery to an organ or tissue in any of several ways in the art including, but not limited to, direct soaking or bathing, via a catheter, by gels, powder, ointments, creams, gels, lotions, and/or drops, by using substrates such as fabric or biodegradable materials coated or impregnated with the compositions, and the like.

### Administration

[0680] The polynucleotides, primary constructs or mmRNA of the present invention may be administered by any route which results in a therapeutically effective outcome. These include, but are not limited to enteral, gastroenteral, epidural, oral, transdermal, epidural (peridural), intracerebral (into the cerebrum), intracerebroventricular (into the cerebral ventricles), epicutaneous (application onto the skin), intradermal, (into the skin itself), subcutaneous (under the skin), nasal administration (through the nose), intravenous (into a vein), intraarterial (into an artery), intramuscular (into a muscle), intracardiac (into the heart), intraosseous infusion (into the bone marrow), intrathecal (into the spinal canal), intraperitoneal, (infusion or injection into the peritoneum), intravesical infusion, intravitreal, (through the eye), intracavernous injection, (into the base of the penis), intravaginal administration, intrauterine, extra-amniotic administration, transdermal (diffusion through the intact skin for systemic distribution), transmucosal (diffusion through a mucous membrane), insufflation (snorting), sublingual, sublabial, enema, eye drops (onto the conjunctiva), or in ear drops. In specific embodiments, compositions may be administered in a way which allows them cross the blood-brain barrier, vascular barrier, or other epithelial barrier. Non-limiting routes of administration for the polynucleotides, primary constructs or mmRNA of the present invention are described below.

### Parenteral and Injectable Administration

[0681] Liquid dosage forms for parenteral administration include, but are not limited to, pharmaceutically acceptable emulsions, microemulsions, solutions, suspensions, syrups, and/or elixirs. In addition to active ingredients, liquid dosage forms may comprise inert diluents commonly used in the art such as, for example, water or other solvents, solubilizing agents and emulsifiers such as ethyl alcohol, isopropyl alcohol, ethyl carbonate, ethyl acetate, benzyl alcohol, benzyl benzoate, propylene glycol, 1,3-butylene glycol, dimethylformamide, oils (in particular, cottonseed, groundnut, corn, germ, olive, castor, and sesame oils), glycerol, tetrahydrofurfuryl alcohol, polyethylene glycols and fatty acid esters of sorbitan, and mixtures thereof. Besides inert diluents, oral compositions can include adjuvants such as wetting agents, emulsifying and suspending agents, sweetening, flavoring, and/or perfuming agents. In certain embodiments for parenteral administration, compositions are mixed with solubilizing agents such as CREMOPHOR●, alcohols, oils, modified oils, glycols, polysorbates, cyclodextrins, polymers, and/or combinations thereof.

[0682] Injectable preparations, for example, sterile injectable aqueous or oleaginous suspensions may be formulated according to the known art using suitable dispersing agents, wetting agents, and/or suspending agents. Sterile injectable preparations may be sterile injectable solutions, suspensions, and/or emulsions in nontoxic parenterally acceptable diluents and/or solvents, for example, as a solution in 1,3-butanediol. Among the acceptable vehicles and solvents that may be employed are water, Ringer's solution, U.S.P., and isotonic sodium chloride solution. Sterile, fixed oils are conventionally employed as a solvent or suspending medium. For this purpose any bland fixed oil can be employed including synthetic mono- or diglycerides. Fatty acids such as oleic acid can be used in the preparation of injectables.

[0683] Injectable formulations can be sterilized, for example, by filtration through a bacterial-retaining filter, and/or by incorporating sterilizing agents in the form of sterile solid compositions which can be dissolved or dispersed in sterile water or other sterile injectable medium prior to use.

[0684] In order to prolong the effect of an active ingredient, it is often desirable to slow the absorption of the active ingredient from subcutaneous or intramuscular injection. This may be accomplished by the use of a liquid suspension of crystalline or amorphous material with poor water solubility. The rate of absorption of the drug then depends upon its rate of dissolution which, in turn, may depend upon crystal size and crystalline form. Alternatively, delayed absorption of a parenterally administered drug form is accomplished by dissolving or suspending the drug in an oil vehicle. Injectable depot forms are made by forming microencapsule matrices of the drug in biodegradable polymers such as polylactide-polyglycolide. Depending upon the ratio of drug to polymer and the nature of the particular polymer employed, the rate of drug release can be controlled. Examples of other biodegradable polymers include poly(orthoesters) and poly(anhydrides). Depot injectable formulations are prepared by entrapping the drug in liposomes or microemulsions which are compatible with body tissues.

### Rectal and Vaginal Administration

[0685] Compositions for rectal or vaginal administration are typically suppositories which can be prepared by mixing compositions with suitable non-irritating excipients such as cocoa butter, polyethylene glycol or a suppository wax which are solid at ambient temperature but liquid at body temperature and therefore melt in the rectum or vaginal cavity and release the active ingredient.

### Oral Administration

[0686] Liquid dosage forms for oral administration include, but are not limited to, pharmaceutically acceptable emulsions, microemulsions, solutions, suspensions, syrups, and/or elixirs. In addition to active ingredients, liquid dosage forms may comprise inert diluents commonly used in the art such as, for example, water or other solvents, solubilizing agents and emulsifiers such as ethyl alcohol, isopropyl alcohol, ethyl carbonate, ethyl acetate, benzyl alcohol, benzyl benzoate, propylene glycol, 1,3-butylene glycol, dimethylformamide, oils (in particular, cottonseed, groundnut, corn, germ, olive, castor, and sesame oils), glycerol, tetrahydrofurfuryl alcohol, polyethylene glycols and fatty acid esters of sorbitan, and mixtures thereof. Besides inert diluents, oral compositions can include adjuvants such as wetting agents, emulsifying and suspending agents, sweetening, flavoring, and/or perfuming agents. In certain embodiments for parenteral administration, compositions are mixed with solubilizing agents such as CREMOPHOR, alcohols, oils, modified oils, glycols, polysorbates, cyclodextrins, polymers, and/or combinations thereof.

[0687] Solid dosage forms for oral administration include capsules, tablets, pills, powders, and granules. In such solid dosage forms, an active ingredient is mixed with at least one inert, pharmaceutically acceptable excipient such as sodium citrate or dicalcium phosphate and/or fillers or extenders (e.g. starches, lactose, sucrose, glucose, mannitol, and silicic acid), binders (e.g. carboxymethylcellulose, alginates, gelatin, polyvinylpyrrolidinone, sucrose, and acacia), humectants (e.g. glycerol), disintegrating agents (e.g. agar, calcium carbonate, potato or tapioca starch, alginic acid, certain silicates, and sodium carbonate), solution retarding agents (e.g. paraffin), absorption accelerators (e.g. quaternary ammonium compounds), wetting agents (e.g. cetyl alcohol and glycerol monostearate), absorbents (e.g. kaolin and bentonite clay), and lubricants (e.g. talc, calcium stearate, magnesium stearate, solid polyethylene glycols, sodium lauryl sulfate), and mixtures thereof. In the case of capsules, tablets and pills, the dosage form may comprise buffering agents.

### Topical or Transdermal Administration

[0688] As described herein, compositions containing the polynucleotides, primary constructs or mmRNA of the invention may be formulated for administration topically. The skin may be an ideal target site for delivery as it is readily accessible. Gene expression may be restricted not only to the skin, potentially avoiding nonspecific toxicity, but also to specific layers and cell types within the skin.

[0689] The site of cutaneous expression of the delivered compositions will depend on the route of nucleic acid delivery. Three routes are commonly considered to deliver polynucleotides, primary constructs or mmRNA to the skin: (i) topical application (e.g. for local/regional treatment and/or cosmetic applications); (ii) intradermal injection (e.g. for local/regional treatment and/or cosmetic applications); and (iii) systemic delivery (e.g. for treatment of dermatologic diseases that affect both cutaneous and extracutaneous regions). Polynucleotides, primary constructs or mmRNA can be delivered to the skin by several different approaches known in the art. Most topical delivery approaches have been shown to work for delivery of DNA, such as but not limited to, topical application of non-cationic liposome-DNA complex, cationic liposome-DNA complex, particle-mediated (gene gun), puncture-mediated gene transfections, and viral delivery approaches. After delivery of the nucleic acid, gene products have been detected in a number of different skin cell types, including, but not limited to, basal keratinocytes, sebaceous gland cells, dermal fibroblasts and dermal macrophages.

[0690] In one embodiment, the invention provides for a variety of dressings (e.g., wound dressings) or bandages (e.g., adhesive bandages) for conveniently and/or effectively carrying out methods of the present invention. Typically dressing or bandages may comprise sufficient amounts of pharmaceutical compositions and/or polynucleotides, primary constructs or mmRNA described herein to allow a user to perform multiple treatments of a subject(s).

[0691] In one embodiment, the invention provides for the polynucleotides, primary constructs or mmRNA compositions to be delivered in more than one injection.

[0692] In one embodiment, before topical and/or transdermal administration at least one area of tissue, such as skin, may be subjected to a device and/or solution which may increase permeability. In one embodiment, the tissue may be subjected to an abrasion device to increase the permeability of the skin (see U.S. Patent Publication No. 20080275468, herein incorporated by reference in its entirety). In another embodiment, the tissue may be subjected to an ultrasound enhancement device. An ultrasound enhancement device may include, but is not limited to, the devices described in U.S. Publication No. 20040236268 and U.S. Pat. Nos. 6,491,657 and 6,234,990; each of which are herein incorporated by reference in their entireties. Methods of enhancing the permeability of tissue are described in U.S. Publication Nos. 20040171980 and 20040236268 and U.S. Pat. No. 6,190,315; each of which are herein incorporated by reference in their entireties.

[0693] In one embodiment, a device may be used to increase permeability of tissue before delivering formulations of modified mRNA described herein. The permeability of skin may be measured by methods known in the art and/or described in U.S. Pat. No. 6,190,315, herein incorporated by reference in its entirety. As a non-limiting example, a modified mRNA formulation may be delivered by the drug delivery methods described in U.S. Pat. No. 6,190,315, herein incorporated by reference in its entirety.

[0694] In another non-limiting example tissue may be treated with a eutectic mixture of local anesthetics (EMLA) cream before, during and/or after the tissue may be subjected to a device which may increase permeability. Katz et al. (Anesth Anaig (2004); 98:371-76; herein incorporated by reference in its entirety) showed that using the EMLA cream in combination with a low energy, an onset of superficial cutaneous analgesia was seen as fast as 5 minutes after a pretreatment with a low energy ultrasound.

[0695] In one embodiment, enhancers may be applied to the tissue before, during, and/or after the tissue has been treated to increase permeability. Enhancers include, but are not limited to, transport enhancers, physical enhancers, and cavitation enhancers. Non-limiting examples of enhancers are described in U.S. Pat. No. 6,190,315, herein incorporated by reference in its entirety.

[0696] In one embodiment, a device may be used to increase permeability of tissue before delivering formulations of modified mRNA described herein, which may further contain a substance that invokes an immune response. In another non-limiting example, a formulation containing a substance to invoke an immune response may be delivered by the methods described in U.S. Publication Nos. 20040171980 and 20040236268; each of which are herein incorporated by reference in their entireties.

[0697] Dosage forms for topical and/or transdermal administration of a composition may include ointments, pastes, creams, lotions, gels, powders, solutions, sprays, inhalants and/or patches. Generally, an active ingredient is admixed under sterile conditions with a pharmaceutically acceptable excipient and/or any needed preservatives and/or buffers as may be required.

[0698] Additionally, the present invention contemplates the use of transdermal patches, which often have the added advantage of providing controlled delivery of a compound to the body. Such dosage forms may be prepared, for example, by dissolving and/or dispensing the compound in the proper medium. Alternatively or additionally, rate may be controlled by either providing a rate controlling membrane and/or by dispersing the compound in a polymer matrix and/or gel.

[0699] Formulations suitable for topical administration include, but are not limited to, liquid and/or semi liquid preparations such as liniments, lotions, oil in water and/or water in oil emulsions such as creams, ointments and/or pastes, and/or solutions and/or suspensions.

[0700] Topically-administrable formulations may, for example, comprise from about 0.1% to about 10% (w/w) active ingredient, although the concentration of active ingredient may be as high as the solubility limit of the active ingredient in the solvent. Formulations for topical administration may further comprise one or more of the additional ingredients described herein.

### Depot Administration

[0701] As described herein, in some embodiments, the composition is formulated in depots for extended release. Generally, a specific organ or tissue (a “target tissue”) is targeted for administration.

[0702] In some aspects of the invention, the polynucleotides, primary constructs or mmRNA are spatially retained within or proximal to a target tissue. Provided are method of providing a composition to a target tissue of a mammalian subject by contacting the target tissue (which contains one or more target cells) with the composition under conditions such that the composition, in particular the nucleic acid component(s) of the composition, is substantially retained in the target tissue, meaning that at least 10, 20, 30, 40, 50, 60, 70, 80, 85, 90, 95, 96, 97, 98, 99, 99.9, 99.99 or greater than 99.99% of the composition is retained in the target tissue. Advantageously, retention is determined by measuring the amount of the nucleic acid present in the composition that enters one or more target cells. For example, at least 1, 5, 10, 20, 30, 40, 50, 60, 70, 80, 85, 90, 95, 96, 97, 98, 99, 99.9, 99.99 or greater than 99.99% of the nucleic acids administered to the subject are present intracellularly at a period of time following administration. For example, intramuscular injection to a mammalian subject is performed using an aqueous composition containing a ribonucleic acid and a transfection reagent, and retention of the composition is determined by measuring the amount of the ribonucleic acid present in the muscle cells.

[0703] Aspects of the invention are directed to methods of providing a composition to a target tissue of a mammalian subject, by contacting the target tissue (containing one or more target cells) with the composition under conditions such that the composition is substantially retained in the target tissue. The composition contains an effective amount of a polynucleotides, primary constructs or mmRNA such that the polypeptide of interest is produced in at least one target cell. The compositions generally contain a cell penetration agent, although “naked” nucleic acid (such as nucleic acids without a cell penetration agent or other agent) is also contemplated, and a pharmaceutically acceptable Carrier.

[0704] In some circumstances, the amount of a protein produced by cells in a tissue is desirably increased. Preferably, this increase in protein production is spatially restricted to cells within the target tissue. Thus, provided are methods of increasing production of a protein of interest in a tissue of a mammalian subject. A composition is provided that contains polynucleotides, primary constructs or mmRNA characterized in that a unit quantity of composition has been determined to produce the polypeptide of interest in a substantial percentage of cells contained within a predetermined volume of the target tissue.

[0705] In some embodiments, the composition includes a plurality of different polynucleotides, primary constructs or mmRNA, where one or more than one of the polynucleotides, primary constructs or mmRNA encodes a polypeptide of interest. Optionally, the composition also contains a cell penetration agent to assist in the intracellular delivery of the composition. A determination is made of the dose of the composition required to produce the polypeptide of interest in a substantial percentage of cells contained within the predetermined volume of the target tissue (generally, without inducing significant production of the polypeptide of interest in tissue adjacent to the predetermined volume, or distally to the target tissue). Subsequent to this determination, the determined dose is introduced directly into the tissue of the mammalian subject.

[0706] In one embodiment, the invention provides for the polynucleotides, primary constructs or mmRNA to be delivered in more than one injection or by split dose injections.

[0707] In one embodiment, the invention may be retained near target tissue using a small disposable drug reservoir, patch pump or osmotic pump. Non-limiting examples of patch pumps include those manufactured and/or sold by BD● (Franklin Lakes, NJ), Insulet Corporation (Bedford, MA), SteadyMed Therapeutics (San Francisco, CA), Medtronic (Minneapolis, MN) (e.g., MiniMed), UniLife (York, PA), Valeritas (Bridgewater, NJ), and SpringLeaf Therapeutics (Boston, MA). A non-limiting example of an osmotic pump include those manufactured by DURECT● (Cupertino, CA) (e.g., DUROS● and ALZET●).

### Pulmonary Administration

[0708] A pharmaceutical composition may be prepared, packaged, and/or sold in a formulation suitable for pulmonary administration via the buccal cavity. Such a formulation may comprise dry particles which comprise the active ingredient and which have a diameter in the range from about 0.5 nm to about 7 nm or from about 1 nm to about 6 nm. Such compositions are suitably in the form of dry powders for administration using a device comprising a dry powder reservoir to which a stream of propellant may be directed to disperse the powder and/or using a self propelling solvent/powder dispensing container such as a device comprising the active ingredient dissolved and/or suspended in a low-boiling propellant in a sealed container. Such powders comprise particles wherein at least 98% of the particles by weight have a diameter greater than 0.5 nm and at least 95% of the particles by number have a diameter less than 7 nm. Alternatively, at least 95% of the particles by weight have a diameter greater than 1 nm and at least 90% of the particles by number have a diameter less than 6 nm. Dry powder compositions may include a solid fine powder diluent such as sugar and are conveniently provided in a unit dose form.

[0709] Low boiling propellants generally include liquid propellants having a boiling point of below 65° F. at atmospheric pressure. Generally the propellant may constitute 50% to 99.9% (w/w) of the composition, and active ingredient may constitute 0.1% to 20% (w/w) of the composition. A propellant may further comprise additional ingredients such as a liquid non-ionic and/or solid anionic surfactant and/or a solid diluent (which may have a particle size of the same order as particles comprising the active ingredient).

[0710] As a non-limiting example, the polynucleotides, primary constructs and/or mmRNA described herein may be formulated for pulmonary delivery by the methods described in U.S. Pat. No. 8,257,685; herein incorporated by reference in its entirety.

[0711] Pharmaceutical compositions formulated for pulmonary delivery may provide an active ingredient in the form of droplets of a solution and/or suspension. Such formulations may be prepared, packaged, and/or sold as aqueous and/or dilute alcoholic solutions and/or suspensions, optionally sterile, comprising active ingredient, and may conveniently be administered using any nebulization and/or atomization device. Such formulations may further comprise one or more additional ingredients including, but not limited to, a flavoring agent such as saccharin sodium, a volatile oil, a buffering agent, a surface active agent, and/or a preservative such as methylhydroxybenzoate. Droplets provided by this route of administration may have an average diameter in the range from about 0.1 nm to about 200 nm.

### Intranasal, Nasal and Buccal Administration

[0712] Formulations described herein as being useful for pulmonary delivery are useful for intranasal delivery of a pharmaceutical composition. Another formulation suitable for intranasal administration is a coarse powder comprising the active ingredient and having an average particle from about 0.2 μm to 500 μm. Such a formulation is administered in the manner in which snuff is taken, i.e. by rapid inhalation through the nasal passage from a container of the powder held close to the nose.

[0713] Formulations suitable for nasal administration may, for example, comprise from about as little as 0.1% (w/w) and as much as 100% (w/w) of active ingredient, and may comprise one or more of the additional ingredients described herein. A pharmaceutical composition may be prepared, packaged, and/or sold in a formulation suitable for buccal administration. Such formulations may, for example, be in the form of tablets and/or lozenges made using conventional methods, and may, for example, 0.1% to 20% (w/w) active ingredient, the balance comprising an orally dissolvable and/or degradable composition and, optionally, one or more of the additional ingredients described herein. Alternately, formulations suitable for buccal administration may comprise a powder and/or an aerosolized and/or atomized solution and/or suspension comprising active ingredient. Such powdered, aerosolized, and/or aerosolized formulations, when dispersed, may have an average particle and/or droplet size in the range from about 0.1 nm to about 200 nm, and may further comprise one or more of any additional ingredients described herein.

### Ophthalmic Administration

[0714] A pharmaceutical composition may be prepared, packaged, and/or sold in a formulation suitable for ophthalmic administration. Such formulations may, for example, be in the form of eye drops including, for example, a 0.1/1 0.0% (w/w) solution and/or suspension of the active ingredient in an aqueous or oily liquid excipient. Such drops may further comprise buffering agents, salts, and/or one or more other of any additional ingredients described herein. Other ophthalmically-administrable formulations which are useful include those which comprise the active ingredient in microcrystalline form and/or in a liposomal preparation. Ear drops and/or eye drops are contemplated as being within the scope of this invention. A multilayer thin film device may be prepared to contain a pharmaceutical composition for delivery to the eye and/or surrounding tissue.

Payload Administration. Detectable Agents and Therapeutic Agents

[0715] The polynucleotides, primary constructs or mmRNA described herein can be used in a number of different scenarios in which delivery of a substance (the “payload”) to a biological target is desired, for example delivery of detectable substances for detection of the target, or delivery of a therapeutic agent. Detection methods can include, but are not limited to, both imaging in vitro and in vivo imaging methods, e.g., immunohistochemistry, bioluminescence imaging (BLI), Magnetic Resonance Imaging (MRI), positron emission tomography (PET), electron microscopy, X-ray computed tomography, Raman imaging, optical coherence tomography, absorption imaging, thermal imaging, fluorescence reflectance imaging, fluorescence microscopy, fluorescence molecular tomographic imaging, nuclear magnetic resonance imaging, X-ray imaging, ultrasound imaging, photoacoustic imaging, lab assays, or in any situation where tagging/staining/imaging is required.

[0716] The polynucleotides, primary constructs or mmRNA can be designed to include both a linker and a payload in any useful orientation. For example, a linker having two ends is used to attach one end to the payload and the other end to the nucleobase, such as at the C-7 or C-8 positions of the deaza-adenosine or deaza-guanosine or to the N-3 or C-5 positions of cytosine or uracil. The polynucleotide of the invention can include more than one payload (e.g., a label and a transcription inhibitor), as well as a cleavable linker. In one embodiment, the modified nucleotide is a modified 7-deaza-adenosine triphosphate, where one end of a cleavable linker is attached to the C7 position of 7-deaza-adenine, the other end of the linker is attached to an inhibitor (e.g., to the C5 position of the nucleobase on a cytidine), and a label (e.g., Cy5) is attached to the center of the linker (see, e.g., compound 1 of A*pCp C5 Parg Capless in FIG. 5 and columns 9 and 10 of U.S. Pat. No. 7,994,304, incorporated herein by reference). Upon incorporation of the modified 7-deaza-adenosine triphosphate to an encoding region, the resulting polynucleotide having a cleavable linker attached to a label and an inhibitor (e.g., a polymerase inhibitor). Upon cleavage of the linker (e.g., with reductive conditions to reduce a linker having a cleavable disulfide moiety), the label and inhibitor are released. Additional linkers and payloads (e.g., therapeutic agents, detectable labels, and cell penetrating payloads) are described herein.

[0717] Scheme 12 below depicts an exemplary modified nucleotide wherein the nucleobase, adenine, is attached to a linker at the C-7 carbon of 7-deaza adenine. In addition, Scheme 12 depicts the modified nucleotide with the linker and payload, e.g., a detectable agent, incorporated onto the 3′ end of the mRNA. Disulfide cleavage and 1,2-addition of the thiol group onto the propargyl ester releases the detectable agent. The remaining structure (depicted, for example, as pApC5Parg in Scheme 12) is the inhibitor. The rationale for the structure of the modified nucleotides is that the tethered inhibitor sterically interferes with the ability of the polymerase to incorporate a second base. Thus, it is critical that the tether be long enough to affect this function and that the inhibiter be in a stereochemical orientation that inhibits or prohibits second and follow on nucleotides into the growing polynucleotide strand.

[chemical structure]

[chemical structure]

[0718] For example, the polynucleotides, primary constructs or mmRNA described herein can be used in reprogramming induced pluripotent stem cells (iPS cells), which can directly track cells that are transfected compared to total cells in the cluster. In another example, a drug that may be attached to the polynucleotides, primary constructs or mmRNA via a linker and may be fluorescently labeled can be used to track the drug in vivo, e.g. intracellularly, Other examples include, but are not limited to, the use of a polynucleotides, primary constructs or mmRNA in reversible drug delivery into cells.

[0719] The polynucleotides, primary constructs or mmRNA described herein can be used in intracellular targeting of a payload, e.g., detectable or therapeutic agent, to specific organelle. Exemplary intracellular targets can include, but are not limited to, the nuclear localization for advanced mRNA processing, or a nuclear localization sequence (NLS) linked to the mRNA containing an inhibitor.

[0720] In addition, the polynucleotides, primary constructs or mmRNA described herein can be used to deliver therapeutic agents to cells or tissues, e.g., in living animals. For example, the polynucleotides, primary constructs or mmRNA described herein can be used to deliver highly polar chemotherapeutics agents to kill cancer cells. The polynucleotides, primary constructs or mmRNA attached to the therapeutic agent through a linker can facilitate member permeation allowing the therapeutic agent to travel into a cell to reach an intracellular target.

[0721] In one example, the linker is attached at the 2′-position of the ribose ring and/or at the 3′ and/or 5′ position of the polynucleotides, primary constructs mmRNA (See e.g., International Pub. No. WO2012030683, herein incorporated by reference in its entirety). The linker may be any linker disclosed herein, known in the art and/or disclosed in International Pub. No. WO2012030683, herein incorporated by reference in its entirety.

[0722] In another example, the polynucleotides, primary constructs or mmRNA can be attached to the polynucleotides, primary constructs or mmRNA a viral inhibitory peptide (VIP) through a cleavable linker. The cleavable linker can release the VIP and dye into the cell. In another example, the polynucleotides, primary constructs or mmRNA can be attached through the linker to an ADP-ribosylated, which is responsible for the actions of some bacterial toxins, such as cholera toxin, diphtheria toxin, and pertussis toxin. These toxin proteins are ADP-ribosyltransferases that modify target proteins in human cells. For example, cholera toxin ADP-ribosylates G proteins modifies human cells by causing massive fluid secretion from the lining of the small intestine, which results in life-threatening diarrhea.

[0723] In some embodiments, the payload may be a therapeutic agent such as a cytotoxin, radioactive ion, chemotherapeutic, or other therapeutic agent. A cytotoxin or cytotoxic agent includes any agent that may be detrimental to cells. Examples include, but are not limited to, taxol, cytochalasin B, gramicidin D, ethidium bromide, emetine, mitomycin, etoposide, teniposide, vincristine, vinblastine, colchicine, doxorubicin, daunorubicin, dihydroxyanthracinedione, mitoxantrone, mithramycin, actinomycin D, 1-dehydrotestosterone, glucocorticoids, procaine, tetracaine, lidocaine, propranolol, puromycin, maytansinoids, e.g., maytansinol (see U.S. Pat. No. 5,208,020 incorporated herein in its entirety), rachelmycin (CC-1065, see U.S. Pat. Nos. 5,475,092, 5,585,499, and 5,846,545, all of which are incorporated herein by reference), and analogs or homologs thereof. Radioactive ions include, but are not limited to iodine (e.g., iodine 125 or iodine 131), strontium 89, phosphorous, palladium, cesium, iridium, phosphate, cobalt, yttrium 90, samarium 153, and praseodymium. Other therapeutic agents include, but are not limited to, antimetabolites (e.g., methotrexate, 6-mercaptopurine, 6-thioguanine, cytarabine, 5-fluorouracil decarbazine), alkylating agents (e.g., mechlorethamine, thiotepa chlorarmbucil, rachelmycin (CC-1065), melphalan, carmustine (BSNU), lomustine (CCNU), cyclophosphamide, busulfan, dibromomannitol, streptozotocin, mitomycin C, and cis-dichlorodiamine platinum (II) (DDP) cisplatin), anthracyclines (e.g., daunorubicin (formerly daunomycin) and doxorubicin), antibiotics (e.g., dactinomycin (formerly actinomycin), bleomycin, mithramycin, and anthramycin (AMC)), and anti-mitotic agents (e.g., vincristine, vinblastine, taxol and maytansinoids).

[0724] In some embodiments, the payload may be a detectable agent, such as various organic small molecules, inorganic compounds, nanoparticles, enzymes or enzyme substrates, fluorescent materials, luminescent materials (e.g., luminol), bioluminescent materials (e.g., luciferase, luciferin, and aequorin), chemiluminescent materials, radioactive materials (e.g., ¹⁵F, ⁶⁷Ga, ^{81m}Kr, ⁸²Rb, ¹¹¹In, ¹²³I, ¹³³Xe, ²⁰¹Tl, ¹²⁵I, ³⁵S, ¹⁴C, ³H, or ^{99m}Tc (e.g., as pertechnetate (technetate(VII), TcO₄⁻)), and contrast agents (e.g., gold (e.g., gold nanoparticles), gadolinium (e.g., chelated Gd), iron oxides (e.g., superparamagnetic iron oxide (SPIO), monocrystalline iron oxide nanoparticles (MIONs), and ultrasmall superparamagnetic iron oxide (USPIO)), manganese chelates (e.g., Mn-DPDP), barium sulfate, iodinated contrast media (iohexol), microbubbles, or perfluorocarbons). Such optically-detectable labels include for example, without limitation, 4-acetamido-4′-isothiocyanatostilbene-2,2′disulfonic acid; acridine and derivatives (e.g., acridine and acridine isothiocyanate); 5-(2′-aminoethyl)aminonaphthalene-ly-sulfonic acid (EDANS); 4-amino-N-[3-vinylsulfonyl)phenyl]naphthalimide-3,5 disulfonate; N-(4-anilino-1-naphthyl)maleimide; anthranilamide; BODIPY; Brilliant Yellow; coumarin and derivatives (e.g., coumarin, 7-amino-4-methylcoumarin (AMC, Cournarin 120), and 7-amino-4-trifluoromethylcoumarin (Coumarin 151)); cyanine dyes; cyanosine; 4′,6-diaminidino-2-phenylindole (DAPI); 5′ 5″-dibromopyrogallol-sulfonaphthalein (Bromopyrogallol Red); 7-diethylamino-3-(4′-isothiocyanatophenyl)-4-methylcoumarin; diethylenetriamine pentaacetate; 4,4′-diisothiocyanatodihydro-stilbene-2,2′-disulfonic acid; 4,4′-diisothiocyanatostilbene-2,2′-disulfonic acid; 5-[dinethylamino]-naphthalene-1-sulfonyl chloride (DNS, dansylchloride); 4-dimethylaminophenylazophenyl-4′-isothiocyanate (DABITC); eosin and derivatives (e.g., eosin and eosin isothiocyanate); erythrosin and derivatives (e.g., erythrosin D and erythrosin isothiocyanate); ethidium; fluorescein and derivatives (e.g., 5-carboxyfluorescein (FAM), 5-(4,6-dichlorotriazin-2-yl)aminofluorescein (DTAF), 2′,7′-dimethoxy-4′5′-dichloro-6-carboxyfluorescein, fluorescein, fluorescein isothiocyanate, X-rhodamine-5-(and-6)-isothiocyanate (QFITC or XRITC), and fluorescamine); 2-[2-[3-[[1,3-dihydro-1,1-dimethyl-3-(3-sulfopropyl)-2H-benz[e]indol-2-ylidene]ethylidene]-2-[4-(ethoxycarbonyl)-1-piperazinyl]-1-cyclopenten-1-yl]ethenyl]-1,1-dimethyl-3-(3-sulfopropyl)-1H-benz[e]indolium hydroxide, inner salt, compound with n,n-diethylethanamine(1:1) (1R144); 5-chloro-2-[2-[3-[(5-chloro-3-ethyl-2(3H)-benzothiazol-ylidene)ethylidene]-2-(diphenylamino)-1-cyclopenten-1-yl]ethenyl]-3-ethyl benzothiazolium perchlorate (IR140); Malachite Green isothiocyanate; 4-methylumbelliferone orthocresolphthalein; nitrotyrosine; pararosaniline; Phenol Red; D-phycoerythrin; o-phthaldialdehyde; pyrene and derivatives (e.g., pyrene, pyrene butyrate, and succinimidyl 1-pyrene); butyrate quantum dots; Reactive Red 4 (CIBACRON™ Brilliant Red 3D-A); rhodamine and derivatives (e.g., 6-carboxy-X-rhodamine (ROX), 6-carboxyrhodamine (R6G), lissamine rhodamine B sulfonyl chloride rhodanine (Rhod), rhodamine B, rhodamine 123, rhodamine X isothiocyanate, sulforhodamine B, sulforhodamine 101, sulfonyl chloride derivative of sulforhodamine 101 (Texas Red), N,N,N′,N′tetramethyl-6-carboxyrhodamine (TAMRA) tetramethyl rhodamine, and tetramethyl rhodamine isothiocyanate (TRITC)); riboflavin; rosolic acid; terbium chelate derivatives; Cyanine-3 (Cy3); Cyanine-5 (Cy5); cyanine-5.5 (Cy5.5), Cyanine-7 (Cy7); IRD 700; IRD 800; Alexa 647; La Jolta Blue; phthalo cyanine; and naphthalo cyanine.

[0725] In some embodiments, the detectable agent may be a non-detectable precursor that becomes detectable upon activation (e.g., fluorogenic tetrazine-fluorophore constructs (e.g., tetrazine-BODIPY FL, tetrazine-Oregon Green 488, or tetrazine-BODIPY TMR-X) or enzyme activatable fluorogenic agents (e.g., PROSENSE● (VisEn Medical))). In vitro assays in which the enzyme labeled compositions can be used include, but are not limited to, enzyme linked immunosorbent assays (ELISAs), immunoprecipitation assays, immunofluorescence, enzyme immunoassays (EIA), radioimmunoassays (RIA), and Western blot analysis.

### Combinations

[0726] The polynucleotides, primary constructs or mmRNA may be used in combination with one or more other therapeutic, prophylactic, diagnostic, or imaging agents. By “in combination with,” it is not intended to imply that the agents must be administered at the same time and/or formulated for delivery together, although these methods of delivery are within the scope of the present disclosure. Compositions can be administered concurrently with, prior to, or subsequent to, one or more other desired therapeutics or medical procedures. In general, each agent will be administered at a dose and/or on a time schedule determined for that agent. In some embodiments, the present disclosure encompasses the delivery of pharmaceutical, prophylactic, diagnostic, or imaging compositions in combination with agents that may improve their bioavailability, reduce and/or modify their metabolism, inhibit their excretion, and/or modify their distribution within the body. As a non-limiting example, the nucleic acids or mmRNA may be used in combination with a pharmaceutical agent for the treatment of cancer or to control hyperproliferative cells. In U.S. Pat. No. 7,964,571, herein incorporated by reference in its entirety, a combination therapy for the treatment of solid primary or metastasized tumor is described using a pharmaceutical composition including a DNA plasmid encoding for interleukin-12 with a lipopolymer and also administering at least one anticancer agent or chemotherapeutic. Further, the nucleic acids and mmRNA of the present invention that encodes anti-proliferative molecules may be in a pharmaceutical composition with a lipopolymer (see e.g., U.S. Pub. No. 20110218231, herein incorporated by reference in its entirety, claiming a pharmaceutical composition comprising a DNA plasmid encoding an anti-proliferative molecule and a lipopolymer) which may be administered with at least one chemotherapeutic or anticancer agent.

[0727] It will further be appreciated that therapeutically, prophylactically, diagnostically, or imaging active agents utilized in combination may be administered together in a single composition or administered separately in different compositions. In general, it is expected that agents utilized in combination with be utilized at levels that do not exceed the levels at which they are utilized individually. In some embodiiments, the levels utilized in combination will be lower than those utilized individually. In one embodiment, the combinations, each or together may be administered according to the split dosing regimens described herein.

### Dosing

[0728] The present invention provides methods comprising administering modified mRNAs and their encoded proteins or complexes in accordance with the invention to a subject in need thereof, Nucleic acids, proteins or complexes, or pharmaceutical, imaging, diagnostic, or prophylactic compositions thereof, may be administered to a subject using any amount and any route of administration effective for preventing, treating, diagnosing, or imaging a disease, disorder, and/or condition (e.g., a disease, disorder, and/or condition relating to working memory deficits). The exact amount required will vary from subject to subject, depending on the species, age, and general condition of the subject, the severity of the disease, the particular composition, its mode of administration, its mode of activity, and the like. Compositions in accordance with the invention are typically formulated in dosage unit form for ease of administration and uniformity of dosage. It will be understood, however, that the total daily usage of the compositions of the present invention may be decided by the attending physician within the scope of sound medical judgment. The specific therapeutically effective, prophylactically effective, or appropriate imaging dose level for any particular patient will depend upon a variety of factors including the disorder being treated and the severity of the disorder; the activity of the specific compound employed; the specific composition employed; the age, body weight, general health, sex and diet of the patient; the time of administration, route of administration, and rate of excretion of the specific compound employed; the duration of the treatment; drugs used in combination or coincidental with the specific compound employed; and like factors well known in the medical arts.

[0729] In certain embodiments, compositions in accordance with the present invention may be administered at dosage levels sufficient to deliver from about 0.0001 mg/kg to about 100 mg/kg, from about 0.001 mg/kg to about 0.05 mg/kg, from about 0.005 mg/kg to about 0.05 mg/kg, from about 0.001 mg/kg to about 0.005 mg/kg, from about 0.05 mg/kg to about 0.5 mg/kg, from about 0.01 mg/kg to about 50 mg/kg, from about 0.1 mg/kg to about 40 mg/kg, from about 0.5 mg/kg to about 30 mg/kg, from about 0.01 ng/kg to about 10 mg/kg, from about 0.1 mg/kg to about 10 mg/kg, or from about 1 mg/kg to about 25 mg/kg, of subject body weight per day, one or more times a day, to obtain the desired therapeutic, diagnostic, prophylactic, or imaging effect. The desired dosage may be delivered three times a day, two times a day, once a day, every other day, every third day, every week, every two weeks, every three weeks, or every four weeks. In certain embodiments, the desired dosage may be delivered using multiple administrations (e.g., two, three, four, five, six, seven, eight, nine, ten, eleven, twelve, thirteen, fourteen, or more administrations). When multiple administrations are employed, split dosing regimens such as those described herein may be used.

[0730] According to the present invention, it has been discovered that administration of mmRNA in split-dose regimens produce higher levels of proteins in mammalian subjects. As used herein, a “split dose” is the division of single unit dose or total daily dose into two or more doses, e.g., two or more administrations of the single unit dose. As used herein, a “single unit dose” is a dose of any therapeutic administed in one dose/at one time/single route/single point of contact, i.e., single administration event. As used herein, a “total daily dose” is an amount given or prescribed in 24 hr period. It may be administered as a single unit dose. In one embodiment, the mmRNA of the present invention are administed to a subject in split doses. The mmRNA may be formulated in buffer only or in a formulation described herein.

### Dosage Forms

[0731] A pharmaceutical composition described herein can be formulated into a dosage form described herein, such as a topical, intranasal, intratracheal, or injectable (e.g., intravenous, intraocular, intravitreal, intramuscular, intracardiac, intraperitoneal, subcutaneous).

### Liquid Dosage Forms

[0732] Liquid dosage forms for parenteral administration include, but are not limited to, pharmaceutically acceptable emulsions, microemulsions, solutions, suspensions, syrups, and/or elixirs. In addition to active ingredients, liquid dosage forms may comprise inert diluents commonly used in the art including, but not limited to, water or other solvents, solubilizing agents and emulsifiers such as ethyl alcohol, isopropyl alcohol, ethyl carbonate, ethyl acetate, benzyl alcohol, benzyl benzoate, propylene glycol, 1,3-butylene glycol, dimethylformamide, oils (in particular, cottonseed, groundnut, corn, germ, olive, castor, and sesame oils), glycerol, tetrahydrofurfuryl alcohol, polyethylene glycols and fatty acid esters of sorbitan, and mixtures thereof. In certain embodiments for parenteral administration, compositions may be mixed with solubilizing agents such as CIREMOPHOR●, alcohols, oils, modified oils, glycols, polysorbates, cyclodextrins, polymers, and/or combinations thereof.

### Injectable

[0733] Injectable preparations, for example, sterile injectable aqueous or oleaginous suspensions may be formulated according to the known art and may include suitable dispersing agents, wetting agents, and/or suspending agents. Sterile injectable preparations may be sterile injectable solutions, suspensions, and/or emulsions in nontoxic parenterally acceptable diluents and/or solvents, for example, a solution in 1,3-butanediol. Among the acceptable vehicles and solvents that may be employed include, but are not limited to, water, Ringer's solution, U.S.P., and isotonic sodium chloride solution. Sterile, fixed oils are conventionally employed as a solvent or suspending medium. For this purpose any bland fixed oil can be employed including synthetic mono- or diglycerides. Fatty acids such as oleic acid can be used in the preparation of injectables.

[0734] Injectable formulations can be sterilized, for example, by filtration through a bacterial-retaining filter, and/or by incorporating sterilizing agents in the form of sterile solid compositions which can be dissolved or dispersed in sterile water or other sterile injectable medium prior to use.

[0735] In order to prolong the effect of an active ingredient, it may be desirable to slow the absorption of the active ingredient from subcutaneous or intramuscular injection. This may be accomplished by the use of a liquid suspension of crystalline or amorphous material with poor water solubility. The rate of absorption of the polynucleotide, primary construct or mmRNA then depends upon its rate of dissolution which, in turn, may depend upon crystal size and crystalline form. Alternatively, delayed absorption of a parenterally administered polynucleotide, primary construct or mmRNA may be accomplished by dissolving or suspending the polynucleotide, primary construct or mmRNA in an oil vehicle. Injectable depot forms are made by forming microencapsule matrices of the polynucleotide, primary construct or mmRNA in biodegradable polymers such as polylactide-polyglycolide. Depending upon the ratio of polynucleotide, primary construct or mmRNA to polymer and the nature of the particular polymer employed, the rate of polynucleotide, primary construct or mmRNA release can be controlled. Examples of other biodegradable polymers include, but are not limited to, poly(orthoesters) and poly(anhydrides). Depot injectable formulations may be prepared by entrapping the polynucleotide, primary construct or mmRNA in liposomes or microemulsions which are compatible with body tissues.

### Pulmonary

[0736] Formulations described herein as being useful for pulmonary delivery may also be used for intranasal delivery of a pharmaceutical composition. Another formulation suitable for intranasal administration may be a coarse powder comprising the active ingredient and having an average particle from about 0.2 μm to 500 μm. Such a formulation may be administered in the manner in which snuff is taken, i.e. by rapid inhalation through the nasal passage from a container of the powder held close to the nose.

[0737] Formulations suitable for nasal administration may, for example, comprise from about as little as 0.1% (w/w) and as much as 100% (w/w) of active ingredient, and may comprise one or more of the additional ingredients described herein. A pharmaceutical composition may be prepared, packaged, and/or sold in a formulation suitable for buccal administration. Such formulations may, for example, be in the form of tablets and/or lozenges made using conventional methods, and may, for example, contain about 0.1% to 20% (w/w) active ingredient, where the balance may comprise an orally dissolvable and/or degradable composition and, optionally, one or more of the additional ingredients described herein. Alternately, formulations suitable for buccal administration may comprise a powder and/or an aerosolized and/or atomized solution and/or suspension comprising active ingredient. Such powdered, aerosolized, and/or aerosolized formulations, when dispersed, may have an average particle and/or droplet size in the range from about 0.1 nm to about 200 nm, and may further comprise one or more of any additional ingredients described herein.

[0738] General considerations in the formulation and/or manufacture of pharmaceutical agents may be found, for example, in Remington: The Science and Practice of Pharmacy 21^{st} ed., Lippincott Williams & Wilkins, 2005 (incorporated herein by reference in its entirety).

### Coatings or Shells

[0739] Solid dosage forms of tablets, dragees, capsules, pills, and granules can be prepared with coatings and shells such as enteric coatings and other coatings well known in the pharmaceutical formulating art. They may optionally comprise opacifying agents and can be of a composition that they release the active ingredient(s) only, or preferentially, in a certain part of the intestinal tract, optionally, in a delayed manner. Examples of embedding compositions which can be used include polymeric substances and waxes. Solid compositions of a similar type may be employed as fillers in soft and hard-filled gelatin capsules using such excipients as lactose or milk sugar as well as high molecular weight polyethylene glycols and the like.

### Properties of Pharmaceutical Compositions

[0740] The pharmaceutical compositions described herein can be characterized by one or more of bioavailability, therapeutic window and/or volume of distribution.

### Bioavailability

[0741] The polynucleotides, primary constructs or mmRNA, when formulated into a composition with a delivery agent as described herein, can exhibit an increase in bioavailability as compared to a composition lacking a delivery agent as described herein. As used herein, the term “bioavailability” refers to the systemic availability of a given amount of polynucleotides, primary constructs or mmRNA administered to a mammal. Bioavailability can be assessed by measuring the area under the curve (AUC) or the maximum serum or plasma concentration (Cₘₐₓ) of the unchanged form of a compound following administration of the compound to a mammal. AUC is a determination of the area under the curve plotting the serum or plasma concentration of a compound along the ordinate (Y-axis) against time along the abscissa (X-axis). Generally, the AUC for a particular compound can be calculated using methods known to those of ordinary skill in the art and as described in G, S. Banker, Modern Pharmaceutics, Drugs and the Pharmaceutical Sciences, v. 72, Marcel Dekker, New York, Inc., 1996, herein incorporated by reference in its entirety.

[0742] The Cₘₐₓ value is the maximum concentration of the compound achieved in the serum or plasma of a mammal following administration of the compound to the mammal. The Cₘₐₓ value of a particular compound can be measured using methods known to those of ordinary skill in the art. The phrases “increasing bioavailability” or “improving the pharmacokinetics,” as used herein mean that the systemic availability of a first polynucleotide, primary construct or mmRNA, measured as AUC, Cₘₐₓ, or Cₘᵢₙ in a mammal is greater, when co-administered with a delivery agent as described herein, than when such co-administration does not take place. In some embodiments, the bioavailability of the polynucleotide, primary construct or mmRNA can increase by at least about 2%, at least about 5%, at least about 10%, at least about 15%, at least about 20%, at least about 25%, at least about 30%, at least about 35%, at least about 40%, at least about 45%, at least about 50%, at least about 55%, at least about 60%, at least about 65%, at least about 70%, at least about 75%, at least about 80%, at least about 85%, at least about 90%, at least about 95%, or about 100%.

### Therapeutic Window

[0743] The polynucleotides, primary constructs or mmRNA, when formulated into a composition with a delivery agent as described herein, can exhibit an increase in the therapeutic window of the administered polynucleotide, primary construct or mmRNA composition as compared to the therapeutic window of the administered polynucleotide, primary construct or mmRNA composition lacking a delivery agent as described herein. As used herein “therapeutic window” refers to the range of plasma concentrations, or the range of levels of therapeutically active substance at the site of action, with a high probability of eliciting a therapeutic effect. In some embodiments, the therapeutic window of the polynucleotide, primary construct or mmRNA when co-administered with a delivery agent as described herein can increase by at least about 2%, at least about 5%, at least about 10%, at least about 15%, at least about 20%, at least about 25%, at least about 30%, at least about 35%, at least about 40%, at least about 45%, at least about 50%, at least about 55%, at least about 60%, at least about 65%, at least about 70%, at least about 75%, at least about 80%, at least about 85%, at least about 90%, at least about 95%, or about 100%.

### Volume of Distribution

[0744] The polynucleotides, primary constructs or mmRNA, when formulated into a composition with a delivery agent as described, herein, can exhibit an improved volume of distribution (V_{dist}), e.g., reduced or targeted, relative to a composition lacking a delivery agent as described herein. The volume of distribution (Vdist) relates the amount of the drug in the body to the concentration of the drug in the blood or plasma. As used herein, the term “volume of distribution” refers to the fluid volume that would be required to contain the total amount of the drug in the body at the same concentration as in the blood or plasma: Vdist equals the amount of drug in the body/concentration of drug in blood or plasma. For example, for a 10 mg dose and a plasma concentration of 10 mg/L, the volume of distribution would be 1 liter. The volume of distribution reflects the extent to which the drug is present in the extravascular tissue. A large volume of distribution reflects the tendency of a compound to bind to the tissue components compared with plasma protein binding. In a clinical setting, Vdist can be used to determine a loading dose to achieve a steady state concentration. In some embodiments, the volume of distribution of the polynucleotide, primary construct or mmRNA when co-administered with a delivery agent as described herein can decrease at least about 2%, at least about 5%, at least about 10%, at least about 15%, at least about 20%, at least about 25%, at least about 30%, at least about 35%, at least about 40%, at least about 45%, at least about 50%, at least about 55%, at least about 60%, at least about 65%, at least about 70%.

### Biological Effect

[0745] In one embodiment, the biological effect of the modified mRNA delivered to the animals may be categorized by analyzing the protein expression in the animals. The protein expression may be determined from analyzing a biological sample collected from a mammal administered the modified mRNA of the present invention. In one embodiment, the expression protein encoded by the modified mRNA administered to the mammal of at least 50 μg/ml may be preferred. For example, a protein expression of 50-200 μg/ml for the protein encoded by the modified mRNA delivered to the mammal may be seen as a therapeutically effective amount of protein in the mammal.

### Detection of Modified Nucleic Acids by Mass Spectrometry

[0746] Mass spectrometry (MS) is an analytical technique that can provide structural and molecular mass/concentration information on molecules after their conversion to ions. The molecules are first ionized to acquire positive or negative charges and then they travel through the mass analyzer to arrive at different areas of the detector according to their mass/charge (m/z) ratio.

[0747] Mass spectrometry is performed using a mass spectrometer which includes an ion source for ionizing the fractionated sample and creating charged molecules for further analysis. For example ionization of the sample may be performed by electrospray ionization (ESI), atmospheric pressure chemical ionization (APCI), photoionization, electron ionization, fast atom bombardment (FAB)/liquid secondary ionization (LSIMS), matrix assisted laser desorption/ionization (MALDI), field ionization, field desorption, thermospray/plasmasspray ionization, and particle beam ionization. The skilled artisan will understand that the choice of ionization method can be determined based on the analyte to be measured, type of sample, the type of detector, the choice of positive versus negative mode, etc.

[0748] After the sample has been ionized, the positively charged or negatively charged ions thereby created may be analyzed to determine a mass-to-charge ratio (i.e., m/z). Suitable analyzers for determining mass-to-charge ratios include quadropole analyzers, ion traps analyzers, and time-of-flight analyzers. The ions may be detected using several detection modes. For example, selected ions may be detected (i.e., using a selective ion monitoring mode (SIM)), or alternatively, ions may be detected using a scanning mode, e.g., multiple reaction monitoring (MRM) or selected reaction monitoring (SRM).

[0749] Liquid chromatography-multiple reaction monitoring (LC-MS/MRM) coupled with stable isotope labeled dilution of peptide standards has been shown to be an effective method for protein verification (e.g., Keshishian et al., Mol Cell Proteomnics 2009 8: 2339-2349; Kuhn et al., Clin Chem 2009 55:1108-1117; Lopez et al., Clin Chem 2010 56:281-290; each of which are herein incorporated by reference in its entirety). Unlike untargeted mass spectrometry frequently used in biomarker discovery studies, targeted MS methods are peptide sequence-based modes of MS that focus the full analytical capacity of the instrument on tens to hundreds of selected peptides in a complex mixture. By restricting detection and fragmentation to only those peptides derived from proteins of interest, sensitivity and reproducibility are improved dramatically compared to discovery-mode MIS methods. This method of mass spectrometry-based multiple reaction monitoring (MRM) quantitation of proteins can dramatically impact the discovery and quantitation of biomarkers via rapid, targeted, multiplexed protein expression profiling of clinical samples.

[0750] In one embodiment, a biological sample which may contain at least one protein encoded by at least one modified mRNA of the present invention may be analyzed by the method of MRM-MS. The quantification of the biological sample may further include, but is not limited to, isotopically labeled peptides or proteins as internal standards.

[0751] According to the present invention, the biological sample, once obtained from the subject, may be subjected to enzyme digestion. As used herein, the term “digest” means to break apart into shorter peptides. As used herein, the phrase “treating a sample to digest proteins” means manipulating a sample in such a way as to break down proteins in a sample. These enzymes include, but are not limited to, trypsin, endoproteinase Glu-C and chymotrypsin. In one embodiment, a biological sample which may contain at least one protein encoded by at least one modified mRNA of the present invention may be digested using enzymes.

[0752] In one embodiment, a biological sample which may contain protein encoded by modified mRNA of the present invention may be analyzed for protein using electrospray ionization. Electrospray ionization (ESI) mass spectrometry (ESIMS) uses electrical energy to aid in the transfer of ions from the solution to the gaseous phase before they are analyzed by mass spectrometry. Samples may be analyzed using methods known in the art (e.g., Ho et al., Clin Biochem Rev. 2003 24(1):3-12; herein incorporated by reference in its entirety). The ionic species contained in solution may be transferred into the gas phase by dispersing a fine spray of charge droplets, evaporating the solvent and ejecting the ions from the charged droplets to generate a mist of highly charged droplets. The mist of highly charged droplets may be analyzed using at least 1, at least 2, at least 3 or at least 4 mass analyzers such as, but not limited to, a quadropole mass analyzer. Further, the mass spectrometry method may include a purification step. As a non-limiting example, the first quadrupole may be set to select a single m/z ratio so it may filter out other molecular ions having a different m/z ratio which may eliminate complicated and time-consuming sample purification procedures prior to MS analysis.

[0753] In one embodiment, a biological sample which may contain protein encoded by modified mRNA of the present invention may be analyzed for protein in a tandem ESIMS system (e.g., MS/MS). As non-limiting examples, the droplets may be analyzed using a product scan (or daughter scan) a precursor scan (parent scan) a neutral loss or a multiple reaction monitoring.

[0754] In one embodiment, a biological sample which may contain protein encoded by modified mRNA of the present invention may be analyzed using matrix-assisted laser desorption/ionization (MALDI) mass spectrometry (MALDIMS). MALDI provides for the nondestructive vaporization and ionization of both large and small molecules, such as proteins. In MALDI analysis, the analyte is first co-crystallized with a large molar excess of a matrix compound, which may also include, but is not limited to, an ultraviolet absorbing weak organic acid. Non-limiting examples of matrices used in MALDI are α-cyano-4-hydroxycinnamic acid, 3,5-dimethoxy-4-hydroxycinnamic acid and 2,5-dihydroxybenzoic acid. Laser radiation of the analyte-matrix mixture may result in the vaporization of the matrix and the analyte. The laser induced desorption provides high ion yields of the intact analyte and allows for measurement of compounds with high accuracy. Samples may be analyzed using methods known in the art (e.g., Lewis, Wei and Siuzdak, Encyclopedia of Analytical Chemistry 2000:5880-5894; herein incorporated by reference in its entirety). As non-limiting examples, mass analyzers used in the MALDI analysis may include a linear time-of-flight (TOF), a TOF reflectron or a Fourier transform mass analyzer.

[0755] In one embodiment, the analyte-matrix mixture may be formed using the dried-droplet method. A biologic sample is mixed with a matrix to create a saturated matrix solution where the matrix-to-sample ratio is approximately 5000:1. An aliquot (approximately 0.5-2.0 uL) of the saturated matrix solution is then allowed to dry to form the analyte-matrix mixture.

[0756] In one embodiment, the analyte-matrix mixture may be formed using the thin-layer method. A matrix homogeneous film is first formed and then the sample is then applied and may be absorbed by the matrix to form the analyte-matrix mixture.

[0757] In one embodiment, the analyte-matrix mixture may be formed using the thick-layer method. A matrix homogeneous film is formed with a nitro-cellulose matrix additive. Once the uniform nitro-cellulose matrix layer is obtained the sample is applied and absorbed into the matrix to form the analyte-matrix mixture.

[0758] In one embodiment, the analyte-matrix mixture may be formed using the sandwich method. A thin layer of matrix crystals is prepared as in the thin-layer method followed by the addition of droplets of aqueous trifluoroacetic acid, the sample and matrix. The sample is then absorbed into the matrix to form the analyte-matrix mixture.

### V. Uses of Polynucleotides, Primary Constructs and mmRNA of the Invention

[0759] The polynucleotides, primary constructs and mmRNA of the present invention are designed, in preferred embodiments, to provide for avoidance or evasion of deleterious bio-responses such as the immune response and/or degradation pathways, overcoming the threshold of expression and/or improving protein production capacity, improved expression rates or translation efficiency, improved drug or protein half life and/or protein concentrations, optimized protein localization, to improve one or more of the stability and/or clearance in tissues, receptor uptake and/or kinetics, cellular access by the compositions, engagement with translational machinery, secretion efficiency (when applicable), accessibility to circulation, and/or modulation of a cell's status, function and/or activity.

### Therapeutics

### Therapeutic Agents

[0760] The polynucleotides, primary constructs or mmRNA of the present invention, such as modified nucleic acids and modified RNAs, and the proteins translated from them described herein can be used as therapeutic or prophylactic agents. They are provided for use in medicine. For example, a polynucleotide, primary construct or mmRNA described herein can be administered to a subject, wherein the polynucleotide, primary construct or mmRNA is translated in vivo to produce a therapeutic or prophylactic polypeptide in the subject. Provided are compositions, methods, kits, and reagents for diagnosis, treatment or prevention of a disease or condition in humans and other mammals. The active therapeutic agents of the invention include polynucleotides, primary constructs or mmRNA, cells containing polynucleotides, primary constructs or mmRNA or polypeptides translated from the polynucleotides, primary constructs or mmRNA.

[0761] In certain embodiments, provided herein are combination therapeutics containing one or more polynucleotide, primary construct or mmRNA containing translatable regions that encode for a protein or proteins that boost a mammalian subject's immunity along with a protein that induces antibody-dependent cellular toxicity. For example, provided herein are therapeutics containing one or more nucleic acids that encode trastuzumab and granulocyte-colony stimulating factor (G-CSF). In particular, such combination therapeutics are useful in Her2+ breast cancer patients who develop induced resistance to trastuzumab. (See, e.g., Albrecht, Immunotherapy. 2(6):795-8 (2010)).

[0762] Provided herein are methods of inducing translation of a recombinant polypeptide in a cell population using the polynucleotide, primary construct or mmRNA described herein. Such translation can be in vivo, ex vivo, in culture, or in vitro. The cell population is contacted with an effective amount of a composition containing a nucleic acid that has at least one nucleoside modification, and a translatable region encoding the recombinant polypeptide. The population is contacted under conditions such that the nucleic acid is localized into one or more cells of the cell population and the recombinant polypeptide is translated in the cell from the nucleic acid.

[0763] An “effective amount” of the composition is provided based, at least in part, on the target tissue, target cell type, means of administration, physical characteristics of the nucleic acid (e.g., size, and extent of modified nucleosides), and other determinants. In general, an effective amount of the composition provides efficient protein production in the cell, preferably more efficient than a composition containing a corresponding unmodified nucleic acid. Increased efficiency may be demonstrated by increased cell transfection (i.e., the percentage of cells transfected with the nucleic acid), increased protein translation from the nucleic acid, decreased nucleic acid degradation (as demonstrated, e.g., by increased duration of protein translation from a modified nucleic acid), or reduced innate immune response of the host cell.

[0764] Aspects of the invention are directed to methods of inducing in vivo translation of a recombinant polypeptide in a mammalian subject in need thereof. Therein, an effective amount of a composition containing a nucleic acid that has at least one structural or chemical modification and a translatable region encoding the recombinant polypeptide is administered to the subject using the delivery methods described herein. The nucleic acid is provided in an amount and under other conditions such that the nucleic acid is localized into a cell of the subject and the recombinant polypeptide is translated in the cell from the nucleic acid. The cell in which the nucleic acid is localized, or the tissue in which the cell is present, may be targeted with one or more than one rounds of nucleic acid administration.

[0765] In certain embodiments, the administered polynucleotide, primary construct or mmRNA directs production of one or more recombinant polypeptides that provide a functional activity which is substantially absent in the cell, tissue or organism in which the recombinant polypeptide is translated. For example, the missing functional activity may be enzymatic, structural, or gene regulatory in nature. In related embodiments, the administered polynucleotide, primary construct or mmRNA directs production of one or more recombinant polypeptides that increases (e.g., synergistically) a functional activity which is present but substantially deficient in the cell in which the recombinant polypeptide is translated.

[0766] In other embodiments, the administered polynucleotide, primary construct or mmRNA directs production of one or more recombinant polypeptides that replace a polypeptide (or multiple polypeptides) that is substantially absent in the cell in which the recombinant polypeptide is translated. Such absence may be due to genetic mutation of the encoding gene or regulatory pathway thereof. In some embodiments, the recombinant polypeptide increases the level of an endogenous protein in the cell to a desirable level; such an increase may bring the level of the endogenous protein from a subnormal level to a normal level or from a normal level to a super-normal level.

[0767] Alternatively, the recombinant polypeptide functions to antagonize the activity of an endogenous protein present in, on the surface of, or secreted from the cell. Usually, the activity of the endogenous protein is deleterious to the subject; for example, due to mutation of the endogenous protein resulting in altered activity or localization. Additionally, the recombinant polypeptide antagonizes, directly or indirectly, the activity of a biological moiety present in, on the surface of, or secreted from the cell. Examples of antagonized biological moieties include lipids (e.g., cholesterol), a lipoprotein (e.g., low density lipoprotein), a nucleic acid, a carbohydrate, a protein toxin such as shiga and tetanus toxins, or a small molecule toxin such as botulinum, cholera, and diphtheria toxins. Additionally, the antagonized biological molecule may be an endogenous protein that exhibits an undesirable activity, such as a cytotoxic or cytostatic activity.

[0768] The recombinant proteins described herein may be engineered for localization within the cell, potentially within a specific compartment such as the nucleus, or are engineered for secretion from the cell or translocation to the plasma membrane of the cell.

[0769] In some embodiments, modified mRNAs and their encoded polypeptides in accordance with the present invention may be used for treatment of any of a variety of diseases, disorders, and/or conditions, including but not limited to one or more of the following: autoimmune disorders (e.g. diabetes, lupus, multiple sclerosis, psoriasis, rheumatoid arthritis); inflammatory disorders (e.g. arthritis, pelvic inflammatory disease); infectious diseases (e.g. viral infections (e.g., HIV, HCV, RSV), bacterial infections, fungal infections, sepsis); neurological disorders (e.g. Alzheimer's disease, Huntington's disease; autism; Duchenne muscular dystrophy); cardiovascular disorders (e.g. atherosclerosis, hypercholesterolemia, thrombosis, clotting disorders, angiogenic disorders such as macular degeneration); proliferative disorders (e.g. cancer, benign neoplasms); respiratory disorders (e.g. chronic obstructive pulmonary disease); digestive disorders (e.g. inflammatory bowel disease, ulcers); musculoskeletal disorders (e.g. fibromyalgia, arthritis); endocrine, metabolic, and nutritional disorders (e.g. diabetes, osteoporosis); urological disorders (e.g. renal disease); psychological disorders (e.g. depression, schizophrenia); skin disorders (e.g. wounds, eczema); blood and lymphatic disorders (e.g. anemia, hemophilia); etc.

[0770] Diseases characterized by dysfunctional or aberrant protein activity include cystic fibrosis, sickle cell anemia, epidermolysis bullosa, amyotrophic lateral sclerosis, and glucose-6-phosphate dehydrogenase deficiency. The present invention provides a method for treating such conditions or diseases in a subject by introducing nucleic acid or cell-based therapeutics containing the polynucleotide, primary construct or mmRNA provided herein, wherein the polynucleotide, primary construct or mmRNA encode for a protein that antagonizes or otherwise overcomes the aberrant protein activity present in the cell of the subject. Specific examples of a dysfunctional protein are the missense mutation variants of the cystic fibrosis transmembrane conductance regulator (CFTR) gene, which produce a dysfunctional protein variant of CFTR protein, which causes cystic fibrosis.

[0771] Diseases characterized by missing (or substantially diminished such that proper (normal or physiological protein function does not occur) protein activity include cystic fibrosis, Niemann-Pick type C, P thalassemia major, Duchenne muscular dystrophy, Hurler Syndrome, Hunter Syndrome, and Hemophilia A. Such proteins may not be present, or are essentially non-functional. The present invention provides a method for treating such conditions or diseases in a subject by introducing nucleic acid or cell-based therapeutics containing the polynucleotide, primary construct or mmRNA provided herein, wherein the polynucleotide, primary construct or mmRNA encode for a protein that replaces the protein activity missing from the target cells of the subject. Specific examples of a dysfunctional protein are the nonsense mutation variants of the cystic fibrosis transmembrane conductance regulator (CFTR) gene, which produce a nonfunctional protein variant of CFTR protein, which causes cystic fibrosis.

[0772] Thus, provided are methods of treating cystic fibrosis in a mammalian subject by contacting a cell of the subject with a polynucleotide, primary construct or mmRNA having a translatable region that encodes a functional CFTR polypeptide, under conditions such that an effective amount of the CTFR polypeptide is present in the cell. Preferred target cells are epithelial, endothelial and mesothelial cells, such as the lung, and methods of administration are determined in view of the target tissue; i.e., for lung delivery, the RNA molecules are formulated for administration by inhalation.

[0773] In another embodiment, the present invention provides a method for treating hyperlipidemia in a subject, by introducing into a cell population of the subject with a modified mRNA molecule encoding Sortilin, a protein recently characterized by genomic studies, thereby ameliorating the hyperlipidemia in a subject. The SORT1 gene encodes a trans-Golgi network (TGN) transmembrane protein called Sortilin, Genetic studies have shown that one of five individuals has a single nucleotide polymorphism, rs12740374, in the 1p13 locus of the SORT1 gene that predisposes them to having low levels of low-density lipoprotein (LDL) and very-low-density lipoprotein (VLDL). Each copy of the minor allele, present in about 30% of people, alters LDL cholesterol by 8 mg/dL, while two copies of the minor allele, present in about 5% of the population, lowers LDL cholesterol 16 mg/dL. Carriers of the minor allele have also been shown to have a 40% decreased risk of myocardial infarction. Functional in vivo studies in mice describes that overexpression of SORT1 in mouse liver tissue led to significantly lower LDL-cholesterol levels, as much as 80% lower, and that silencing SORT1 increased LDL cholesterol approximately 200% (Musunuru K et al. From noncoding variant to phenotype via SORT1 at the 1p13 cholesterol locus. Nature 2010; 466: 714-721).

[0774] In another embodiment, the present invention provides a method for treating hematopoietic disorders, cardiovascular disease, oncology, diabetes, cystic fibrosis, neurological diseases, inborn errors of metabolism, skin and systemic disorders, and blindness. The identity of molecular targets to treat these specific diseases has been described (Templeton ed., Gene and Cell Therapy: Therapeutic Mechanisms and Strategies, 3^{rd} Edition, Bota Raton, FL:CRC Press; herein incorporated by reference in its entirety).

[0775] Provided herein, are methods to prevent infection and/or sepsis in a subject at risk of developing infection and/or sepsis, the method comprising administering to a subject in need of such prevention a composition comprising a polynucleotide, primary construct or mmRNA precursor encoding an anti-microbial polypeptide (e.g., an anti-bacterial polypeptide), or a partially or fully processed form thereof in an amount sufficient to prevent infection and/or sepsis. In certain embodiments, the subject at risk of developing infection and/or sepsis may be a cancer patient. In certain embodiments, the cancer patient may have undergone a conditioning regimen. In some embodiments, the conditioning regiment may include, but is not limited to, chemotherapy, radiation therapy, or both. As a non-limiting example, a polynucleotide, primary construct or mmRNA can encode Protein C, its zymogen or prepro-protein, the activated form of Protein C (APC) or variants of Protein C which are known in the art. The polynucleotides, primary constructs or mmRNA may be chemically modified and delivered to cells. Non-limiting examples of polypeptides which may be encoded within the chemically modified mRNAs of the present invention include those taught in U.S. Pat. Nos. 7,226,999; 7,498,305; 6,630,138 each of which is incorporated herein by reference in its entirety. These patents teach Protein C like molecules, variants and derivatives, any of which may be encoded within the chemically modified molecules of the present invention.

[0776] Further provided herein, are methods to treat infection and/or sepsis in a subject, the method comprising administering to a subject in need of such treatment a composition comprising a polynucleotide, primary construct or mmRNA precursor encoding an anti-microbial polypeptide (e.g., an anti-bacterial polypeptide), e.g., an anti-microbial polypeptide described herein, or a partially or fully processed form thereof in an amount sufficient to treat an infection and/or sepsis. In certain embodiments, the subject in need of treatment is a cancer patient. In certain embodiments, the cancer patient has undergone a conditioning regimen. In some embodiments, the conditioning regiment may include, but is not limited to, chemotherapy, radiation therapy, or both.

[0777] In certain embodiments, the subject may exhibits acute or chronic microbial infections (e.g., bacterial infections). In certain embodiments, the subject may have received or may be receiving a therapy. In certain embodiments, the therapy may include, but is not limited to, radiotherapy, chemotherapy, steroids, ultraviolet radiation, or a combination thereof. In certain embodiments, the patient may suffer from a microvascular disorder. In some embodiments, the microvascular disorder may be diabetes. In certain embodiments, the patient may have a wound. In some embodiments, the wound may be an ulcer. In a specific embodiment, the wound may be a diabetic foot ulcer. In certain embodiments, the subject may have one or more burn wounds. In certain embodiments, the administration may be local or systemic. In certain embodiments, the administration may be subcutaneous. In certain embodiments, the administration may be intravenous. In certain embodiments, the administration may be oral. In certain embodiments, the administration may be topical. In certain embodiments, the administration may be by inhalation. In certain embodiments, the administration may be rectal. In certain embodiments, the administration may be vaginal.

[0778] Other aspects of the present disclosure relate to transplantation of cells containing polynucleotide, primary construct, or mmRNA to a mammalian subject. Administration of cells to mammalian subjects is known to those of ordinary skill in the art, and include, but is not limited to, local implantation (e.g., topical or subcutaneous administration), organ delivery or systemic injection (e.g., intravenous injection or inhalation), and the formulation of cells in pharmaceutically acceptable carrier. Such compositions containing polynucleotide, primary construct, or mmRNA can be formulated for administration intramuscularly, transarterially, intraperitoneally, intravenously, intranasally, subcutaneously, endoscopically, transdermally, or intrathecally. In some embodiments, the composition may be formulated for extended release.

[0779] The subject to whom the therapeutic agent may be administered suffers from or may be at risk of developing a disease, disorder, or deleterious condition. Provided are methods of identifying, diagnosing, and classifying subjects on these bases, which may include clinical diagnosis, biomarker levels, genome-wide association studies (GWAS), and other methods known in the art.

### Wound Management

[0780] The polynucleotides, primary constructs or mmRNA of the present invention may be used for wound treatment, e.g. of wounds exhibiting delayed healing. Provided herein are methods comprising the administration of polynucleotide, primary construct or mmRNA in order to manage the treatment of wounds. The methods herein may further comprise steps carried out either prior to, concurrent with or post administration of the polynucleotide, primary construct or mmRNA. For example, the wound bed may need to be cleaned and prepared in order to facilitate wound healing and hopefully obtain closure of the wound. Several strategies may be used in order to promote wound healing and achieve wound closure including, but not limited to: (i) debridement, optionally repeated, sharp debridement (surgical removal of dead or infected tissue from a wound), optionally including chemical debriding agents, such as enzymes, to remove necrotic tissue; (ii) wound dressings to provide the wound with a moist, w arm environment and to promote tissue repair and healing.

[0781] Examples of materials that are used in formulating wound dressings include, but are not limited to: hydrogels (e.g., AQUASORB●; DUODERM●), hydrocolloids (e.g., AQUACEL●; COMFEEL●), foams (e.g., LYOFOAM●; SPYROSORB●), and alginates (e.g., ALGISITE●; CURASORB●); (iii) additional growth factors to stimulate cell division and proliferation and to promote wound healing e.g. becaplermin (REGRANEX GEL●), a human recombinant platelet-derived growth factor that is approved by the FDA for the treatment of neuropathic foot ulcers; (iv) soft-tissue wound coverage, a skin graft may be necessary to obtain coverage of clean, non-healing wounds. Examples of skin grafts that may be used for soft-tissue coverage include, but are not limited to: autologous skin grafts, cadaveric skin graft, bioengineered skin substitutes (e.g., APLIGRAF●; DERMAGRAFT●).

[0782] In certain embodiments, the polynucleotide, primary construct or mmRNA of the present invention may further include hydrogels (e.g., AQUASORB●; DUODERM●), hydrocolloids (e.g., AQUACEL●; COOMFEEL●), foams (e.g., LYOFOAM●; SPYROSORB●), and/or alginates (e.g., ALGISITE●; CURASORB●), In certain embodiments, the polynucleotide, primary construct or mmRNA of the present invention may be used with skin grafts including, but not limited to, autologous skin grafts, cadaveric skin graft, or bioengineered skin substitutes (e.g., APLIGRAF●; DERMAGRAFT●). In some embodiments, the polynucleotide, primary construct or mmRNA may be applied with would dressing formulations and/or skin grafts or they may be applied separately but methods such as, but not limited to, soaking or spraying.

[0783] In some embodiments, compositions for wound management may comprise a polynucleotide, primary construct or mmRNA encoding for an anti-microbial polypeptide (e.g., an anti-bacterial polypeptide) and/or an anti-viral polypeptide. A precursor or a partially or fully processed form of the anti-microbial polypeptide may be encoded. The composition may be formulated for administration using a bandage (e.g., an adhesive bandage). The anti-microbial polypeptide and/or the anti-viral polypeptide may be intermixed with the dressing compositions or may be applied separately, e.g., by soaking or spraying.

### Production of Antibodies

[0784] In one embodiment of the invention, the polynucleotides, primary constructs or mmRNA may encode antibodies and fragments of such antibodies. These may be produced by any one of the methods described herein. The antibodies may be of any of the different subclasses or isotypes of immunoglobulin such as, but not limited to, IgA, IgG, or IgM, or any of the other subclasses. Exemplary antibody molecules and fragments that may be prepared according to the invention include, but are not limited to, immunoglobulin molecules, substantially intact immunoglobulin molecules and those portions of an immunoglobulin molecule that may contain the paratope. Such portion of antibodies that contain the paratope include, but are not limited to Fab, Fab′, F(ab′)₂, F(v) and those portions known in the art.

[0785] The polynucleotides of the invention may encode variant antibody polypeptides which may have a certain identity with a reference polypeptide sequence, or have a similar or dissimilar binding characteristic with the reference polypeptide sequence.

[0786] Antibodies obtained by the methods of the present invention may be chimeric antibodies comprising non-human antibody-derived variable region(s) sequences, derived from the immunized animals, and human antibody-derived constant region(s) sequences. In addition, they can also be humanized antibodies comprising complementary determining regions (CDRs) of non-human antibodies derived from the immunized animals and the framework regions (FRs) and constant regions derived from human antibodies. In another embodiment, the methods provided herein may be useful for enhancing antibody protein product yield in a cell culture process.

### Managing Infection

[0787] In one embodiment, provided are methods for treating or preventing a microbial infection (e.g., a bacterial infection) and/or a disease, disorder, or condition associated with a microbial or viral infection, or a symptom thereof, in a subject, by administering a polynucleotide, primary construct or mmRNA encoding an anti-microbial polypeptide. Said administration may be in combination with an anti-microbial agent (e.g., an anti-bacterial agent), e.g., an anti-microbial polypeptide or a small molecule anti-microbial compound described herein. The anti-microbial agents include, but are not limited to, anti-bacterial agents, anti-viral agents, anti-fungal agents, anti-protozoal agents, anti-parasitic agents, and anti-prion agents.

[0788] The agents can be administered simultaneously, for example in a combined unit dose (e.g., providing simultaneous delivery of both agents). The agents can also be administered at a specified time interval, such as, but not limited to, an interval of minutes, hours, days or weeks. Generally, the agents may be concurrently bioavailable, e.g., detectable, in the subject. In some embodiments, the agents may be administered essentially simultaneously, for example two unit dosages administered at the same time, or a combined unit dosage of the two agents. In other embodiments, the agents may be delivered in separate unit dosages. The agents may be administered in any order, or as one or more preparations that includes two or more agents. In a preferred embodiment, at least one administration of one of the agents, e.g., the first agent, may be made within minutes, one, two, three, or four hours, or even within one or two days of the other agent, e.g., the second agent. In some embodiments, combinations can achieve synergistic results, e.g., greater than additive results, e.g., at least 25, 50, 75, 100, 200, 300, 400, or 500% greater than additive results.

Conditions Associated with Bacterial Infection

[0789] Diseases, disorders, or conditions which may be associated with bacterial infections include, but are not limited to one or more of the following: abscesses, actinomycosis, acute prostatitis, Aeromonas hydrophila, annual ryegrass toxicity, anthrax, bacillary peliosis, bacteremia, bacterial gastroenteritis, bacterial meningitis, bacterial pneumonia, bacterial vaginosis, bacterium-related cutaneous conditions, bartonellosis, BCG-oma, botryomycosis, botulism, Brazilian purpuric fever, Brodie abscess, brucellosis, Buruli ulcer, campylobacteriosis, caries, Carrion's disease, cat scratch disease, cellulitis, chlamydia infection, cholera, chronic bacterial prostatitis, chronic recurrent multifocal osteomyelitis, clostridial necrotizing enteritis, combined periodontic-endodontic lesions, contagious bovine pleuropneumonia, diphtheria, diphtheritic stomatitis, ehrlichiosis, erysipelas, piglottitis, erysipelas, Fitz-Hugh-Curtis syndrome, flea-borne spotted fever, foot rot (infectious pododermatitis), Garre's sclerosing osteomyclitis, Gonorrhea, Granuloma inguinale, human granulocytic anaplasmosis, human monocytotropic ehrlichiosis, hundred days' cough, impetigo, late congenital syphilitic oculopathy, legionellosis, Lemierre's syndrome, leprosy (Hansen's Disease), leptospirosis, listeriosis, Lyme disease, lymphadenitis, melioidosis, meningococcal disease, meningococcal septicaemia, methicillin-resistant Staphylococcus aureus (MRSA) infection, Mycobacterium avium-intracellulare (MAI), mycoplasma pneumonia, necrotizing fasciitis, nocardiosis, noma (cancrum oris or gangrenous stomatitis), omphalitis, orbital cellulitis, osteomyelitis, overwhelming post-splenectomy infection (OPSI), ovine brucellosis, pasteurellosis, periorbital cellulitis, pertussis (whooping cough), plague, pneumococcal pneumonia, Pott disease, proctitis, pseudomnonas infection, psittacosis, pyaemia, pyomyositis, Q fever, relapsing fever (typhinia), rheumatic fever, Rocky Mountain spotted fever (RMSF), rickettsiosis, salmonellosis, scarlet fever, sepsis, serratia infection, shigellosis, southern tick-associated rash illness, staphylococcal scalded skin syndrome, streptococcal pharyngitis, swimming pool granuloma, swine brucellosis, syphilis, syphilitic aortitis, tetanus, toxic shock syndrome (TSS), trachoma, trench fever, tropical ulcer, tuberculosis, tularemia, typhoid fever, typhus, urogenital tuberculosis, urinary tract infections, vancomycin-resistant Staphylococcus aureus infection, Waterhouse-Friderichsen syndrome, pseudotuberculosis (Yersinia) disease, and yersiniosis. Other diseases, disorders, and/or conditions associated with bacterial infections can include, for example, Alzheimer's disease, anorexia nervosa, asthma, atherosclerosis, attention deficit hyperactivity disorder, autism, autoimmune diseases, bipolar disorder, cancer (e.g., colorectal cancer, gallbladder cancer, lung cancer, pancreatic cancer, and stomach cancer), chronic fatigue syndrome, chronic obstructive pulmonary disease, Crohn's disease, coronary heart disease, dementia, depression, Guillain-Barré syndrome, metabolic syndrome, multiple sclerosis, myocardial infarction, obesity, obsessive-compulsive disorder, panic disorder, psoriasis, rheumatoid arthritis, sarcoidosis, schizophrenia, stroke, thromboangiitis obliterans (Buerger's disease), and Tourette syndrome.

### Bacterial Pathogens

[0790] The bacterium described herein can be a Gram-positive bacterium or a Gram-negative bacterium. Bacterial pathogens include, but are not limited to, Acinetobacter baumannii, Bacillus anthracis, Bacillus subtilis, Bordetella pertussis, Borrelia burgdorferi, Brucella abortus, Brucella canis, Brucella melitensis, Brucella suis, Campylobacter jejuni, Chlamydia pneumonia, Chlamydia trachomatis, Chlamydophila psittaci, Clostridium botulinum, Clostridium difficile, Clostridium perfringens, Clostridium tetani, coagulase Negative Staphylococcus, Corynebacterium diphtheria, Enterococcus faecalis, Enterococcus faecium, Escherichia coli, enterotoxigenic Escherichia coli (ETEC), enteropathogenic E. coli, E. coli O157:H7, Enterobacter sp., Francisella tularensis, Haemophilus infuenzae, Helicobacter pylori, Klebsiella pneumoniae, Legionella pneunmophila, Leptospira interrogans, Listeria monocytogenes, Moraxella catarralis, Mycobacterium leprae, Mycobacterium tuberculosis, Mycoplasma pneumoniae, Neisseria gonorrhoeae, Neisseria meningitides, Preteus mirabilis, Proteus sps., Pseudomonas aeruginosa, Rickettsia rickettsii, Salmonella typhi, Salmonella typhimurium, Serratia marcescens, Shigella flexneri, Shigella sonnei, Staphylococcus aureus, Staphylococcus epidermidis, Staphylococcus saprophyticus, Streptococcus agalactiae, Streptococcus mutans, Streptococcus pneumoniae, Streptococcus pyogenes, Treponema pallidum, Vibrio cholerae, and Yersinia pestis. Bacterial pathogens may also include bacteria that cause resistant bacterial infections, for example, clindamycin-resistant Clostridium difficile, fluoroquinolon-resistant Clostridium difficile, methicillin-resistant Staphylococcus aureus (MRSA), multidrug-resistant Enterococcus faecalis, multidrug-resistant Enterococcus fecium, multidrug-resistance Pseudomonas aeruginosa, multidrug-resistant Acinetobacter baumannii, and vancomycin-resistant Staphylococcus aureus (VRSA).

### Antibiotic Combinations

[0791] In one embodiment, the modified mRNA of the present invention may be administered in conjunction with one or more antibiotics. These include, but are not limited to Aknilox, Ambisome, Amoxycillin, Ampicillin, Augmentin, Avelox, Azithromycin, Bactroban, Betadine, Betnovate, Blephamide, Cefaclor, Cefadroxil, Cefdinir, Cefepime, Cefix, Cefixime, Cefoxitin, Cefpodoxime, Cefprozil, Cefuroxime, Cefzil, Cephalexin, Cephazolin, Ceptaz, Chloramphenicol, Chlorhexidine, Chloromycetin, Chlorsig, Ciprofloxacin, Clarithromycin, Clindagel, Clindamycin, Clindatech, Cloxacillin, Colistin, Co-trimnoxazole, Demeclocycline, Diclocil, Dicloxacillin, Doxycycline, Duricef, Erythromycin, Flamazine, Floxin, Framycetin, Fucidin, Furadantin, Fusidic, Gatifloxacin, Gemnifloxacin, Gemifloxacin, Ilosone, Iodine, Levaquin, Levofloxacin, Lomefloxacin, Maxaquin, Mefoxin, Meronem, Minocycline, Moxifloxacin, Myambutol, Mycostatin, Neosporin, Netromycin, Nitrofurantoin, Norfloxacin, Norilet, Ofloxacin, Omnicef, Ospamox, Oxytetracycline, Paraxin, Penicillin, Pneumovax, Polyfax, Povidone, Rifadin, Rifampin, Rifaximin, Rifinah, Rimactane, Rocephin, Roxithromycin, Seromnycin, Soframnycin, Sparfloxacin, Staphlex, Targocid, Tetracycline, Tetradox, Tetralysal, tobramycin, Tobramycin, Trecator, Tygacil, Vancocin, Velosef, Vibramnycin, Xifaxan, Zagam, Zitrotek, Zoderm, Zymar, and Zyvox.

### Antibacterial Agents

[0792] Exemplary anti-bacterial agents include, but are not limited to, aminoglycosides (e.g., amikacin (AMIKIN●), gentamicin (GARAMYCIN●), kanamycin (KANTREX●), neomycin (MYCIFRADIN●), netilmicin (NETROMYCIN●), tobramycin (NFECIN●), Paromomycin (HUMATIN●)), ansamycins (e.g., geldanamycin, herbimycin), carbacephem (e.g., loracarbef (LORABID●), Carbapenems (e.g., ertapenemn (INVANZ●), doripenemn (DORIBAX●), imipenem/cilastatin (PRIMAXIN●), meropenem (MERREM●), cephalosporins (first generation) (e.g., cefadroxil (DUTRICEF●), cefazolin (ANCEF●), cefalotin or cefalothin (KEFLIN●), cefalexin (KEFLEX●), cephalosporins (second generation) (e.g., cefaclor (CECLOR●), cefamandole (MANDOL●), cefoxitin (MEFOXIN●), cefprozil (CEFZIL●), cefuroxime (CEFTIN●, ZINNAT●)), cephalosporins (third generation) (e.g., cefixime (SUPRAX●), cefdinir (OMNICEF●, CEFDIEL●), cefditoren (SPECTRACEF●), cefoperazone (CEFOBID●), cefotaxime (CLAFORAN●), cefpodoxime (VANTIN●), ceftazidime (FORTAZ●), ceftibuten (CEDAX●), ceflizoxime (CEFIZOX●), ceftriaxone (ROCEPHIN●)), cephalosporins (fourth generation) (e.g., cefepime (MAXIPIME●)), cephalosporins (fifth generation) (e.g., ceftobiprole (ZEFTERA●)), glycopeptides (e.g., teicoplanin (TARGOCID●), vancomycin (VANCOCIN●), telavancin (VIBATIV●)), lincosamides (e.g., clindamycin (CLEOCIN●), lincomycin (LINCOCIN●)), lipopeptide (e.g., daptomycin (CUBICIN●)), macrolides (e.g., azithromycin (ZITHROMAX●, SUMAMED●, ZITROCIN●), clarithromycin (BIAXIN●), dirithromycin (DYNABAC●), erythromycin (ERYTHOCIN●, ERYTHROPED●), roxithromycin, troleandomycin (TAO●), telithromycin (KETEKO●), spectinomycin (TROBICIN●)), monobactams (e.g., aztreonam (AZACTAM●)), nitrofurans (e.g., furazolidone (FUJROXONE●), nitrofurantoin (MAICRODANTIN●, MACROBID●)), penicillins (e.g., amoxicillin (NOVAMOX●, AMOXIL●), ampicillin (PRINCIPEN●), azlocillin, carbenicillin (GEOCILLIN●), cloxacillin (TEGOPEN●), dicloxacillin (DYNAPEN●), flucloxacillin (FLOXAPEN●), mezlocillin (MEZLIN●), methicillin (STAPHCILLIN●), nafeillin (UNIPEN●), oxacillin (PROSTAPHLIN●), penicillin G (PENTIDS●), penicillin V (PEN-VEE-K●), piperacillin (PIPRACIL●), temocillin (NEGABAN●), ticarcillin (TICAR●)), penicillin combinations (e.g., amoxicillin/clavulanate (AUGMENTIN●), ampicillin/sulbactam (UNASYN●), piperacillin/tazobactam (ZOSYN●), ticarcillin/clavulanate (TIMENTIN●)), polypeptides (e.g., bacitracin, colistin (COCLY-MYCIN-S●), polymyxin B, quinolones (e.g., ciprofloxacin (CIPRO●, CIPROXIN●, CIPROBAY●), enoxacin (PENETREX●), gatifloxacin (TEQUIN●), levofloxacin (LEVAQLUIN●), lomefloxacin (MAXAQUIN●), moxifloxacin (AVELOX●), nalidixic acid (NEGGRAM●), norfloxacin (NOROXIN●), ofloxacin (FLOXIN●, OCUFLOX●), trovafloxacin (TROVAN●), grepafloxacin (RAXAR●), sparfloxacin (ZAGAM●), temafloxacin (ONINIFLOX●)), sulfonamides (e.g., mafenide (SULFAMYLON●), sulfonarmidochrysoidine (PRONTOSIL●), sulfacetamide (SULAMY●, BLEPIH-10●), sulfadiazine (MICRO-SLJLFON●), silver sulfadiazine (SILVADENE●), sulfamethizole (THIOSULFIL FORTE●), sulfamethoxazole (GANTANOL●), sulfanilimide, sulfasalazine (AZULFIDINE●), sulfisoxazole (GANTRISIN●), trimethoprim (PROLOPRIM●), TRIMPEX●), trimethoprim-sulfamethoxazole (co-trimoxazole) (TMP-SMX) (BACTRIM●, SEPIRA●), tetracyclines (e.g., demeclocycline (DECLOMYCIN●), doxycycline (VIBRAMYCIN●), minocycline (MINOCIN●), oxytetracycline (TERRAMYCIN●), tetracycline (SUMYCIN●, ACHROMYCIN● V, STECLIN●)), drugs against mycobacteria (e.g., clofazimine (LAMPRENE●), dapsone (AVLOSULFON●), capreomycin (CAPASTAT●), cycloserine (SEROMYCIN●), etharmbutol (MYAMBUTOL●), ethionamide (TRECATOR●), isoniazid (I.N.H.●), pyrazinamide (ALINAMIDE●), rifampin (RIFADIN●, RIMACTANE●), rifabutin (MYCOBUTIN●), rifapentine (PRIFTIN●), streptomycin), and others (e.g., arsphenanine (SALVARSAN●), chloramphenicol (CHLOROMYCETIN●), fosfomycin (MONUROL●), fusidic acid (FUCIDIN●), linezolid (ZYVOX●), metronidazole (FLAGYL●), mupirocin (BACTROBAN●), platensimycin, quinupristin/dalfopristin (SYNERCID●), rifaximin (XIFAXAN●), thiamphenicol, tigecycline (TIGACYL●), tinidazole (TINDAMAX●, FASIGYN●)).

Conditions Associated with Viral Infection

[0793] In another embodiment, provided are methods for treating or preventing a viral infection and/or a disease, disorder, or condition associated with a viral infection, or a symptom thereof, in a subject, by administering a polynucleotide, primary construct or mmRNA encoding an anti-viral polypeptide, e.g., an anti-viral polypeptide described herein in combination with an anti-viral agent, e.g., an anti-viral polypeptide or a small molecule anti-viral agent described herein.

[0794] Diseases, disorders, or conditions associated with viral infections include, but are not limited to, acute febrile pharyngitis, pharyngoconjunctival fever, epidemic keratoconjunctivitis, infantile gastroenteritis, Coxsackie infections, infectious mononucleosis, Burkitt lymphoma, acute hepatitis, chronic hepatitis, hepatic cirrhosis, hepatocellular carcinoma, primary HSV-1 infection (e.g., gingivostomatitis in children, tonsillitis and pharyngitis in adults, keratoconjunctivitis), latent HSV-1 infection (e.g., herpes labialis and cold sores), primary HSV-2 infection, latent HSV-2 infection, aseptic meningitis, infectious mononucleosis, Cytomegalic inclusion disease, Kaposi sarcoma, multicentric Castleman disease, primary effusion lymphoma, AIDS, influenza, Reye syndrome, measles, postinfectious encephalomyelitis, Mumps, hyperplastic epithelial lesions (e.g., common, flat, plantar and anogenital warts, laryngeal papillomas, epidermodysplasia verruciformis), cervical carcinoma, squamous cell carcinomas, croup, pneumonia, bronchiolitis, common cold, Poliomyelitis, Rabies, bronchiolitis, pneumonia, influenza-like syndrome, severe bronchiolitis with pneumonia, German measles, congenital rubella, Varicella, and herpes zoster.

### Viral Pathogens

[0795] Viral pathogens include, but are not limited to, adenovirus, coxsackievirus, dengue virus, encephalitis virus, Epstein-Barr virus, hepatitis A virus, hepatitis B virus, hepatitis C virus, herpes simplex virus type 1, herpes simplex virus type 2, cytomegalovirus, human herpesvirus type 8, human immunodeficiency virus, influenza virus, measles virus, mumps virus, human papillomavirus, parainfluenza virus, poliovirus, rabies virus, respiratory syncytial virus, rubella virus, varicella-zoster virus, West Nile virus, and yellow fever virus. Viral pathogens may also include viruses that cause resistant viral infections.

### Antiviral Agents

[0796] Exemplary anti-viral agents include, but are not limited to, abacavir (ZIAGEN●), abacavir/lamivudine/zidovudine (trizivir●), aciclovir or acyclovir (CYCLOVIR●, HERPEX●, ACIVIR●, ACIVIRAX●, ZOVIRAX●, ZOVIR●), adefovir (Preveon●, Hepsera●), amantadine (SYMMETREL●), amprenavir (AGENERASE●), ampligen, arbidol, atazanavir (REYATAZ●), boceprevir, cidofovir, darunavir (PREZISTA●), delavirdine (RESCRIPTOR●), didanosine (VIDEX●), docosanol (ABREVA●), edoxudine, efavirenz (SUSTIVA●, STOCRIN●), emtricitabine (EMTRIVA●), emtricitabine/tenofovir/efavirenz (ATRIPLA●), enfuvirtide (FUZEON●), entecavir (BARACLUDE●, ENTAVIR●), famciclovir (FAMVIR●), fomivirsen (VITRAVENE●), fosamprenavir (LEXIVA●, TELZIR●), foscarnet (FOSCAVIR●), fosfonet, ganciclovir (CYTOVENE●, CYMEVENE●, VITRASERT●), GS 9137 (ELVITfEGRAVIR●), imiquimod (ALDARA●, ZYCLARA●, BESELNA●), indinavir (CRIXIVAN●), inosine, inosine pranobex (IMUNOVIR●), interferon type I, interferon type II, interferon type III, kutapressin (NEXAVIR●), lamivudine (ZEFFIX●, HEPTOVIR●, EPIVIR●), lamivudine/zidovudine (COMBIVIR●), lopinavir, loviride, maraviroc (SELZENTRY●, CELSENTRI●), methisazone, MK-2048, moroxydine, nelfinavir (VIRACEPT●), nevirapine (VIRAMUNE●), oseltamivir (TAMIFLU●), peginterferon alfa-2a (PEGASYS●), penciclovir (DENAVIR●), peranivir, pleconaril, podophyllotoxin (CONDYLOX●), raltegravir (ISENTRESS●), ribavirin (COPEGUs●, REBETOL●, RIBASPHIERE●, VILONA● AND VIRAZOLE●), rimantadine (FLUTMADINE●), ritonavir (NORVIR●), pyramidine, saquinavir (INVIRASE●, FORTOVASE●), stavudine, tea tree oil (melaleuca oil), tenofovir (VIREAD●), tenofovir/emtricitabine (TRUVADA●), tipranavir (APTIVUS●), trifluridine (VIROPTIC●), tromantadine (VIRU-MERZ●), valaciclovir (VALTREX●), valganciclovir (VALCYTE●), vicriviroc, vidarabine, viramidine, zalcitabine, zanriamvir (RELENZA●), and zidovudine (azidothymidine (AZT), RETROVIR●, RETROVIS●).

Conditions Associated with Fuingal Infections

[0797] Diseases, disorders, or conditions associated with fungal infections include, but are not limited to, aspergillosis, blastomycosis, candidiasis, coccidioidomycosis, cryptococcosis, histoplasmosis, mycetomas, paracoccidioidomycosis, and tinea pedis. Furthermore, persons with immuno-deficiencies are particularly susceptible to disease by fungal genera such as Aspergillus, Candida, Cryptoccocus, Histoplasma, and Pneumocystis. Other fungi can attack eyes, nails, hair, and especially skin, the so-called dermatophytic fungi and keratinophilic fungi, and cause a variety of conditions, of which ringworms such as athlete's foot are common. Fungal spores are also a major cause of allergies, and a wide range of fungi from different taxonomic groups can evoke allergic reactions in some people.

### Fungal Pathogens

[0798] Fungal pathogens include, but are not limited to, Ascomycota (e.g., Fusarium oxysporum, Pneumocystis jirovecii, Aspergillus spp., Coccidioides immitis/posadasii, Candida albicans), Basidiomycota (e.g., Filobasidiella neoformans, Trichosporon), Microsporidia (e.g., Encephalitozoon cuniculi, Enterocytozoon bieneusi), and Mucoromycotina (e.g., Mucor circinelloides, Rhizopus oryzae, Lichtheimia corymbifera).

### Anti-Fingal Agents

[0799] Exemplary anti-fungal agents include, but are not limited to, polyene antifungals (e.g., natamycin, rimocidin, filipin, nystatin, amphotericin B, candicin, hamycin), imidazole antifungals (e.g., miconazole (MICATIN●, DAKTARIN●), ketoconazole (NIZORAL●, FUNGORAL●, SEBIZOLE●), clotrimazole (LOTRIMIN●, LOTRIMIN● AF, CANESTEN●), econazole, omoconazole, bifonazole, butoconazole, fenticonazole, isoconazole, oxiconazole, sertaconazole (ERTACZO●), sulconazole, tioconazole), triazole antifungals (e.g., albaconazole fluconazole, itraconazole, isavuconazole, ravuconazole, posaconazole, voriconazole, terconazole), thiazole antifungals (e.g., abafungin), allylamines (e.g., terbinafine (LAMISIL●), naftifine (NAFTIN●), butenafine (LOTRIMIN Ultra)), echinocandins (e.g., anidulafungin, caspofungin, micafungin), and others (e.g., polygodial, benzoic acid, ciclopirox, tolnaftate (TINACTIN●, DESENEX●, AFTATE●), undecylenic acid, flucytosine or 5-fluorocytosine, griseofulvin, haloprogin, sodium bicarbonate, allicin).

Conditions Associated with Protozoal Infection

[0800] Diseases, disorders, or conditions associated with protozoal infections include, but are not limited to, amoebiasis, giardiasis, trichomoniasis, African Sleeping Sickness, American Sleeping Sickness, leishrnaniasis (K_ala-Azar), balantidiasis, toxoplasmosis, malaria, acanthamoeba keratitis, and babesiosis.

### Protozoan Pathogens

[0801] Protozoal pathogens include, but are not limited to, Entamoeba histolytica, Giardia lambila, Trichomonas vaginalis, Trypanosoma brucei, T. cruzi, Leishmania donovani, Balantidium coli, Toxoplasma gondii, Plasmodium spp., and Babesia microti.

### Anti-Protozoan Agents

[0802] Exemplary anti-protozoal agents include, but are not limited to, eflornithine, furazolidone (FUROXONE●, DEPENDAL-M●), melarsoprol, metronidazole (FLAGYL●), ornidazole, paromomycin sulfate (HUMATIN●), pentamidine, pyrimethamine (DARAPRIM●), and tinidazole (TINDAMAX●, FASIGYN●).

Conditions Associated with Parasitic Infection

[0803] Diseases, disorders, or conditions associated with parasitic infections include, but are not limited to, acanthamoeba keratitis, amoebiasis, ascariasis, babesiosis, balantidiasis, baylisascariasis, chagas disease, clonorchiasis, cochliomyia, cryptosporidiosis, diphyllobothriasis, dracunculiasis, echinococcosis, elephantiasis, enterobiasis, fascioliasis, fasciolopsiasis, filariasis, giardiasis, gnathostomiasis, hymenolepiasis, isosporiasis, katayarna fever, leishrnaniasis, lyme disease, malaria, metagonimiasis, myiasis, onchocerciasis, pediculosis, scabies, schistosomiasis, sleeping sickness, strongyloidiasis, taeniasis, toxocariasis, toxoplasmosis, trichinosis, and trichuriasis.

### Parasitic Pathogens

[0804] Parasitic pathogens include, but are not limited to, Acanthamoeba, Anisakis, Ascaris lumbricoides, botfly, Balantidium coli, bedbug, Cestoda, chiggers, Cochliomyia hominivorax, Entamoeba histolytica, Fasciola hepatica, Giardia lamblia, hookworm, Leishmania, Linguatula serrata, liver fluke, Loa loa, Paragonimus, pinworm, Plasmodium falciparum, Schistosoma, Strongyloides stercoralis, mite, tapeworm, Toxoplasma gondii, Trypanosoma, whipworm, Wuchereria bancrofti.

### Anti-Parasitic Agents

[0805] Exemplary anti-parasitic agents include, but are not limited to, antinematodes (e.g., mebendazole, pyrantel pamoate, thiabendazole, diethylcarbamazine, ivermectin), anticestodes (e.g., niclosamide, praziquantel, albendazole), antitrematodes (e.g., praziquantel), antiamoebics (e.g., rifampin, amphotericin B), and antiprotozoals (e.g., melarsoprol, eflornithine, metronidazole, tinidazole).

Conditions Associated with Prion Infection

[0806] Diseases, disorders, or conditions associated with prion infections include, but are not limited to Creutzfeldt-Jakob disease (CJD), iatrogenic Creutzfeldt-Jakob disease (iCJD), variant Creutzfeldt-Jakob disease (vCJD), familial Creutzfeldt-Jakob disease (fCJD), sporadic Creutzfeldt-Jakob disease (sCJD), Gerstmann-Sträussler-Scheinker syndrome (GSS), fatal familial insomnia (FFI), Kuru, Scrapie, bovine spongiform encephalopathy (BSE), mad cow disease, transmissible mink encephalopathy (TME), chronic wasting disease (CWD), feline spongiform encephalopathy (FSE), exotic ungulate encephalopathy (EiJE), and spongiform encephalopathy.

### Anti-Prion Agents

[0807] Exemplary anti-prion agents include, but are not limited to, flupirtine, pentosan polysuphate, quinacrine, and tetracyclic compounds.

### Modulation of the Immune Response

### Avoidance of the Immune Response

[0808] As described herein, a useful feature of the polynucleotides, primary constructs or mmRNA of the invention is the capacity to reduce, evade or avoid the innate immune response of a cell. In one aspect, provided herein are polynucleotides, primary constructs or mmRNA encoding a polypeptide of interest which when delivered to cells, results in a reduced immune response from the host as compared to the response triggered by a reference compound, e.g. an unmodified polynucleotide corresponding to a polynucleotide, primary construct or mmRNA of the invention, or a different polynucleotide, primary construct or mmRNA of the invention. As used herein, a “reference compound” is any molecule or substance which when administered to a mammal, results in an innate immune response having a known degree, level or amount of immune stimulation. A reference compound need not be a nucleic acid molecule and it need not be any of the polynucleotides, primary constructs or mmRNA of the invention. Hence, the measure of a polynucleotides, primary constructs or mmRNA avoidance, evasion or failure to trigger an immune response can be expressed in terms relative to any compound or substance which is known to trigger such a response.

[0809] The term “innate immune response” includes a cellular response to exogenous single stranded nucleic acids, generally of viral or bacterial origin, which involves the induction of cytokine expression and release, particularly the interferons, and cell death. As used herein, the innate immune response or interferon response operates at the single cell level causing cytokine expression, cytokine release, global inhibition of protein synthesis, global destruction of cellular RNA, upregulation of major histocompatibility molecules, and/or induction of apoptotic death, induction of gene transcription of genes involved in apoptosis, anti-growth, and innate and adaptive immune cell activation. Some of the genes induced by type I IFNs include PKR, ADAR (adenosine deaminase acting on RNA), OAS (2′,5′-oligoadenylate synthetase), RNase L, and Mx proteins. PKR and ADAR lead to inhibition of translation initiation and RNA editing, respectively. OAS is a dsRNA-dependent synthetase that activates the endoribonuclease RNase L to degrade ssRNA.

[0810] In some embodiments, the innate immune response comprises expression of a Type I or Type II interferon, and the expression of the Type I or Type II interferon is not increased more than two-fold compared to a reference from a cell which has not been contacted with a polynucleotide, primary construct or mmRNA of the invention.

[0811] In some embodiments, the innate immune response comprises expression of one or more IFN signature genes and where the expression of the one of more IFN signature genes is not increased more than three-fold compared to a reference from a cell which has not been contacted with the polynucleotide, primary construct or mmRNA of the invention.

[0812] While in some circumstances, it might be advantageous to eliminate the innate immune response in a cell, the invention provides polynucleotides, primary constructs and mmRNA that upon administration result in a substantially reduced (significantly less) the immune response, including interferon signaling, without entirely eliminating such a response.

[0813] In some embodiments, the immune response is lower by 10%, 20%, 30%, 40%, 50%, 60%, 70%, 80%, 90%, 95%, 99%, 99.9%, or greater than 99.9% as compared to the immune response induced by a reference compound. The immune response itself may be measured by determining the expression or activity level of Type I interferons or the expression of interferon-regulated genes such as the toll-like receptors (e.g., TLR7 and TLR8). Reduction of innate immune response can also be measured by measuring the level of decreased cell death following one or more administrations to a cell population; e.g., cell death is 10%, 25%, 50%, 75%, 85%, 90%, 95%, or over 95% less than the cell death frequency observed with a reference compound. Moreover, cell death may affect fewer than 50%, 40%, 30%, 20%, 10%, 5%, 1%, 0.1%, 0.01% or fewer than 0.01% of cells contacted with the polynucleotide, primary construct or mmRNA.

[0814] In another embodiment, the polynucleotide, primary construct or mmRNA of the present invention is significantly less immunogenic than an unmodified in vitro-synthesized RNA molecule polynucleotide, or primary construct with the same sequence or a reference compound. As used herein, “significantly less immunogenic” refers to a detectable decrease in immunogenicity. In another embodiment, the term refers to a fold decrease in immunogenicity. In another embodiment, the term refers to a decrease such that an effective amount of the polynucleotide, primary construct or mmRNA can be administered without triggering a detectable immune response. In another embodiment, the term refers to a decrease such that the polynucleotide, primary construct or mmRNA can be repeatedly administered without eliciting an immune response sufficient to detectably reduce expression of the recombinant protein. In another embodiment, the decrease is such that the polynucleotide, primary construct or mmRNA can be repeatedly administered without eliciting an immune response sufficient to eliminate detectable expression of the recombinant protein.

[0815] In another embodiment, the polynucleotide, primary construct or mmRNA is 2-fold less immunogenic than its unmodified counterpart or reference compound. In another embodiment, immunogenicity is reduced by a 3-fold factor. In another embodiment, immunogenicity is reduced by a 5-fold factor. In another embodiment, immunogenicity is reduced by a 7-fold factor. In another embodiment, immunogenicity is reduced by a 10-fold factor. In another embodiment, immunogenicity is reduced by a 15-fold factor. In another embodiment, immunogenicity is reduced by a fold factor. In another embodiment, immunogenicity is reduced by a 50-fold factor. In another embodiment, immunogenicity is reduced by a 100-fold factor. In another embodiment, immunogenicity is reduced by a 200-fold factor. In another embodiment, immunogenicity is reduced by a 500-fold factor. In another embodiment, immunogenicity is reduced by a 1000-fold factor. In another embodiment, immunogenicity is reduced by a 2000-fold factor. In another embodiment, immunogenicity is reduced by another fold difference.

[0816] Methods of determining immunogenicity are well known in the art, and include, e.g. measuring secretion of cytokines (e.g. IL-12, IFNalpha, TNF-alpha, RANTES, MIP-1alpha or beta, IL-6, IFN-beta, or IL-8), measuring expression of DC activation markers (e.g. CD83, HLA-DR, CD80 and CD86), or measuring ability to act as an adjuvant for an adaptive immune response.

[0817] The the polynucleotide, primary construct or mmRNA of the invention, including the combination of modifications taught herein may have superior properties making them more suitable as therapeutic modalities.

[0818] It has been determined that the “all or none” model in the art is sorely insufficient to describe the biological phenomena associated with the therapeutic utility of modified mRNA. The present inventors have determined that to improve protein production, one may consider the nature of the modification, or combination of modifications, the percent modification and survey more than one cytokine or metric to determine the efficacy and risk profile of a particular modified mRNA.

[0819] In one aspect of the invention, methods of determining the effectiveness of a modified mRNA as compared to unmodified involves the measure and analysis of one or more cytokines whose expression is triggered by the administration of the exogenous nucleic acid of the invention. These values are compared to administration of an unmodified nucleic acid or to a standard metric such as cytokine response, PolyIC, R-848 or other standard known in the art.

[0820] One example of a standard metric developed herein is the measure of the ratio of the level or amount of encoded polypeptide (protein) produced in the cell, tissue or organism to the level or amount of one or more (or a panel) of cytokines whose expression is triggered in the cell, tissue or organism as a result of administration or contact with the modified nucleic acid. Such ratios are referred to herein as the Protein:Cytokine Ratio or “PC” Ratio. The higher the PC ratio, the more efficacious the modified nucleic acid (polynucleotide encoding the protein measured). Preferred PC Ratios, by cytokine, of the present invention may be greater than 1, greater than 10, greater than 100, greater than 1000, greater than 10,000 or more. Modified nucleic acids having higher PC Ratios than a modified nucleic acid of a different or unmodified construct are preferred.

[0821] The PC ratio may be further qualified by the percent modification present in the polynucleotide. For example, normalized to a 100% modified nucleic acid, the protein production as a function of cytokine (or risk) or cytokine profile can be determined.

[0822] In one embodiment, the present invention provides a method for determining, across chemistries, cytokines or percent modification, the relative efficacy of any particular modified the polynucleotide, primary construct or mmRNA by comparing the PC Ratio of the modified nucleic acid (polynucleotide, primary construct or mmRNA).

[0823] mmRNA containing varying levels of nucleobase substitutions could be produced that maintain increased protein production and decreased immunostimulatory potential. The relative percentage of any modified nucleotide to its naturally occurring nucleotide counterpart can be varied during the IVT reaction (for instance, 100, 50, 25, 10, 5, 2.5, 1, 0.1, 0.01% 5 methyl cytidine usage versus cytidine; 100, 50, 25, 10, 5, 2.5, 1, 0.1, 0.01% pseudouridine or N1-methyl-pseudouridine usage versus uridine). mmRNA can also be made that utilize different ratios using 2 or more different nucleotides to the same base (for instance, different ratios of pseudouridine and N1-methyl-pseudouridine). mmRNA can also be made with mixed ratios at more than 1 “base” position, such as ratios of 5 methyl cytidine/cytidine and pseudouridine/N1-methyl-pseudouridine/uridine at the same time. Use of modified mRNA with altered ratios of modified nucleotides can be beneficial in reducing potential exposure to chemically modified nucleotides. Lastly, positional introduction of modified nucleotides into the mmRNA which modulate either protein production or immunostimulatory potential or both is also possible. The ability of such mmRNA to demonstrate these improved properties can be assessed in vitro (using assays such as the PBMC assay described herein), and can also be assessed in vivo through measurement of both mmRNA-encoded protein production and mediators of innate immune recognition such as cytokines.

[0824] In another embodiment, the relative immunogenicity of the polynucleotide, primary construct or mmRNA and its unmodified counterpart are determined by determining the quantity of the polynucleotide, primary construct or mmRNA required to elicit one of the above responses to the same degree as a given quantity of the unmodified nucleotide or reference compound. For example, if twice as much polynucleotide, primary construct or mmRNA is required to elicit the same response, than the polynucleotide, primary construct or mmRNA is two-fold less immunogenic than the unmodified nucleotide or the reference compound.

[0825] In another embodiment, the relative immunogenicity of the polynucleotide, primary construct or mmRNA and its unmodified counterpart are determined by determining the quantity of cytokine (e.g. IL-12, IFNalpha, TNF-alpha, RANTES, MIP-1alpha or beta, IL-6, IFN-beta, or IL-8) secreted in response to administration of the polynucleotide, primary construct or mmRNA, relative to the same quantity of the unmodified nucleotide or reference compound. For example, if one-half as much cytokine is secreted, than the polynucleotide, primary construct or mmRNA is two-fold less immunogenic than the unmodified nucleotide. In another embodiment, background levels of stimulation are subtracted before calculating the immunogenicity in the above methods.

[0826] Provided herein are also methods for performing the titration, reduction or elimination of the immune response in a cell or a population of cells. In some embodiments, the cell is contacted with varied doses of the same polynucleotides, primary constructs or mmRNA and dose response is evaluated. In some embodiments, a cell is contacted with a number of different polynucleotides, primary constructs or mmRNA at the same or different doses to determine the optimal composition for producing the desired effect. Regarding the immune response, the desired effect may be to avoid, evade or reduce the immune response of the cell. The desired effect may also be to alter the efficiency of protein production.

[0827] The polynucleotides, primary constructs and/or mmRNA of the present invention may be used to reduce the immune response using the method described in International Publication No. WO2013003475, herein incorporated by reference in its entirety.

### Activation of the Immune Response: Vaccines

[0828] Additionally, certain modified nucleosides, or combinations thereof, when introduced into the polynucleotides, primary constructs or mmRNA of the invention will activate the innate immune response. Such activating molecules are useful as adjuvants when combined with polypeptides and/or other vaccines. In certain embodiments, the activating molecules contain a translatable region which encodes for a polypeptide sequence useful as a vaccine, thus providing the ability to be a self-adjuvant.

[0829] In one embodiment, the polynucleotides, primary constructs and/or mmRNA of the invention may encode an immunogen. The delivery of the polynucleotides, primary constructs and/or mmRNA encoding an immunogen may activate the immune response. As a non-limiting example, the polynucleotides, primary constructs and/or mmRNA encoding an immunogen may be delivered to cells to trigger multiple innate response pathways (see International Pub. No. WO2012006377; herein incorporated by reference in its entirety). As another non-limiting example, the polynucleotides, primary constructs and mmRNA of the present invention encoding an immunogen may be delivered to a vertebrate in a dose amount large enough to be immunogenic to the vertebrate (see International Pub. No, WO2012006372 and WO2012006369; each of which is herein incorporated by reference in their entirety).

[0830] The polynucleotides, primary constructs or mmRNA of invention may encode a polypeptide sequence for a vaccine and may further comprise an inhibitor. The inhibitor may impair antigen presentation and/or inhibit various pathways known in the art. As a non-limiting example, the polynucleotides, primary constructs or mmRNA of the invention may be used for a vaccine in combination with an inhibitor which can impair antigen presentation (see International Pub. No. WO2012089225 and WO2012089338; each of which is herein incorporated by reference in their entirety).

[0831] In one embodiment, the polynucleotides, primary constructs or mmRNA of the invention may be self-replicating RNA. Self-replicating RNA molecules can enhance efficiency of RNA delivery and expression of the enclosed gene product. In one embodiment, the polynucleotides, primary constructs or mmRNA may comprise at least one modification described herein and/or known in the art. In one embodiment, the self-replicating RNA can be designed so that the self-replicating RNA does not induce production of infectious viral particles. As a non-limiting example the self-replicating RNA may be designed by the methods described in US Pub. No. US20110300205 and International Pub. No. WO2011005799, each of which is herein incorporated by reference in their entirety.

[0832] In one embodiment, the self-replicating polynucleotides, primary constructs or mmRNA of the invention may encode a protein which may raise the immune response. As a non-limiting example, the polynucleotides, primary constructs or mmRNA may be self-replicating mRNA may encode at least one antigen (see US Pub. No. US20110300205 and International Pub. Nos. WO2011005799, WO2013006838 and WO2013006842; each of which is herein incorporated by reference in their entirety).

[0833] In one embodiment, the self-replicating polynucleotides, primary constructs or mmRNA of the invention may be formulated using methods described herein or known in the art. As a non-limiting example, the self-replicating RNA may be formulated for delivery by the methods described in Geall et al (Nonviral delivery of self-amplifying RNA vaccines, PNAS 2012; PMID: 22908294).

[0834] In one embodiment, the polynucleotides, primary constructs or mmRNA of the present invention may encode amphipathic and/or immunogenic amphipathic peptides.

[0835] In on embodiment, a formulation of the polynucleotides, primary constructs or mmRNA of the present invention may further comprise an amphipathic and/or immunogenic amphipathic peptide. As a non-limiting example, the polynucleotides, primary constructs or mmRNA comprising an amphipathic and/or immunogenic amphipathic peptide may be formulated as described in US. Pub. No. US20110250237 and International Pub. Nos. WO2010009277 and WO2010009065; each of which is herein incorporated by reference in their entirety.

[0836] In one embodiment, the polynucleotides, primary constructs or mmRNA of the present invention may be immunostimulatory. As a non-limiting example, the polynucleotides, primary constructs or mmRNA may encode all or a part of a positive-sense or a negative-sense stranded RNA virus genome (see International Pub No. WO2012092569 and US Pub No. US20120177701, each of which is herein incorporated by reference in their entirety). In another non-limiting example, the immunostimulatory polynucleotides, primary constructs or mmRNA of the present invention may be formulated with an excipient for administration as described herein and/or known in the art (see International Pub No. WO2012068295 and US Pub No. US20120213812, each of which is herein incorporated by reference in their entirety).

[0837] In one embodiment, the response of the vaccine formulated by the methods described herein may be enhanced by the addition of various compounds to induce the therapeutic effect. As a non-limiting example, the vaccine formulation may include a MHC II binding peptide or a peptide having a similar sequence to a MHC II binding peptide (see International Pub Nos. WO2012027365, WO2011031298 and US Pub No. US20120070493, US20110110965, each of which is herein incorporated by reference in their entirety). As another example, the vaccine formulations may comprise modified nicotinic compounds which may generate an antibody response to nicotine residue in a subject (see International Pub No. WO2012061717 and US Pub No. US20120114677, each of which is herein incorporated by reference in their entirety).

### Naturally Occurring Mutants

[0838] In another embodiment, the polynucleotides, primary construct and/or mmRNA can be utilized to express variants of naturally occurring proteins that have an improved disease modifying activity, including increased biological activity, improved patient outcomes, or a protective function, etc. Many such modifier genes have been described in mammals (Nadeau, Current Opinion in Genetics & Development 2003 13:290-295; Hamilton and Yu, PLoS Genet. 2012; 8:e1002644; Corder et al., Nature Genetics 1994 7:180-184; all herein incorporated by reference in their entireties). Examples in humans include Apo E2 protein, Apo A-I variant proteins (Apo A-I Milano, Apo A-I Paris), hyperactive Factor IX protein (Factor IX Padua Arg338Lys), transthyretin mutants (TTR Thr119 Met). Expression of ApoE2 (cys112, cys158) has been shown to confer protection relative to other ApoE isoforms (ApoE3 (cys112, arg158), and ApoE4 (arg112, arg158)) by reducing susceptibility to Alzheimer's disease and possibly other conditions such as cardiovascular disease (Corder et al., Nature Genetics 1994 7:180-184; Seripa et al., Rejuvenation Res. 2011 14:491-500; Liu et al. Nat Rev Neurol. 2013 9:106-118; all herein incorporated by reference in their entireties). Expression of Apo A-I variants has been associated with reduced cholesterol (deGoma and Rader, 2011 Nature Rev Cardiol 8:266-271; Nissen et al., 2003 JAMA 290:2292-2300; all herein incorporated by reference in its entirety). The amino acid sequence of ApoA-I in certain populations has been changed to cysteine in Apo A-I Milano (Arg 173 changed to Cys) and in Apo A-I Paris (Arg 151 changed to Cys). Factor IX mutation at position R338L (FIX Padua) results in a Factor IX protein that has ˜10-fold increased activity (Simioni et al., N Engl. J Med. 2009 361:1671-1675; Finn et al., Blood. 2012 120:4521-4523; Cantore et al., Blood. 2012 120:4517-20; all herein incorporated by reference in their entireties). Mutation of transthyretin at positions 104 or 119 (Arg104 His, Thr119Met) has been shown to provide protection to patients also harboring the disease causing Val30Met mutations (Saraiva, Hum Mutat. 2001 17:493-503; DATA BASE ON TRANSTHYRETIN MUTATIONS http://www.ibmc.up.pt/mjsaraiva/ttrmut.html; all herein incorporated by reference in its entirety). Differences in clinical presentation and severity of symptoms among Portuguese and Japanese Met 30 patients carrying respectively the Met 119 and the His104 mutations are observed with a clear protective effect exerted by the non pathogenic mutant (Coelho et al. 1996 Neuromuscular Disorders (Suppl) 6: S20; Terazaki et al. 1999. Biochem Biophys Res Commun 264: 365-370; all herein incorporated by reference in its entirety), which confer more stability to the molecule. A modified mRNA encoding these protective TTR alleles can be expressed in TTR amyloidosis patients, thereby reducing the effect of the pathogenic mutant TTR protein.

### Major Groove Interacting Partners

[0839] As described herein, the phrase “major groove interacting partner” refers to RNA recognition receptors that detect and respond to RNA ligands through interactions, e.g. binding, with the major groove face of a nucleotide or nucleic acid. As such, RNA ligands comprising modified nucleotides or nucleic acids such as the polynucleotide, primary construct or mmRNA as described herein decrease interactions with major groove binding partners, and therefore decrease an innate immune response.

[0840] Example major groove interacting, e.g. binding, partners include, but are not limited to the following nucleases and helicases. Within membranes, TLRs (Toll-like Receptors) 3, 7, and 8 can respond to single- and double-stranded RNAs. Within the cytoplasm, members of the superfamily 2 class of DEX(D/H) helicases and ATPases can sense RNAs to initiate antiviral responses. These helicases include the RIG-I (retinoic acid-inducible gene 1) and MDA5 (Melanoma differentiation-associated gene 5). Other examples include laboratory of genetics and physiology 2 (LGP2), HIN-200 domain containing proteins, or Helicase-domain containing proteins.

### Targeting of Pathogenic Organisms or Diseased Cells

[0841] Provided herein are methods for targeting pathogenic microorganisms, such as bacteria, yeast, protozoa, helminthes and the like, or diseased cells such as cancer cells using polynucleotides, primary constructs or mmRNA that encode cytostatic or cytotoxic polypeptides. Preferably the mRNA introduced contains modified nucleosides or other nucleic acid sequence modifications that are translated exclusively, or preferentially, in the target pathogenic organism, to reduce possible off-target effects of the therapeutic. Such methods are useful for removing pathogenic organisms or killing diseased cells found in any biological material, including blood, semen, eggs, and transplant materials including embryos, tissues, and organs.

### Bioprocessing

[0842] The methods provided herein may be useful for enhancing protein product yield in a cell culture process. In a cell culture containing a plurality of host cells, introduction of a polynucleotide, primary construct or mmRNA described herein results in increased protein production efficiency relative to a corresponding unmodified nucleic acid. Such increased protein production efficiency can be demonstrated, e.g., by showing increased cell transfection, increased protein translation from the polynucleotide, primary construct or mmRNA, decreased nucleic acid degradation, and/or reduced innate immune response of the host cell. Protein production can be measured by enzyme-linked immunosorbent assay (ELISA), and protein activity can be measured by various functional assays known in the art. The protein production may be generated in a continuous or a batch-fed mammalian process.

[0843] Additionally, it is useful to optimize the expression of a specific polypeptide in a cell line or collection of cell lines of potential interest, particularly a polypeptide of interest such as a protein variant of a reference protein having a known activity. In one embodiment, provided is a method of optimizing expression of a polypeptide of interest in a target cell, by providing a plurality of target cell types, and independently contacting with each of the plurality of target cell types a polynucleotide, primary construct or mmRNA encoding a polypeptide of interest. The cells may be transfected with two or more polynucleotide, primary construct or mmRNA simultaneously or sequentially.

[0844] In certain embodiments, multiple rounds of the methods described herein may be used to obtain cells with increased expression of one or more nucleic acids or proteins of interest. For example, cells may be transfected with one or more polynucleotide, primary construct or mmRNA that encode a nucleic acid or protein of interest. The cells may be isolated according to methods described herein before being subjected to further rounds of transfections with one or more other nucleic acids which encode a nucleic acid or protein of interest before being isolated again. This method may be useful for generating cells with increased expression of a complex of proteins, nucleic acids or proteins in the same or related biological pathway, nucleic acids or proteins that act upstream or downstream of each other, nucleic acids or proteins that have a modulating, activating or repressing function to each other, nucleic acids or proteins that are dependent on each other for function or activity, or nucleic acids or proteins that share homology.

[0845] Additionally, culture conditions may be altered to increase protein production efficiency. Subsequently, the presence and/or level of the polypeptide of interest in the plurality of target cell types is detected and/or quantitated, allowing for the optimization of a polypeptide's expression by selection of an efficient target cell and cell culture conditions relating thereto. Such methods are particularly useful when the polypeptide contains one or more post-translational modifications or has substantial tertiary structure, situations which often complicate efficient protein production.

[0846] In one embodiment, the cells used in the methods of the present invention may be cultured. The cells may be cultured in suspension or as adherent cultures. The cells may be cultured in a varied of vessels including, but not limited to, bioreactors, cell bags, wave bags, culture plates, flasks and other vessels well known to those of ordinary skill in the art. Cells may be cultured in IMDM (Invitrogen, Catalog number 12440-53) or any other suitable media including, but not limited to, chemically defined media formulations. The ambient conditions which may be suitable for cell culture, such as temperature and atmospheric composition, are well known to those skilled in the art. The methods of the invention may be used with any cell that is suitable for use in protein production.

[0847] The invention provides for the repeated introduction (e.g., transfection) of modified nucleic acids into a target cell population, e.g., in vitro, ex vivo, in situ, or in vivo. For example, contacting the same cell population may be repeated one or more times (such as two, three, four, five or more than five times). In some embodiments, the step of contacting the cell population with the polynucleotides, primary constructs or mmRNA is repeated a number of times sufficient such that a predetermined efficiency of protein translation in the cell population is achieved. Given the often reduced cytotoxicity of the target cell population provided by the nucleic acid modifications, repeated transfections are achievable in a diverse array of cell types and within a variety of tissues, as provided herein.

[0848] In one embodiment, the bioprocessing methods of the present invention may be used to produce antibodies or functional fragments thereof. The functional fragments may comprise a Fab, Fab′, F(ab′)₂, an Fv domain, an scFv, or a diabody. They may be variable in any region including the complement determining region (CDR). In one embodiment, there is complete diversity in the CDR3 region. In another embodiment, the antibody is substantially conserved except in the CDR3 region.

[0849] Antibodies may be made which bind or associate with any biomolecule, whether human, pathogenic or non-human in origin. The pathogen may be present in a non-human mammal, a clinical specimen or from a commercial product such as a cosmetic or pharmaceutical material. They may also bind to any specimen or sample including clinical specimens or tissue samples from any organism.

[0850] In some embodiments, the contacting step is repeated multiple times at a frequency selected from the group consisting of 6 hour, 12 hour, 24 hour, 36 hour, 48 hour, 72 hour, 84 hour, 96 hour, and 108 hour and at concentrations of less than 20 nM, less than 50 nM, less than 80 nM or less than 100 nM. Compositions may also be administered at less than 1 mM, less than 5 mM, less than 10 mM, less than 100 mM or less than 500 mM.

[0851] In some embodiments, the polynucleotides, primary constructs or mmRNA are added at an amount of 50 molecules per cell, 100 molecules/cell, 200 molecules/cell, 300 molecules/cell, 400 molecules/cell, 500 molecules/cell, 600 molecules/cell, 700 molecules/cell, 800 molecules/cell, 900 molecules/cell, 1000 molecules/cell, 2000 molecules/cell, or 5000 molecules/cell.

[0852] In other embodiments, the polynucleotides, primary constructs or mmRNA are added at a concentration selected from the group consisting of: 0.01 fmol/106 cells, 0.1 fmol/106 cells, 0.5 fmol/106 cells, 0.75 fmol/106 cells, 1 fmol/106 cells, 2 fmol/1 06 cells, 5 fmol/106 cells, 10 fmol/106 cells, 20 fmol/106 cells, 30 fmol/106 cells, 40 fmol/106 cells, 50 fmol/106 cells, 60 fmol/106 cells, 100 fmol/106 cells, 200 fmol/106 cells, 300 fmol/106 cells, 400 fmol/106 cells, 500 fmol/106 cells, 700 fmol/106 cells, 800 fmol/106 cells, 900 fmol/106 cells, and 1 pmol/106 cells.

[0853] In some embodiments, the production of a biological product upon is detected by monitoring one or more measurable bioprocess parameters, such as a parameter selected from the group consisting of: cell density, pH, oxygen levels, glucose levels, lactic acid levels, temperature, and protein production. Protein production can be measured as specific productivity (SP) (the concentration of a product, such as a heterologously expressed polypeptide, in solution) and can be expressed as mg/L or g/L; in the alternative, specific productivity can be expressed as pg/cell/day. An increase in SP can refer to an absolute or relative increase in the concentration of a product produced under two defined set of conditions (e.g., when compared with controls not treated with modified mRNA(s)).

### Cells

[0854] In one embodiment, the cells are selected from the group consisting of mammalian cells, bacterial cells, plant, microbial, algal and fungal cells. In some embodiments, the cells are mammalian cells, such as, but not limited to, human, mouse, rat, goat, horse, rabbit, hamster or cow cells. In a further embodiment, the cells may be from an established cell line, including, but not limited to, HeLa, NS0, SIP2/0, KEK 293T, Vero, Caco, Caco-2, MDCK, COS-1, COS-7, K562, Jurkat, CHO-KI, DG44, CHIOK1SV, CHO—S, Huvec, CV-1, Huh-7, N1H3T3, HEK293, 293, A549, HepG2, IMR-90, MCF-7, U-20S, Per.C6, SF9, SF21 or Chinese Hamster Ovary (CHO) cells.

[0855] In certain embodiments, the cells are fungal cells, such as, but not limited to, (Chrysosporium cells, Aspergillus cells, Trichoderma cells, Dictyostelium cells, Candida cells, Saccharomyces cells, Schizosaccharomyces cells, and Penicillium cells.

[0856] In certain embodiments, the cells are bacterial cells such as, but not limited to, E. coli, B. subtilis, or BL2I cells. Primary and secondary cells to be transfected by the methods of the invention can be obtained from a variety of tissues and include, but are not limited to, all cell types which can be maintained in culture. For examples, primary and secondary cells which can be transfected by the methods of the invention include, but are not limited to, fibroblasts, keratinocytes, epithelial cells (e.g., mammary epithelial cells, intestinal epithelial cells), endothelial cells, glial cells, neural cells, formed elements of the blood (e.g., lymphocytes, bone marrow cells), muscle cells and precursors of these somatic cell types. Primary cells may also be obtained from a donor of the same species or from another species (e.g., mouse, rat, rabbit, cat, dog, pig, cow, bird, sheep, goat, horse).

### Purification and Isolation

[0857] Those of ordinary skill in the art should be able to make a determination of the methods to use to purify or isolate of a protein of interest from cultured cells. Generally, this is done through a capture method using affinity binding or non-affinity purification. If the protein of interest is not secreted by the cultured cells, then a lysis of the cultured cells should be performed prior to purification or isolation. One may use unclarified cell culture fluid containing the protein of interest along with cell culture media components as well as cell culture additives, such as anti-foam compounds and other nutrients and supplements, cells, cellular debris, host cell proteins, DNA, viruses and the like in the present invention. The process may be conducted in the bioreactor itself. The fluid may either be preconditioned to a desired stimulus such as pH, temperature or other stimulus characteristic or the fluid can be conditioned upon the addition of polymer(s) or the polymer(s) can be added to a carrier liquid that is properly conditioned to the required parameter for the stimulus condition required for that polymer to be solubilized in the fluid. The polymer may be allowed to circulate thoroughly with the fluid and then the stimulus may be applied (change in pH, temperature, salt concentration, etc) and the desired protein and polymer(s) precipitate can out of the solution. The polymer and the desired protein(s) can be separated from the rest of the fluid and optionally washed one or more times to remove any trapped or loosely bound contaminants. The desired protein may then be recovered from the polymer(s) by, for example, elution and the like, Preferably, the elution may be done under a set of conditions such that the polymer remains in its precipitated form and retains any impurities to it during the selected elution of the desired protein. The polymer and protein as well as any impurities may be solubilized in a new fluid such as water or a buffered solution and the protein may be recovered by a means such as affinity, ion exchanged, hydrophobic, or some other type of chromatography that has a preference and selectivity for the protein over that of the polymer or impurities. The eluted protein may then be recovered and may be subjected to additional processing steps, either batch like steps or continuous flow through steps if appropriate.

[0858] In another embodiment, it may be useful to optimize the expression of a specific polypeptide in a cell line or collection of cell lines of potential interest, particularly a polypeptide of interest such as a protein variant of a reference protein having a known activity. In one embodiment, provided is a method of optimizing expression of a polypeptide of interest in a target cell, by providing a plurality of target cell types, and independently contacting with each of the plurality of target cell types a modified mRNA encoding a polypeptide. Additionally, culture conditions may be altered to increase protein production efficiency. Subsequently, the presence and/or level of the polypeptide of interest in the plurality of target cell types is detected and/or quantitated, allowing for the optimization of a polypeptide of interest's expression by selection of an efficient target cell and cell culture conditions relating thereto. Such methods may be useful when the polypeptide of interest contains one or more post-translational modifications or has substantial tertiary structure, which often complicate efficient protein production.

### Protein Recovery

[0859] The protein of interest may be preferably recovered from the culture medium as a secreted polypeptide, or it can be recovered from host cell lysates if expressed without a secretory signal. It may be necessary to purify the protein of interest from other recombinant proteins and host cell proteins in a way that substantially homogenous preparations of the protein of interest are obtained. The cells and/or particulate cell debris may be removed from the culture medium or lysate. The product of interest may then be purified from contaminant soluble proteins, polypeptides and nucleic acids by, for example, fractionation on immunoaffinity or ion-exchange columns, ethanol precipitation, reverse phase HPLC (RP-HPLC), SEPHADEX● chromatography, chromatography on silica or on a cation exchange resin such as DEAL. Methods of purifying a protein heterologous expressed by a host cell are well known in the art.

[0860] Methods and compositions described herein may be used to produce proteins which are capable of attenuating or blocking the endogenous agonist biological response and/or antagonizing a receptor or signaling molecule in a mammalian subject. For example, IL-12 and IL-23 receptor signaling may be enhanced in chronic autoimmune disorders such as multiple sclerosis and inflammatory diseases such as rheumatoid arthritis, psoriasis, lupus erythematosus, ankylosing spondylitis and Chron's disease (Kikly K, Liu L, Na S, Sedgwich J D (2006) Cur. Opin. Immunol. 18(6): 670-5). In another embodiment, a nucleic acid encodes an antagonist for chemokine receptors. Chemokine receptors CXCR-4 and CCR-5 are required for HIV entry into host cells (Arenzana-Seisdedos F et al, (1996) Nature. October 3; 383 (6599):400).

### Gene Silencing

[0861] The polynucleotides, primary constructs and mmRNA described herein are useful to silence (i.e., prevent or substantially reduce) expression of one or more target genes in a cell population. A polynucleotide, primary construct or mmRNA encoding a polypeptide of interest capable of directing sequence-specific histone H3 methylation is introduced into the cells in the population under conditions such that the polypeptide is translated and reduces gene transcription of a target gene via histone H3 methylation and subsequent heterochromatin formation. In some embodiments, the silencing mechanism is performed on a cell population present in a mammalian subject. By way of non-limiting example, a useful target gene is a mutated Janus Kinase-2 family member, wherein the mammalian subject expresses the mutant target gene suffers from a myeloproliferative disease resulting from aberrant kinase activity.

[0862] Co-administration of polynucleotides, primary constructs and mmRNA and RNAi agents are also provided herein.

### Modulation of Biological Pathways

[0863] The rapid translation polynucleotides, primary constructs and mmRNA introduced into cells provides a desirable mechanism of modulating target biological pathways. Such modulation includes antagonism or agonism of a given pathway. In one embodiment, a method is provided for antagonizing a biological pathway in a cell by contacting the cell with an effective amount of a composition comprising a polynucleotide, primary construct or mmRNA encoding a polypeptide of interest, under conditions such that the polynucleotides, primary constructs and mmRNA is localized into the cell and the polypeptide is capable of being translated in the cell from the polynucleotides, primary constructs and mmRNA, wherein the polypeptide inhibits the activity of a polypeptide functional in the biological pathway. Exemplary biological pathways are those defective in an autoimmune or inflammatory disorder such as multiple sclerosis, rheumatoid arthritis, psoriasis, lupus erythematosus, ankylosing spondylitis colitis, or Crohn's disease; in particular, antagonism of the IL-12 and IL-23 signaling pathways are of particular utility. (See Kikly K, Liu L, Na S, Sedgwick J D (2006) Curr. Opin. Immunol. 18 (6): 670-5).

[0864] Further, provided are polynucleotide, primary construct or mmRNA encoding an antagonist for chemokine receptors; chemokine receptors CXCR-4 and CCR-5 are required for, e.g., HIV entry into host cells (Arenzana-Seisdedos F et al, (1996) Nature. October 3; 383(6599):400).

[0865] Alternatively, provided are methods of agonizing a biological pathway in a cell by contacting the cell with an effective amount of a polynucleotide, primary construct or mmRNA encoding a recombinant polypeptide under conditions such that the nucleic acid is localized into the cell and the recombinant polypeptide is capable of being translated in the cell from the nucleic acid, and the recombinant polypeptide induces the activity of a polypeptide functional in the biological pathway. Exemplary agonized biological pathways include pathways that modulate cell fate determination. Such agonization is reversible or, alternatively, irreversible.

### Expression of Ligand or Receptor on Cell Surface

[0866] In some aspects and embodiments of the aspects described herein, the polynucleotides, primary constructs or mmRNA described herein can be used to express a ligand or ligand receptor on the surface of a cell (e.g., a homing moiety). A ligand or ligand receptor moiety attached to a cell surface can permit the cell to have a desired biological interaction with a tissue or an agent in vivo. A ligand can be an antibody, an antibody fragment, an aptamer, a peptide, a vitamin, a carbohydrate, a protein or polypeptide, a receptor, e.g., cell-surface receptor, an adhesion molecule, a glycoprotein, a sugar residue, a therapeutic agent, a drug, a glycosaminoglycan, or any combination thereof. For example, a ligand can be an antibody that recognizes a cancer-cell specific antigen, rendering the cell capable of preferentially interacting with tumor cells to permit tumor-specific localization of a modified cell. A ligand can confer the ability of a cell composition to accumulate in a tissue to be treated, since a preferred ligand may be capable of interacting with a target molecule on the external face of a tissue to be treated. Ligands having limited cross-reactivity to other tissues are generally preferred.

[0867] In some cases, a ligand can act as a homing moiety which permits the cell to target to a specific tissue or interact with a specific ligand. Such homing moieties can include, but are not limited to, any member of a specific binding pair, antibodies, monoclonal antibodies, or derivatives or analogs thereof, including without limitation: Fv fragments, single chain Fv (scFv) fragments, Fab′ fragments, F(ab′)2 fragments, single domain antibodies, camelized antibodies and antibody fragments, humanized antibodies and antibody fragments, and multivalent versions of the foregoing; multivalent binding reagents including without limitation: monospecific or bispecific antibodies, such as disulfide stabilized Fv fragments, scFv tandems ((SCFV)2 fragments), diabodies, tribodies or tetrabodies, which typically are covalently linked or otherwise stabilized (i.e., leucine zipper or helix stabilized) scFv fragments; and other homing moieties include for example, aptamers, receptors, and fusion proteins.

[0868] In some embodiments, the homing moiety may be a surface-bound antibody, which can permit tuning of cell targeting specificity. This is especially useful since highly specific antibodies can be raised against an epitope of interest for the desired targeting site. In one embodiment, multiple antibodies are expressed on the surface of a cell, and each antibody can have a different specificity for a desired target. Such approaches can increase the avidity and specificity of homing interactions.

[0869] A skilled artisan can select any homing moiety based on the desired localization or function of the cell, for example an estrogen receptor ligand, such as tamoxifen, can target cells to estrogen-dependent breast cancer cells that have an increased number of estrogen receptors on the cell surface. Other non-limiting examples of ligand/receptor interactions include CCRI (e.g., for treatment of inflamed joint tissues or brain in rheumatoid arthritis, and/or multiple sclerosis), CCR7, CCR8 (e.g., targeting to lymph node tissue), CCR6, CCR9, CCR10 (e.g., to target to intestinal tissue), CCR4, CCR10 (e.g., for targeting to skin), CXCR4 (e.g., for general enhanced transmigration), HCELL (e.g., for treatment of inflammation and inflammatory disorders, bone marrow), Alpha4beta7 (e.g., for intestinal mucosa targeting), VLA-4/VCAM-1 (e.g., targeting to endothelium). In general, any receptor involved in targeting (e.g., cancer metastasis) can be harnessed for use in the methods and compositions described herein.

### Modulation of Cell Lineage

[0870] Provided are methods of inducing an alteration in cell fate in a target mammalian cell. The target mammalian cell may be a precursor cell and the alteration may involve driving differentiation into a lineage, or blocking such differentiation. Alternatively, the target mammalian cell may be a differentiated cell, and the cell fate alteration includes driving de-differentiation into a pluripotent precursor cell, or blocking such de-differentiation, such as the dedifferentiation of cancer cells into cancer stem cells. In situations where a change in cell fate is desired, effective amounts of mRNAs encoding a cell fate inductive polypeptide is introduced into a target cell under conditions such that an alteration in cell fate is induced. In some embodiments, the modified mRNAs are useful to reprogram a subpopulation of cells from a first phenotype to a second phenotype. Such a reprogramming may be temporary or permanent.

[0871] Optionally, the reprogramming induces a target cell to adopt an intermediate phenotype.

[0872] Additionally, the methods of the present invention are particularly useful to generate induced pluripotent stem cells (iPS cells) because of the high efficiency of transfection, the ability to re-transfect cells, and the tenability of the amount of recombinant polypeptides produced in the target cells. Further, the use of iPS cells generated using the methods described herein is expected to have a reduced incidence of teratoma formation.

[0873] Also provided are methods of reducing cellular differentiation in a target cell population. For example, a target cell population containing one or more precursor cell types is contacted with a composition having an effective amount of a polynucleotides, primary constructs and mmRNA encoding a polypeptide, under conditions such that the polypeptide is translated and reduces the differentiation of the precursor cell. In non-limiting embodiments, the target cell population contains injured tissue in a mammalian subject or tissue affected by a surgical procedure. The precursor cell is, e.g., a stromal precursor cell, a neural precursor cell, or a mesenchymal precursor cell.

[0874] In a specific embodiment, provided are polynucleotide, primary construct or mmRNA that encode one or more differentiation factors Gata4, Mef2c and Tbx4. These mRNA-generated factors are introduced into fibroblasts and drive the reprogramming into cardiomyocytes. Such a reprogramming can be performed in vivo, by contacting an mRNA-containing patch or other material to damaged cardiac tissue to facilitate cardiac regeneration. Such a process promotes cardiomyocyte genesis as opposed to fibrosis.

### Mediation of Cell Death

[0875] In one embodiment, polynucleotides, primary constructs or mmRNA compositions can be used to induce apoptosis in a cell (e.g., a cancer cell) by increasing the expression of a death receptor, a death receptor ligand or a combination thereof. This method can be used to induce cell death in any desired cell and has particular usefulness in the treatment of cancer where cells escape natural apoptotic signals.

[0876] Apoptosis can be induced by multiple independent signaling pathways that converge upon a final effector mechanism consisting of multiple interactions between several “death receptors” and their ligands, which belong to the tumor necrosis factor (TNF) receptor/ligand superfamily. The best-characterized death receptors are CD95 (“Fas”), TNFRI (p55), death receptor 3 (DR3 or Apo3/TRAMO), DR4 and DR5 (apo2-TRAIL-R2). The final effector mechanism of apoptosis may be the activation of a series of proteinases designated as caspases. The activation of these caspases results in the cleavage of a series of vital cellular proteins and cell death. The molecular mechanism of death receptors/ligands-induced apoptosis is well known in the art. For example, Fas/FasL-mediated apoptosis is induced by binding of three FasL molecules which induces trimerization of Fas receptor via C-terminus death domains (DDs), which in turn recruits an adapter protein FADD (Fas-associated protein with death domain) and Caspase-8. The oligomerization of this trimolecular complex, Fas/FAIDD/caspase-8, results in proteolytic cleavage of proenzyme caspase-8 into active caspase-8 that, in turn, initiates the apoptosis process by activating other downstream caspases through proteolysis, including caspase-3. Death ligands in general are apoptotic when formed into trimers or higher order of structures. As monomers, they may serve as antiapoptotic agents by competing with the trimers for binding to the death receptors.

[0877] In one embodiment, the polynucleotides, primary constructs or mmRNA composition encodes for a death receptor (e.g., Fas, TRAIL, TRAMO, TNFR, TLR etc). Cells made to express a death receptor by transfection of polynucleotides, primary constructs and mmRNA become susceptible to death induced by the ligand that activates that receptor. Similarly, cells made to express a death ligand, e.g., on their surface, will induce death of cells with the receptor when the transfected cell contacts the target cell. In another embodiment, the polynucleotides, primary constructs and mmRNA composition encodes for a death receptor ligand (e.g., FasL, TNF, etc). In another embodiment, the polynucleotides, primary constructs and mmRNA composition encodes a caspase (e.g., caspase 3, caspase 8, caspase 9 etc). Where cancer cells often exhibit a failure to properly differentiate to a non-proliferative or controlled proliferative for, in another embodiment, the synthetic, polynucleotides, primary constructs and mmRNA composition encodes for both a death receptor and its appropriate activating ligand. In another embodiment, the synthetic, polynucleotides, primary constructs and mmRNA composition encodes for a differentiation factor that when expressed in the cancer cell, such as a cancer stem cell, will induce the cell to differentiate to a non-pathogenic or nonself-renewing phenotype (e.g., reduced cell growth rate, reduced cell division etc) or to induce the cell to enter a donnant cell phase (e.g., C resting phase).

[0878] One of skill in the art will appreciate that the use of apoptosis-inducing techniques may require that the polynucleotides, primary constructs or mmRNA are appropriately targeted to e.g., tumor cells to prevent unwanted wide-spread cell death. Thus, one can use a delivery mechanism (e.g., attached ligand or antibody, targeted liposome etc) that recognizes a cancer antigen such that the polynucleotides, primary constructs or mmRNA are expressed only in cancer cells.

### Cosmetic Applications

[0879] In one embodiment, the polynucleotides, primary constructs and/or mmRNA may be used in the treatment, amelioration or prophylaxis of cosmetic conditions. Such conditions include acne, rosacea, scarring, wrinkles, eczema, shingles, psoriasis, age spots, birth marks, dry skin, calluses, rash (e.g., diaper, heat), scabies, hives, warts, insect bites, vitiligo, dandruff, freckles, and general signs of aging.

### VI. Kits and Devices

### Kits

[0880] The invention provides a variety of kits for conveniently and/or effectively carrying out methods of the present invention. Typically kits will comprise sufficient amounts and/or numbers of components to allow a user to perform multiple treatments of a subject(s) and/or to perform multiple experiments.

[0881] In one aspect, the present invention provides kits comprising the molecules (polynucleotides, primary constructs or mmRNA) of the invention. In one embodiment, the kit comprises one or more functional antibodies or function fragments thereof.

[0882] Said kits can be for protein production, comprising a first polynucleotide, primary construct or mmRNA comprising a translatable region. The kit may further comprise packaging and instructions and/or a delivery agent to form a formulation composition. The delivery agent may comprise a saline, a buffered solution, a lipidoid or any delivery agent disclosed herein.

[0883] In one embodiment, the buffer solution may include sodium chloride, calcium chloride, phosphate and/or EDTA. In another embodiment, the buffer solution may include, but is not limited to, saline, saline with 2 mM calcium, 5% sucrose, 5% sucrose with 2 mM calcium, 5% Mannitol, 5% Mannitol with 2 mM calcium, Ringer's lactate, sodium chloride, sodium chloride with 2 mM calcium and mannose (See e.g., U.S. Pub. No. 20120258046; herein incorporated by reference in its entirety). In a further embodiment, the buffer solutions may be precipitated or it may be lyophilized. The amount of each component may be varied to enable consistent, reproducible higher concentration saline or simple buffer formulations. The components may also be varied in order to increase the stability of modified RNA in the buffer solution over a period of time and/or under a variety of conditions. In one aspect, the present invention provides kits for protein production, comprising: a polynucleotide, primary construct or mmRNA comprising a translatable region, provided in an amount effective to produce a desired amount of a protein encoded by the translatable region when introduced into a target cell; a second polynucleotide comprising an inhibitory nucleic acid, provided in an amount effective to substantially inhibit the innate immune response of the cell; and packaging and instructions.

[0884] In one aspect, the present invention provides kits for protein production, comprising a polynucleotide, primary construct or mmRNA comprising a translatable region, wherein the polynucleotide exhibits reduced degradation by a cellular nuclease, and packaging and instructions.

[0885] In one aspect, the present invention provides kits for protein production, comprising a polynucleotide, primary construct or mmRNA comprising a translatable region, wherein the polynucleotide exhibits reduced degradation by a cellular nuclease, and a mammalian cell suitable for translation of the translatable region of the first nucleic acid.

[0886] In one embodiment, the levels of Protein C may be measured by immunoassay. The assay may be purchased and is available from any number of suppliers including BioMerieux, Inc. (Durham, NC), Abbott Laboratories (Abbott Park, IL), Siemens Medical Solutions USA, Inc. (Malvern, PA), BIOPORTO● Diagnostics A/S (Gentofte, Denmark), USCN● Life Science Inc. (Houston, TX) or Roche Diagnostic Corporation (Indianapolis, IN). In this embodiment, the assay may be used to assess levels of Protein C or its activated form or a variant delivered as or in response to administration of a modified mRNA molecule.

### Devices

[0887] The present invention provides for devices which may incorporate polynucleotides, primary constructs or mmRNA that encode polypeptides of interest. These devices contain in a stable formulation the reagents to synthesize a polynucleotide in a formulation available to be immediately delivered to a subject in need thereof, such as a human patient. Non-limiting examples of such a polypeptide of interest include a growth factor and/or angiogenesis stimulator for wound healing, a peptide antibiotic to facilitate infection control, and an antigen to rapidly stimulate an immune response to a newly identified virus.

[0888] Devices may also be used in conjunction with the present invention. In one embodiment, a device is used to assess levels of a protein which has been administered in the form of a modified mRNA. The device may comprise a blood, urine or other biofluidic test. It may be as large as to include an automated central lab platform or a small decentralized bench top device. It may be point of care or a handheld device. In this embodiment, for example, Protein C or APC may be quatitated before, during or after treatment with a modified mRNA encoding Protein C (its zymogen), APC or any variants thereof. Protein C, also known as autoprothrombin IIA and blood coagulation factor XIV is a zymogen, or precursor, of a serine protease which plays an important role in the regulation of blood coagulation and generation of fibrinolytic activity in vivo. It is synthesized in the liver as a single-chain polypeptide but undergoes posttranslational processing to give rise to a two-chain intermediate. The intermediate form of Protein C is converted via thrombin-mediated cleavage of a 12-residue peptide from the amino-terminus of the heavy chain to of the molecule to the active form, known as “activated protein C” (APC). The device may be useful in drug discovery efforts as a companion diagnostic test associated with Protein C, or APC treatment such as for sepsis or severe sepsis. In early studies it was suggested that APC had the ability to reduce mortality in severe sepsis. Following this line of work, clinical studies lead to the FDA approval of one compound, activated drotrecogin alfa (recombinant protein C). However, in late 2011, the drug was withdrawn from sale in all markets following results of the PROWESS-SHOCK study, which showed the study did not meet the primary endpoint of a statistically significant reduction in 28-day all-cause mortality in patients with septic shock. The present invention provides modified mRNA molecules which may be used in the diagnosis and treatment of sepsis, severe sepsis and septicemia which overcome prior issues or problems associated with increasing protein expression efficiencies in mammals.

[0889] In some embodiments the device is self-contained, and is optionally capable of wireless remote access to obtain instructions for synthesis and/or analysis of the generated polynucleotide, primary construct or mmRNA. The device is capable of mobile synthesis of at least one polynucleotide, primary construct or mmRNA and preferably an unlimited number of different polynucleotides, primary constructs or mmRNA. In certain embodiments, the device is capable of being transported by one or a small number of individuals. In other embodiments, the device is scaled to fit on a benchtop or desk. In other embodiments, the device is scaled to fit into a suitcase, backpack or similarly sized object. In another embodiment, the device may be a point of care or handheld device. In further embodiments, the device is scaled to fit into a vehicle, such as a car, truck or ambulance, or a military vehicle such as a tank or personnel carrier. The information necessary to generate a modified mRNA encoding polypeptide of interest is present within a computer readable medium present in the device.

[0890] In one embodiment, a device may be used to assess levels of a protein which has been administered in the form of a polynucleotide, primary construct or mmRNA. The device may comprise a blood, urine or other biofluidic test.

[0891] In some embodiments, the device is capable of communication (e.g., wireless communication) with a database of nucleic acid and polypeptide sequences. The device contains at least one sample block for insertion of one or more sample vessels. Such sample vessels are capable of accepting in liquid or other form any number of materials such as template DNA, nucleotides, enzymes, buffers, and other reagents. The sample vessels are also capable of being heated and cooled by contact with the sample block. The sample block is generally in communication with a device base with one or more electronic control units for the at least one sample block. The sample block preferably contains a heating module, such heating molecule capable of heating and/or cooling the sample vessels and contents thereof to temperatures between about −20 C and above +100 C. The device base is in communication with a voltage supply such as a battery or external voltage supply. The device also contains means for storing and distributing the materials for RNA synthesis.

[0892] Optionally, the sample block contains a module for separating the synthesized nucleic acids. Alternatively, the device contains a separation module operably linked to the sample block. Preferably the device contains a means for analysis of the synthesized nucleic acid. Such analysis includes sequence identity (demonstrated such as by hybridization), absence of non-desired sequences, measurement of integrity of synthesized mRNA (such has by microfluidic viscometry combined with spectrophotometry), and concentration and/or potency of modified RNA (such as by spectrophotometry).

[0893] In certain embodiments, the device is combined with a means for detection of pathogens present in a biological material obtained from a subject, e.g., the IBIS PLEX-ID system (Abbott, Abbott Park, IL) for microbial identification.

[0894] Suitable devices for use in delivering intradermal pharmaceutical compositions described herein include short needle devices such as those described in U.S. Pat. Nos. 4,886,499; 5,190,521; 5,328,483; 5,527,288; 4,270,537; 5,015,235; 5,141,496; and 5,417,662; each of which is herein incorporated by reference in their entirety. Intradermal compositions may be administered by devices which limit the effective penetration length of a needle into the skin, such as those described in PCT publication WO 99/34850 (herein incorporated by reference in its entirety) and functional equivalents thereof. Jet injection devices which deliver liquid compositions to the dermis via a liquid jet injector and/or via a needle which pierces the stratum corneum and produces a jet which reaches the dermis are suitable, Jet injection devices are described, for example, in U.S. Pat. Nos. 5,480,381; 5,599,302; 5,334,144 5,993,412; 5,649,912; 5,569,189; 5,704,911; 5,383,851; 5,893,397; 5,466,220; 5,339,163; 5,312,335; 5,503,627; 5,064,413; 5,520,639; 4,596,556; 4,790,824; 4,941,880; 4,940,460; and PCT publications WO 97/37705 and WO 97/13537; each of which are herein incorporated by reference in their entirety. Ballistic powder/particle delivery devices which use compressed gas to accelerate vaccine in powder form through the outer layers of the skin to the dermis are suitable. Alternatively or additionally, conventional syringes may be used in the classical mantoux method of intradermal administration.

[0895] In some embodiments, the device may be a pump or comprise a catheter for administration of compounds or compositions of the invention across the blood brain barrier. Such devices include but are not limited to a pressurized olfactory delivery device, iontophoresis devices, multi-layered microfluidic devices, and the like. Such devices may be portable or stationary. They may be implantable or externally tethered to the body or combinations thereof.

[0896] Devices for administration may be employed to deliver the polynucleotides, primary constructs or mmRNA of the present invention according to single, multi- or split-dosing regimens taught herein. Such devices are described below.

[0897] Method and devices known in the art for multi-administration to cells, organs and tissues are contemplated for use in conjunction with the methods and compositions disclosed herein as embodiments of the present invention. These include, for example, those methods and devices having multiple needles, hybrid devices employing for example lumens or catheters as well as devices utilizing heat, electric current or radiation driven mechanisms.

[0898] According to the present invention, these multi-administration devices may be utilized to deliver the single, multi- or split doses contemplated herein.

[0899] A method for delivering therapeutic agents to a solid tissue has been described by Bahrami et al. and is taught for example in US Patent Publication 20110230839, the contents of which are incorporated herein by reference in their entirety. According to Bahrami, an array of needles is incorporated into a device which delivers a substantially equal amount of fluid at any location in said solid tissue along each needle's length.

[0900] A device for delivery of biological material across the biological tissue has been described by Kodgule et al. and is taught for example in US Patent Publication 20110172610, the contents of which are incorporated herein by reference in their entirety. According to Kodgule, multiple hollow micro-needles made of one or more metals and having outer diameters from about 200 microns to about 350 microns and lengths of at least 100 microns are incorporated into the device which delivers peptides, proteins, carbohydrates, nucleic acid molecules, lipids and other pharmaceutically active ingredients or combinations thereof.

[0901] A delivery probe for delivering a therapeutic agent to a tissue has been described by Gunday et al. and is taught for example in US Patent Publication 20110270184, the contents of each of which are incorporated herein by reference in their entirety. According to Gunday, multiple needles are incorporated into the device which moves the attached capsules between an activated position and an inactivated position to force the agent out of the capsules through the needles.

[0902] A multiple-injection medical apparatus has been described by Assaf and is taught for example in US Patent Publication 20110218497, the contents of which are incorporated herein by reference in their entirety. According to Assaf, multiple needles are incorporated into the device which has a chamber connected to one or more of said needles and a means for continuously refilling the chamber with the medical fluid after each injection.

[0903] In one embodiment, the polynucleotide, primary construct, or mmRNA is administered subcutaneously or intramuscularly via at least 3 needles to three different, optionally adjacent, sites simultaneously, or within a 60 minutes period (e.g., administration to 4, 5, 6, 7, 8, 9, or 10 sites simultaneously or within a 60 minute period). The split doses can be administered simultaneously to adjacent tissue using the devices described in U.S. Patent Publication Nos. 20110230839 and 201 10218497, each of which is incorporated herein by reference in their entirety.

[0904] An at least partially implantable system for injecting a substance into a patient's body, in particular a penis erection stimulation system has been described by Forsell and is taught for example in US Patent Publication 20110196198, the contents of which are incorporated herein by reference in their entirety. According to Forsell, multiple needles are incorporated into the device which is implanted along with one or more housings adjacent the patient's left and right corpora cavernosa. A reservoir and a pump are also implanted to supply drugs through the needles.

[0905] A method for the transdermal delivery of a therapeutic effective amount of iron has been described by Berenson and is taught for example in US Patent Publication 20100130910, the contents of which are incorporated herein by reference in their entirety. According to Berenson, multiple needles may be used to create multiple micro channels in stratum corneum to enhance transdermal delivery of the ionic iron on an iontophoretic patch.

[0906] A method for delivery of biological material across the biological tissue has been described by Kodgule et al and is taught for example in US Patent Publication 20110196308, the contents of which are incorporated herein by reference in their entirety. According to Kodgule, multiple biodegradable microneedles containing a therapeutic active ingredient are incorporated in a device which delivers proteins, carbohydrates, nucleic acid molecules, lipids and other pharmaceutically active ingredients or combinations thereof.

[0907] A transdermal patch comprising a botulinum toxin composition has been described by Donovan and is taught for example in US Patent Publication 20080220020, the contents of which are incorporated herein by reference in their entirety. According to Donovan, multiple needles are incorporated into the patch which delivers botulinum toxin under stratum corneum through said needles which project through the stratum corneum of the skin without rupturing a blood vessel.

[0908] A small, disposable drug reservoir, or patch pump, which can hold approximately 0.2 to 15 mL of liquid formulations can be placed on the skin and deliver the formulation continuously subcutaneously using a small bore needed (e.g., 26 to 34 gauge). As non-limiting examples, the patch pump may be 50 mm by 76 mm by 20 mm spring loaded having a 30 to 34 gauge needle (BDT™ Microinfuser, Franklin Lakes NJ), 41 mm by 62 mm by 17 mm with a 2 mL reservoir used for drug delivery such as insulin (OMNIPOD●, Insulet Corporation Bedford, MA), or 43-60 mm diameter, 10 mm thick with a 0.5 to 10 mL reservoir (PATCHPUMP●, SteadyMed Therapeutics, San Francisco, CA). Further, the patch pump may be battery powered and/or rechargeable.

[0909] A cryoprobe for administration of an active agent to a location of cryogenic treatment has been described by Toubia and is taught for example in US Patent Publication 20080140061, the contents of which are incorporated herein by reference in their entirety. According to Toubia, multiple needles are incorporated into the probe which receives the active agent into a chamber and administers the agent to the tissue.

[0910] A method for treating or preventing inflammation or promoting healthy joints has been described by Stock et al and is taught for example in US Patent Publication 20090155186, the contents of which are incorporated herein by reference in their entirety. According to Stock, multiple needles are incorporated in a device which administers compositions containing signal transduction modulator compounds.

[0911] A multi-site injection system has been described by Kimmell et al. and is taught for example in US Patent Publication 20100256594, the contents of which are incorporated herein by reference in their entirety. According to Kimmell, multiple needles are incorporated into a device which delivers a medication into a stratum corneum through the needles.

[0912] A method for delivering interferons to the intradermal compartment has been described by Dekker et al. and is taught for example in US Patent Publication 20050181033, the contents of which are incorporated herein by reference in their entirety. According to Dekker, multiple needles having an outlet with an exposed height between 0 and 1 mm are incorporated into a device which improves pharmacokinetics and bioavailability by delivering the substance at a depth between 0.3 mm and 2 mm.

[0913] A method for delivering genes, enzymes and biological agents to tissue cells has described by Desai and is taught for example in US Patent Publication 20030073908, the contents of which are incorporated herein by reference in their entirety. According to Desai, multiple needles are incorporated into a device which is inserted into a body and delivers a medication fluid through said needles.

[0914] A method for treating cardiac arrhythmias with fibroblast cells has been described by Lee et al and is taught for example in US Patent Publication 20040005295, the contents of which are incorporated herein by reference in their entirety. According to Lee, multiple needles are incorporated into the device which delivers fibroblast cells into the local region of the tissue.

[0915] A method using a magnetically controlled pump for treating a brain tumor has been described by Shachar et al. and is taught for example in U.S. Pat. No. 7,799,012 (method) and U.S. Pat. No. 7,799,016 (device), the contents of which are incorporated herein by reference in their entirety. According Shachar, multiple needles were incorporated into the pump which pushes a medicating agent through the needles at a controlled rate.

[0916] Methods of treating functional disorders of the bladder in mammalian females have been described by Versi et al. and are taught for example in U.S. Pat. No. 8,029,496, the contents of which are incorporated herein by reference in their entirety. According to Versi, an array of micro-needles is incorporated into a device which delivers a therapeutic agent through the needles directly into the trigone of the bladder.

[0917] A micro-needle transdermal transport device has been described by Angel et al and is taught for example in U.S. Pat. No. 7,364,568, the contents of which are incorporated herein by reference in their entirety. According to Angel, multiple needles are incorporated into the device which transports a substance into a body surface through the needles which are inserted into the surface from different directions. The micro-needle transdermal transport device may be a solid micro-needle system or a hollow micro-needle system. As a non-limiting example, the solid micro-needle system may have up to a 0.5 mg capacity, with 300-1500 solid micro-needles per cm² about 150-700 μm tall coated with a drug. The micro-needles penetrate the stratum corneum and remain in the skin for short duration (e.g., 20 seconds to 15 minutes). In another example, the hollow micro-needle system has up to a 3 mL capacity to deliver liquid formulations using 15-20 microneedles per cm2 being approximately 950 μm tall. The micro-needles penetrate the skin to allow the liquid formulations to flow from the device into the skin. The hollow micro-needle system may be worn from 1 to 30 minutes depending on the formulation volume and viscosity.

[0918] A device for subcutaneous infusion has been described by Dalton et al and is taught for example in U.S. Pat. No. 7,150,726, the contents of which are incorporated herein by reference in their entirety. According to Dalton, multiple needles are incorporated into the device which delivers fluid through the needles into a subcutaneous tissue.

[0919] A device and a method for intradermal delivery of vaccines and gene therapeutic agents through microcannula have been described by Mikszta et al. and are taught for example in U.S. Pat. No. 7,473,247, the contents of which are incorporated herein by reference in their entirety. According to Mitszta, at least one hollow micro-needle is incorporated into the device which delivers the vaccines to the subject's skin to a depth of between 0.025 mm and 2 mm.

[0920] A method of delivering insulin has been described by Pettis et al and is taught for example in U.S. Pat. No. 7,722,595, the contents of which are incorporated herein by reference in their entirety. According to Pettis, two needles are incorporated into a device wherein both needles insert essentially simultaneously into the skin with the first at a depth of less than 2.5 mm to deliver insulin to intradermal compartment and the second at a depth of greater than 2.5 mm and less than 5.0 mm to deliver insulin to subcutaneous compartment.

[0921] Cutaneous injection delivery under suction has been described by Kochamba et al. and is taught for example in U.S. Pat. No. 6,896,666, the contents of which are incorporated herein by reference in their entirety. According to Kochamba, multiple needles in relative adjacency with each other are incorporated into a device which injects a fluid below the cutaneous layer.

[0922] A device for withdrawing or delivering a substance through the skin has been described by Down et al and is taught for example in U.S. Pat. No. 6,607,513, the contents of which are incorporated herein by reference in their entirety. According to Down, multiple skin penetrating members which are incorporated into the device have lengths of about 100 microns to about 2000r microns and are about 30 to 50 gauge.

[0923] A device for delivering a substance to the skin has been described by Palmer et al and is taught for example in U.S. Pat. No. 6,537,242, the contents of which are incorporated herein by reference in their entirety. According to Palmer, an array of micro-needles is incorporated into the device which uses a stretching assembly to enhance the contact of the needles with the skin and provides a more uniform delivery of the substance.

[0924] A perfusion device for localized drug delivery has been described by Zamoyski and is taught for example in U.S. Pat. No. 6,468,247, the contents of which are incorporated herein by reference in their entirety. According to Zamoyski, multiple hypodermic needles are incorporated into the device which injects the contents of the hypodermics into a tissue as said hypodermics are being retracted.

[0925] A method for enhanced transport of drugs and biological molecules across tissue by improving the interaction between micro-needles and human skin has been described by Prausnitz et al. and is taught for example in U.S. Pat. No. 6,743,211, the contents of which are incorporated herein by reference in their entirety. According to Prausnitz, multiple micro-needles are incorporated into a device which is able to present a more rigid and less deformable surface to which the micro-needles are applied.

[0926] A device for intraorgan administration of medicinal agents has been described by Ting et al and is taught for example in U.S. Pat. No. 6,077,251, the contents of which are incorporated herein by reference in their entirety. According to Ting, multiple needles having side openings for enhanced administration are incorporated into a device which by extending and retracting said needles from and into the needle chamber forces a medicinal agent from a reservoir into said needles and injects said medicinal agent into a target organ.

[0927] A multiple needle holder and a subcutaneous multiple channel infusion port has been described by Brown and is taught for example in U.S. Pat. No. 4,695,273, the contents of which are incorporated herein by reference in their entirety. According to Brown, multiple needles on the needle holder are inserted through the septum of the infusion port and communicate with isolated chambers in said infusion port.

[0928] A dual hypodermic syringe has been described by Horn and is taught for example in U.S. Pat. No. 3,552,394, the contents of which are incorporated herein by reference in their entirety. According to Horn, two needles incorporated into the device are spaced apart less than 68 mm and may be of different styles and lengths, thus enabling injections to be made to different depths.

[0929] A syringe with multiple needles and multiple fluid compartments has been described by Hershberg and is taught for example in U.S. Pat. No. 3,572,336, the contents of which are incorporated herein by reference in their entirety. According to Hershberg, multiple needles are incorporated into the syringe which has multiple fluid compartments and is capable of simultaneously administering incompatible drugs which are not able to be mixed for one injection.

[0930] A surgical instrument for intradermal injection of fluids has been described by Eliscu et al. and is taught for example in U.S. Pat. No. 2,588,623, the contents of which are incorporated herein by reference in their entirety. According to Eliscu, multiple needles are incorporated into the instrument which injects fluids intradermally with a wider disperse.

[0931] An apparatus for simultaneous delivery of a substance to multiple breast milk ducts has been described by Hung and is taught for example in EP 1818017, the contents of which are incorporated herein by reference in their entirety. According to Hung, multiple lumens are incorporated into the device which inserts though the orifices of the ductal networks and delivers a fluid to the ductal networks.

[0932] A catheter for introduction of medications to the tissue of a heart or other organs has been described by Tkebuchava and is taught for example in WO2006138109, the contents of which are incorporated herein by reference in their entirety. According to Tkebuchava, two curved needles are incorporated which enter the organ wall in a flattened trajectory.

[0933] Devices for delivering medical agents have been described by Mckay et al. and are taught for example in WO2006118804, the content of which are incorporated herein by reference in their entirety. According to Mckay, multiple needles with multiple orifices on each needle are incorporated into the devices to facilitate regional delivery to a tissue, such as the interior disc space of a spinal disc.

[0934] A method for directly delivering an immunomodulatory substance into an intradermal space within a mammalian skin has been described by Pettis and is taught for example in WO2004020014, the contents of which are incorporated herein by reference in their entirety. According to Pettis, multiple needles are incorporated into a device which delivers the substance through the needles to a depth between 0.3 mm and 2 mm.

[0935] Methods and devices for administration of substances into at least two compartments in skin for systemic absorption and improved pharmacokinetics have been described by Pettis et al. and are taught for example in WO2003094995, the contents of which are incorporated herein by reference in their entirety. According to Pettis, multiple needles having lengths between about 300 m and about 5 mm are incorporated into a device which delivers to intradermal and subcutaneous tissue compartments simultaneously.

[0936] A drug delivery device with needles and a roller has been described by Zimmerman et al. and is taught for example in WO2012006259, the contents of which are incorporated herein by reference in their entirety. According to Zimmerman, multiple hollow needles positioned in a roller are incorporated into the device which delivers the content in a reservoir through the needles as the roller rotates.

[0937] A drug delivery device such as a stent is known in the art and is taught for example in U.S. Pat. No. 8,333,799, U.S. Pub. Nos. US20060020329, US20040172127 and US20100161032; the contents of each of which are herein incorporated by reference in their entirety. Formulations of the polynucleotides, primary constructs, mmRNA described herein may be delivered using stents. Additionally, stents used herein may be able to deliver multiple polynucleotides, primary constructs and/or mmRNA and/or formulations at the same or varied rates of delivery. Non-limiting examples of manufacturers of stents include CORDIS● (Miami, FL) (CYPHER●), Boston Scientific Corporation (Natick, MA) (TAXUS●), Medtronic (Minneapolis, MN) (ENDEAVOUR●) and Abbott (Abbott Park, IL) (XIENCE V●).

Methods and Devices Utilizing Catheters and/or Lumens

[0938] Methods and devices using catheters and lumens may be employed to administer the mmRNA of the present invention on a single, multi- or split dosing schedule. Such methods and devices are described below.

[0939] A catheter-based delivery of skeletal myoblasts to the myocardium of damaged hearts has been described by Jacoby et al and is taught for example in US Patent Publication 20060263338, the contents of which are incorporated herein by reference in their entirety. According to Jacoby, multiple needles are incorporated into the device at least part of which is inserted into a blood vessel and delivers the cell composition through the needles into the localized region of the subject's heart.

[0940] An apparatus for treating asthma using neurotoxin has been described by Deem et al and is taught for example in US Patent Publication 20060225742, the contents of which are incorporated herein by reference in their entirety. According to Deem, multiple needles are incorporated into the device which delivers neurotoxin through the needles into the bronchial tissue.

[0941] A method for administering multiple-component therapies has been described by Nayak and is taught for example in U.S. Pat. No. 7,699,803, the contents of which are incorporated herein by reference in their entirety. According to Nayak, multiple injection cannulas may be incorporated into a device wherein depth slots may be included for controlling the depth at which the therapeutic substance is delivered within the tissue.

[0942] A surgical device for ablating a channel and delivering at least one therapeutic agent into a desired region of the tissue has been described by McIntyre et al and is taught for example in U.S. Pat. No. 8,012,096, the contents of which are incorporated herein by reference in their entirety. According to McIntyre, multiple needles are incorporated into the device which dispenses a therapeutic agent into a region of tissue surrounding the channel and is particularly well suited for transmyocardial revascularization operations.

[0943] Methods of treating functional disorders of the bladder in mammalian females have been described by Versi et al and are taught for example in U.S. Pat. No. 8,029,496, the contents of which are incorporated herein by reference in their entirety. According to Versi, an array of micro-needles is incorporated into a device which delivers a therapeutic agent through the needles directly into the trigone of the bladder.

[0944] A device and a method for delivering fluid into a flexible biological barrier have been described by Yeshurun et al. and are taught for example in U.S. Pat. No. 7,998,119 (device) and U.S. Pat. No. 8,007,466 (method), the contents of which are incorporated herein by reference in their entirety. According to Yeshurun, the micro-needles on the device penetrate and extend into the flexible biological barrier and fluid is injected through the bore of the hollow micro-needles.

[0945] A method for epicardially injecting a substance into an area of tissue of a heart having an epicardial surface and disposed within a torso has been described by Bonner et al and is taught for example in U.S. Pat. No. 7,628,780, the contents of which are incorporated herein by reference in their entirety. According to Bonner, the devices have elongate shafts and distal injection heads for driving needles into tissue and injecting medical agents into the tissue through the needles.

[0946] A device for sealing a puncture has been described by Nielsen et al and is taught for example in U.S. Pat. No. 7,972,358, the contents of which are incorporated herein by reference in their entirety. According to Nielsen, multiple needles are incorporated into the device which delivers a closure agent into the tissue surrounding the puncture tract.

[0947] A method for myogenesis and angiogenesis has been described by Chiu et al. and is taught for example in U.S. Pat. No. 6,551,338, the contents of which are incorporated herein by reference in their entirety. According to Chiu, 5 to 15 needles having a maximum diameter of at least 1.25 mm and a length effective to provide a puncture depth of 6 to 20 mm are incorporated into a device which inserts into proximity with a myocardium and supplies an exogeneous angiogenic or myogenic factor to said myocardium through the conduits which are in at least some of said needles.

[0948] A method for the treatment of prostate tissue has been described by Bolmsj et al. and is taught for example in U.S. Pat. No. 6,524,270, the contents of which are incorporated herein by reference in their entirety. According to Bolmsj, a device comprising a catheter which is inserted through the urethra has at least one hollow tip extendible into the surrounding prostate tissue. An astringent and analgesic medicine is administered through said tip into said prostate tissue.

[0949] A method for infusing fluids to an intraosseous site has been described by Findlay et al. and is taught for example in U.S. Pat. No. 6,761,726, the contents of which are incorporated herein by reference in their entirety. According to Findlay, multiple needles are incorporated into a device which is capable of penetrating a hard shell of material covered by a layer of soft material and delivers a fluid at a predetermined distance below said hard shell of material.

[0950] A device for injecting medications into a vessel wall has been described by Vigil et al. and is taught for example in U.S. Pat. No. 5,713,863, the contents of which are incorporated herein by reference in their entirety. According to Vigil, multiple injectors are mounted on each of the flexible tubes in the device which introduces a medication fluid through a multi-lumen catheter, into said flexible tubes and out of said injectors for infusion into the vessel wall.

[0951] A catheter for delivering therapeutic and/or diagnostic agents to the tissue surrounding a bodily passageway has been described by Faxon et al. and is taught for example in U.S. Pat. No. 5,464,395, the contents of which are incorporated herein by reference in their entirety. According to Faxon, at least one needle cannula is incorporated into the catheter which delivers the desired agents to the tissue through said needles which project outboard of the catheter.

[0952] Balloon catheters for delivering therapeutic agents have been described by Orr and are taught for example in WO2010024871, the contents of which are incorporated herein by reference in their entirety. According to Orr, multiple needles are incorporated into the devices which deliver the therapeutic agents to different depths within the tissue. In another aspect, drug-eluting balloons may be used to deliver the formulations described herein. The drug-eluting balloons may be used in target lesion applications such as, but are not limited to, in-stent restenosis, treating lesion in tortuous vessels, bifurcation lesions, femoral/popliteal lesions and below the knee lesions.

[0953] A device for delivering therapeutic agents (e.g., polynucleotides, primary constructs or mmRNA) to tissue disposed about a lumen has been described by Perry et al. and is taught for example in U.S. Pat. Pub. US20100 125239, the contents of which are herein incorporated by reference in their entirety. According to Perry, the catheter has a balloon which may be coated with a therapeutic agent by methods known in the art and described in Perry. When the balloon expands, the therapeutic agent will contact the surrounding tissue. The device may additionally have a heat source to change the temperature of the coating on the balloon to release the therapeutic agent to the tissue.

### Methods and Devices Utilizing Electrical Current

[0954] Methods and devices utilizing electric current may be employed to deliver the mmRNA of the present invention according to the single, multi- or split dosing regimens taught herein. Such methods and devices are described below.

[0955] An electro collagen induction therapy device has been described by Marquez and is taught for example in US Patent Publication 20090137945, the contents of which are incorporated herein by reference in their entirety. According to Marquez, multiple needles are incorporated into the device which repeatedly pierce the skin and draw in the skin a portion of the substance which is applied to the skin first.

[0956] An electrokinetic system has been described by Etheredge et al. and is taught for example in US Patent Publication 20070185432, the contents of which are incorporated herein by reference in their entirety. According to Etheredge, micro-needles are incorporated into a device which drives by an electrical current the medication through the needles into the targeted treatment site.

[0957] An iontophoresis device has been described by Matsumura et al. and is taught for example in U.S. Pat. No. 7,437,189, the contents of which are incorporated herein by reference in their entirety. According to Matsumura, multiple needles are incorporated into the device which is capable of delivering ionizable drug into a living body at higher speed or with higher efficiency.

[0958] Intradermal delivery of biologically active agents by needle-free injection and electroporation has been described by Hoffmann et al and is taught for example in U.S. Pat. No. 7,171,264, the contents of which are incorporated herein by reference in their entirety. According to Hoffmann, one or more needle-free injectors are incorporated into an electroporation device and the combination of needle-free injection and electroporation is sufficient to introduce the agent into cells in skin, muscle or mucosa.

[0959] A method for electropermeabilization-mediated intracellular delivery has been described by Lundkvist et al. and is taught for example in U.S. Pat. No. 6,625,486, the contents of which are incorporated herein by reference in their entirety. According to Lundkvist, a pair of needle electrodes is incorporated into a catheter. Said catheter is positioned into a body lumen followed by extending said needle electrodes to penetrate into the tissue surrounding said lumen. Then the device introduces an agent through at least one of said needle electrodes and applies electric field by said pair of needle electrodes to allow said agent pass through the cell membranes into the cells at the treatment site.

[0960] A delivery system for transdermal immunization has been described by Levin et al. and is taught for example in WO2006003659, the contents of which are incorporated herein by reference in their entirety. According to Levin, multiple electrodes are incorporated into the device which applies electrical energy between the electrodes to generate micro channels in the skin to facilitate transdermal delivery.

[0961] A method for delivering RF energy into skin has been described by Schomacker and is taught for example in WO2011163264, the contents of which are incorporated herein by reference in their entirety. According to Schomacker, multiple needles are incorporated into a device which applies vacuum to draw skin into contact with a plate so that needles insert into skin through the holes on the plate and deliver RF energy.

### VI. Definitions

[0962] At various places in the present specification, substituents of compounds of the present disclosure are disclosed in groups or in ranges. It is specifically intended that the present disclosure include each and every individual subcombination of the members of such groups and ranges. For example, the term “C₁₋₆ alkyl” is specifically intended to individually disclose methyl, ethyl, C₃ alkyl, C₄ alkyl, C₅ alkyl, and C₆ alkyl.

[0963] A bout: As used herein, the term “about” means +/−10% of the recited value.

[0964] Administered in combination: As used herein, the term “administered in combination” or “combined administration” means that two or more agents are administered to a subject at the same time or within an interval such that there may be an overlap of an effect of each agent on the patient. In some embodiments, they are administered within about 60, 30, 15, 10, 5, or 1 minute of one another. In some embodiments, the administrations of the agents are spaced sufficiently closely together such that a combinatorial (e.g., a synergistic) effect is achieved.

[0965] Animal: As used herein, the term “animal” refers to any member of the animal kingdom. In some embodiments, “animal” refers to humans at any stage of development. In some embodiments, “animal” refers to non-human animals at any stage of development. In certain embodiments, the non-human animal is a mammal (e.g., a rodent, a mouse, a rat, a rabbit, a monkey, a dog, a cat, a sheep, cattle, a primate, or a pig). In some embodiments, animals include, but are not limited to, mammals, birds, reptiles, amphibians, fish, and worms. In some embodiments, the animal is a transgenic animal, genetically-engineered animal, or a clone.

[0966] Antigens of interest or desired antigens: As used herein, the terms “antigens of interest” or “desired antigens” include those proteins and other biomolecules provided herein that are immunospecifically bound by the antibodies and fragments, mutants, variants, and alterations thereof described herein. Examples of antigens of interest include, but are not limited to, insulin, insulin-like growth factor, hGH, tPA, cytokines, such as interleukins (IL), e.g., IL-1, IL-2, IL-3, IL-4, IL-5, IL-6, IL-7, IL-8, IL-9, IL-10, IL-11, IL-12, IL-13, IL-14, IL-15, IL-16, IL-17, IL-18, interferon (IFN) alpha, IFN beta, IFN gamma, IFN omega or IFN tau, tumor necrosis factor (TNF), such as TNF alpha and TNF beta, TNF gamma, TRAIL; G-CSF, GM-CSF, M-CSF, MCP-1 and VEGF.

[0967] Approximately: As used herein, the term “approximately” or “about,” as applied to one or more values of interest, refers to a value that is similar to a stated reference value. In certain embodiments, the term “approximately” or “about” refers to a range of values that fall within 25%, 20%, 19%, 18%, 17%, 16%, 15%, 14%, 13%, 12%, 11%, 10%, 9%, 8%, 7%, 6%, 5%, 4%, 3%, 2%, 1%, or less in either direction (greater than or less than) of the stated reference value unless otherwise stated or otherwise evident from the context (except where such number would exceed 100% of a possible value).

[0968] Associated with: As used herein, the terms “associated with,” “conjugated,” “linked,” “attached,” and “tethered,” when used with respect to two or more moieties, means that the moieties are physically associated or connected with one another, either directly or via one or more additional moieties that serves as a linking agent, to form a structure that is sufficiently stable so that the moieties remain physically associated under the conditions in which the structure is used, e.g., physiological conditions. An “association” need not be strictly through direct covalent chemical bonding. It may also suggest ionic or hydrogen bonding or a hybridization based connectivity sufficiently stable such that the “associated” entities remain physically associated.

[0969] Bifunctional: As used herein, the term “bifunctional” refers to any substance, molecule or moiety which is capable of or maintains at least two functions. The functions may effect the same outcome or a different outcome. The structure that produces the function may be the same or different. For example, bifunctional modified RNAs of the present invention may encode a cytotoxic peptide (a first function) while those nucleosides which comprise the encoding RNA are, in and of themselves, cytotoxic (second function). In this example, delivery of the bifunctional modified RNA to a cancer cell would produce not only a peptide or protein molecule which may ameliorate or treat the cancer but would also deliver a cytotoxic payload of nucleosides to the cell should degradation, instead of translation of the modified RNA, occur.

[0970] Biocompatible: As used herein, the term “biocompatible” means compatible with living cells, tissues, organs or systems posing little to no risk of injury, toxicity or rejection by the immune system.

[0971] Biodegradable: As used herein, the term “biodegradable” means capable of being broken down into innocuous products by the action of living things.

[0972] Biologically active: As used herein, the phrase “biologically active” refers to a characteristic of any substance that has activity in a biological system and/or organism. For instance, a substance that, when administered to an organism, has a biological effect on that organism, is considered to be biologically active. In particular embodiments, a polynucleotide, primary construct or mmRNA of the present invention may be considered biologically active if even a portion of the polynucleotide, primary construct or mmRNA is biologically active or mimics an activity considered biologically relevant.

[0973] Chemical terms: The following provides the definition of various chemical terms from “acyl” to “thiol.”

[0974] The term “acyl,” as used herein, represents a hydrogen or an alkyl group (e.g. a haloalkyl group), as defined herein, that is attached to the parent molecular group through a carbonyl group, as defined herein, and is exemplified by formyl (i.e., a carboxyaldehyde group), acetyl, propionyl, butanoyl and the like. Exemplary unsubstituted acyl groups include from 1 to 7, from 1 to 11, or from 1 to 21 carbons. In some embodiments, the alkyl group is further substituted with 1, 2, 3, or 4 substituents as described herein.

[0975] The term “acylamino,” as used herein, represents an acyl group, as defined herein, attached to the parent molecular group though an amino group, as defined herein (i.e., —N(R^{N1})—C(O)—R, where k is H or an optionally substituted C₁₋₆, C₁₋₁₀, or C₁₋₂₀ alkyl group and R^{N1} is as defined herein). Exemplary unsubstituted acylamino groups include from 1 to 41 carbons (e.g., from 1 to 7, from 1 to 13, from 1 to 21, from 2 to 7, from 2 to 13, from 2 to 21, or from 2 to 41 carbons). In some embodiments, the alkyl group is further substituted with 1, 2, 3, or 4 substituents as described herein, and/or the amino group is —NH₂ or —NHR^{N1}, wherein R^{N1} is, independently, OH, NO₂, NH₂, NR^{N2}₂, SO₂OR^{N2}, SO₂R^{N2}, SOR^{N2}, alkyl, or aryl, and each R^{N2} can be H, alkyl, or aryl.

[0976] The term “acyloxy,” as used herein, represents an acyl group, as defined herein, attached to the parent molecular group though an oxygen atom (i.e., —O—C(O)—R, where R is H or an optionally substituted C₁₋₆, C₁₋₁₀, or C₁₋₂₀ alkyl group). Exemplary unsubstituted acyloxy groups include from 1 to 21 carbons (e.g., from 1 to 7 or from 1 to 11 carbons). In some embodiments, the alkyl group is further substituted with 1, 2, 3, or 4 substituents as described herein, and/or the amino group is —NH₂ or —NHR^{N1}, wherein R^{N1} is, independently, OH, NO₂, NH₂, NR^{N2}₂, SO₂OR^{N2}, SO₂R^{N2}, SOR^{N2}, alkyl, or aryl, and each R^{N2} can be H, alkyl, or aryl.

[0977] The term “alkaryl,” as used herein, represents an aryl group, as defined herein, attached to the parent molecular group through an alkylene group, as defined herein. Exemplary unsubstituted alkaryl groups are from 7 to 30 carbons (e.g., from 7 to 16 or from 7 to 20 carbons, such as C₁₋₆ alk-C₆₋₁₀ aryl, C₁₋₁₀ alk-C₆₋₁₀ aryl, or C₁₋₂₀ alk-C₆₋₁₀ aryl). In some embodiments, the alkylene and the aryl each can be further substituted with 1, 2, 3, or 4 substituent groups as defined herein for the respective groups. Other groups preceded by the prefix “alk-” are defined in the same manner, where “alk” refers to a C₁₋₆ alkylene, unless otherwise noted, and the attached chemical structure is as defined herein.

[0978] The term “alkcycloalkyl” represents a cycloalkyl group, as defined herein, attached to the parent molecular group through an alkylene group, as defined herein (e.g. an alkylene group of from 1 to 4, from 1 to 6, from 1 to 10, or form 1 to 20 carbons). In some embodiments, the alkylene and the cycloalkyl each can be further substituted with 1, 2, 3, or 4 substituent groups as defined herein for the respective group.

[0979] The term “alkenyl,” as used herein, represents monovalent straight or branched chain groups of, unless otherwise specified, from 2 to 20 carbons (e.g., from 2 to 6 or from 2 to 10 carbons) containing one or more carbon-carbon double bonds and is exemplified by ethenyl, 1-propenyl, 2-propenyl, 2-methyl-1-propenyl, 1-butenyl, 2-butenyl, and the like. Alkenyls include both cis and trans isomers. Alkenyl groups may be optionally substituted with 1, 2, 3, or 4 substituent groups that are selected, independently, from amino, aryl, cycloalkyl, or heterocyclyl (e.g., heteroaryl), as defined herein, or any of the exemplary alkyl substituent groups described herein.

[0980] The term “alkenyloxy” represents a chemical substituent of formula —OR, where R is a C₂₋₂₀ alkenyl group (e.g., C₂₋₆ or C₂₋₁₀ alkenyl), unless otherwise specified. Exemplary alkenyloxy groups include ethenyloxy, propenyloxy, and the like. In some embodiments, the alkenyl group can be further substituted with 1, 2, 3, or 4 substituent groups as defined herein (e.g., a hydroxy group).

[0981] The term “haloheteroaryl” refers to a heteroaryl group, as defined herein, attached to the parent molecular group through an alkylene group, as defined herein. Exemplary unsubstituted alkheteroaryl groups are from 2 to 32 carbons (e.g., from 2 to 22, from 2 to 18, from 2 to 17, from 2 to 16, from 3 to 15, from 2 to 14, from 2 to 13, or from 2 to 12 carbons, such as C₁₋₆ alk-C₁₋₁₂ heteroaryl, C₁₋₁₀ alk-C₁₋₁₂ heteroaryl, or C₁₋₂₀, alk-C₁₋₁₂ heteroaryl). In some embodiments, the alkylene and the heteroaryl each can be further substituted with 1, 2, 3, or 4 substituent groups as defined herein for the respective group. Alkheteroaryl groups are a subset of alkheterocyclyl groups.

[0982] The term “alkheterocyclyl” represents a heterocyclyl group, as defined herein, attached to the parent molecular group through an alkylene group, as defined herein. Exemplary unsubstituted alkheterocyclyl groups are from 2 to 32 carbons (e.g., from 2 to 22, from 2 to 18, from 2 to 17, from 2 to 16, from 3 to 15, from 2 to 14, from 2 to 13, or from 2 to 12 carbons, such as C₁₋₆ alk-C₁₋₁₂ heterocyclyl, C₁₋₁₀ alk-C₁₋₁₂ heterocyclyl, or C₁₋₂₀ alk-C₁₋₁₂ heterocyclyl). In some embodiments, the alkylene and the heterocyclyl each can be further substituted with 1, 2, 3, or 4 substituent groups as defined herein for the respective group.

[0983] The term “alkoxy” represents a chemical substituent of formula —OR, where R is a C₁₋₂₀ alkyl group (e.g., C₁₋₆ or C₁₋₁₀ alkyl), unless otherwise specified. Exemplary alkoxy groups include methoxy, ethoxy, propoxy (e.g., n-propoxy and isopropoxy), t-butoxy, and the like. In some embodiments, the alkyl group can be further substituted with 1, 2, 3, or 4 substituent groups as defined herein (e.g., hydroxy or alkoxy).

[0984] The term “alkoxyalkoxy” represents an alkoxy group that is substituted with an alkoxy group. Exemplary unsubstituted alkoxyalkoxy groups include between 2 to 40 carbons (e.g., from 2 to 12 or from 2 to 20 carbons, such as C₁₋₆ alkoxy-C₁₋₆ alkoxy, C₁₋₁₀ alkoxy-C₁₋₁₀ alkoxy, or C₁₋₂₀ alkoxy-C₁₋₂₀ alkoxy). In some embodiments, the each alkoxy group can be further substituted with 1, 2, 3, or 4 substituent groups as defined herein.

[0985] The term “alkoxyalkyl” represents an alkyl group that is substituted with an alkoxy group. Exemplary unsubstituted alkoxyalkyl groups include between 2 to 40 carbons (e.g., from 2 to 12 or from 2 to 20 carbons, such as C₁₋₆ alkoxy-C₁₋₆ alkyl, C₁₋₁₀ alkoxy-C₁₋₁₀ alkyl, or C₁₋₂₀ alkoxy-C₁₋₂₀ alkyl). In some embodiments, the alkyl and the alkoxy each can be further substituted with 1, 2, 3, or 4 substituent groups as defined herein for the respective group.

[0986] The term “alkoxycarbonyl,” as used herein, represents an alkoxy, as defined herein, attached to the parent molecular group through a carbonyl atom (e.g., —C(O)—OR, where R is H or an optionally substituted C₁₋₆, C₁₋₁₀, or C₁₋₂₀ alkyl group). Exemplary unsubstituted alkoxycarbonyl include from 1 to 21 carbons (e.g., from 1 to 11 or from 1 to 7 carbons). In some embodiments, the alkoxy group is further substituted with 1, 2, 3, or 4 substituents as described herein.

[0987] The term “alkoxycarbonylalkoxy,” as used herein, represents an alkoxy group, as defined herein, that is substituted with an alkoxycarbonyl group, as defined herein (e.g., —O-alkyl-C(O)—OR, where R is an optionally substituted C₁₋₆, C₁₋₁₀, or C₁₋₂₀ alkyl group). Exemplary unsubstituted alkoxycarbonylalkoxy include from 3 to 41 carbons (e.g., from 3 to 10, from 3 to 13, from 3 to 17, from 3 to 21, or from 3 to 31 carbons, such as C₁₋₆ alkoxycarbonyl-C₁₋₆ alkoxy, C₁₋₁₀ alkoxycarbonyl-C₁₋₁₀ alkoxy, or C₁₋₂₀ alkoxycarbonyl-C₁₋₂₀ alkoxy). In some embodiments, each alkoxy group is further independently substituted with 1, 2, 3, or 4 substituents, as described herein (e.g., a hydroxy group).

[0988] The term “alkoxycarbonylalkyl,” as used herein, represents an alkyl group, as defined herein, that is substituted with an alkoxycarbonyl group, as defined herein (e.g., alkyl-C(O)—OR, where R is an optionally substituted C₁₋₂₀, C₁₋₁₀, or C₁₋₆ alkyl group). Exemplary unsubstituted alkoxycarbonylalkyl include from 3 to 41 carbons (e.g., from 3 to 10, from 3 to 13, from 3 to 17, from 3 to 21, or from 3 to 31 carbons, such as C₁₋₆ alkoxycarbonyl-C₁₋₆ alkyl, C₁₋₁₀ alkoxycarbonyl-C₁₋₁₀ alkyl, or C₁₋₂₀ alkoxycarbonyl-C₁₋₂₀ alkyl). In some embodiments, each alkyl and alkoxy group is further independently substituted with 1, 2, 3, or 4 substituents as described herein (e.g., a hydroxy group).

[0989] The term “alkyl,” as used herein, is inclusive of both straight chain and branched chain saturated groups from 1 to 20 carbons (e.g., from 1 to 10 or from 1 to 6), unless otherwise specified. Alkyl groups are exemplified by methyl, ethyl, n- and isopropyl, n-, sec-, iso- and tert-butyl, neopentyl, and the like, and may be optionally substituted with one, two, three, or, in the case of alkyl groups of two carbons or more, four substituents independently selected from the group consisting of: (1) C₁₋₆ alkoxy; (2) C₁₋₆ alkylsulfinyl; (3) amino, as defined herein (e.g., unsubstituted amino (i.e., —NH₂) or a substituted amino (i.e., —N(R^{N1})₂, where R^{N1} is as defined for amino); (4) C₆₋₁₀ aryl-C₁₋₆ alkoxy; (5) azido; (6) halo; (7) (C₂₋₉ heterocyclyl)oxy; (8) hydroxy; (9) nitro; (10) oxo (e.g., carboxyaldehyde or acyl); (11) C₁₋₇ spirocyclyl; (12) thioalkoxy; (13) thiol; (14) —CO₂R^{A′}, where R^{A′} is selected from the group consisting of (a) C₁₋₂₀ alkyl (e.g., C₁₋₆ alkyl), (b) C₂₋₂₀ alkenyl (e.g., C₂₋₆ alkenyl), (c) C₆₋₁₀ aryl, (d) hydrogen, (e) C₁₋₆ alk-C₆₋₁₀ aryl, (f) amino-C₁₋₂₀ alkyl, (g) polyethylene glycol of —(CH₂)ₛ₂(OCH₂CH₂)ₛ₁(CH₂)ₛ₃OR′, wherein s1 is an integer from 1 to 10 (e.g., from 1 to 6 or from 1 to 4), each of s2 and s3, independently, is an integer from 0 to 10 (e.g., from 0 to 4, from 0 to 6, from 1 to 4, from 1 to 6, or from 1 to 10), and R′ is H or C₁₋₂₀ alkyl, and (h) amino-polyethylene glycol of —NR^{N1}(CH₂)ₛ₂(CH₂CH₂O)ₛ₁(CH₂)ₛ₃NR^{N1}, wherein s1 is an integer from 1 to 10 (e.g., from 1 to 6 or from 1 to 4), each of s2 and s3, independently, is an integer from 0 to 10 (e.g., from 0 to 4, from 0 to 6, from 1 to 4, from 1 to 6, or from 1 to 10), and each R^{N1} is, independently, hydrogen or optionally substituted C₁₋₆ alkyl; (15) —C(O)NR^{B′}R^{C′}, where each of R^{B′} and R^{C′} is, independently, selected from the group consisting of (a) hydrogen, (b) C₁₋₆ alkyl, (c) C₆₋₁₀ aryl, and (d) C₁₋₆ alk-C₆₋₁₀ aryl; (16) —SO₂R, where R^{D′} is selected from the group consisting of (a) C₁₋₆ alkyl, (b) C₆₋₁₀ aryl, (c) C₁₋₆ alk-C₆₋₁₀ aryl, and (d) hydroxy; (17) —SO₂NR^{E′}R^{F′}, where each of R^{E′} and R^{F′} is, independently, selected from the group consisting of (a) hydrogen, (b) C₁₋₆ alkyl, (c) C₆₋₁₀ aryl and (d) C₁₋₆ alk-C₆₋₁₀ aryl; (18) —C(O)R^{G′}, where R^{G′} is selected from the group consisting of (a) C₁₋₂₀ alkyl (e.g., C₁₋₆ alkyl), (b) C₂₋₂₀ alkenyl (e.g., C₂₋₆ alkenyl), (c) C₆₋₁₀ aryl, (d) hydrogen, (e) C₁₋₆ alk-C₆₋₁₀ aryl, (f) amino-C₁₋₂₀ alkyl, (g) polyethylene glycol of —(CH₂)ₛ₂(OCH₂CH₂)ₛ₁(CH₂)ₛ₃OR′, wherein s1 is an integer from 1 to 10 (e.g., from 1 to 6 or from 1 to 4), each of s2 and s3, independently, is an integer from 0 to 10 (e.g., from 0 to 4, from 0 to 6, from 1 to 4, from 1 to 6, or from 1 to 10), and R′ is H or C₁₋₂₀ alkyl, and (h) amino-polyethylene glycol of —NR^{N1}(CH₂)ₛ₂(CH₂CH₂O)ₛ₁(CH₂)ₛ₃NR^{N1}, wherein s1 is an integer from 1 to 10 (e.g., from 1 to 6 or from 1 to 4), each of s2 and s3, independently, is an integer from 0 to 10 (e.g., from 0 to 4, from 0 to 6, from 1 to 4, from 1 to 6, or from 1 to 10), and each R^{N1} is, independently, hydrogen or optionally substituted C₁₋₆ alkyl; (19) —NR^{H′}C(O)R^{1′}, wherein R^{H′} is selected from the group consisting of (a1) hydrogen and (b1) C₁₋₆ alkyl, and R^{1′} is selected from the group consisting of (a2) C₁₋₂₀ alkyl (e.g., C₁₋₆ alkyl), (b2) C₂₋₂₀ alkenyl (e.g., C₂₋₆ alkenyl), (c2) C₆₋₁₀ aryl, (d2) hydrogen, (e2) C₁₋₆ alk-C₆₋₁₀ aryl, (f2) amino-C₂₋₂₀ alkyl, (g2) polyethylene glycol of —(CH₂)ₛ₂(OCH₂CH₂)ₛ₁(CH₂)ₛ₃OR′, wherein s1 is an integer from 1 to 10 (e.g., from 1 to 6 or from 1 to 4), each of s2 and s3, independently, is an integer from 0 to 10 (e.g., from 0 to 4, from 0 to 6, from 1 to 4, from 1 to 6, or from 1 to 10), and R′ is H or C₁₋₂₀ alkyl, and (h2) amino-polyethylene glycol of —NR^{N1}(CH₂)ₛ₂(CH₂CH₂O)ₛ₁(CH₂)ₛ₃NR^{N1}, wherein s1 is an integer from 1 to 10 (e.g., from 1 to 6 or from 1 to 4), each of s2 and s3, independently, is an integer from 0 to 10 (e.g., from 0 to 4, from 0 to 6, from 1 to 4, from 1 to 6, or from 1 to 10), and each R^{N1} is, independently, hydrogen or optionally substituted C₁₋₆ alkyl; (20) —NR^{J′}C(O(C)OR^{K′}, wherein R^{J′} is selected from the group consisting of (a1) hydrogen and (b1) C₁₋₆ alkyl, and R^{K′} is selected from the group consisting of (a2) C₁₋₂₀ alkyl (e.g., C₁₋₆ alkyl), (b2) C₂₋₂₀ alkenyl (e.g., C₂₋₆ alkenyl), (c2) C₆₋₁₀ aryl, (d2) hydrogen, (e2) C₁₋₆ alk-C₆₋₁₀ aryl, (f2) amino-C₁₋₂₀ alkyl, (g2) polyethylene glycol of —(CH₂)ₛ₂(OCH₂CH₂)ₛ₁(CH₂)ₛ₃OR′, wherein s1 is an integer from 1 to 10 (e.g., from 1 to 6 or from 1 to 4), each of s2 and s3, independently, is an integer from 0 to 10 (e.g., from 0 to 4, from 0 to 6, from 1 to 4, from 1 to 6, or from 1 to 10), and R′ is H or C₁₋₂₀ alkyl, and (h2) amino-polyethylene glycol of —NR^{N1}(CH₂)ₛ₂(CH₂CH₂O)ₛ₁(CH₂)ₛ₃NR^{N1}, wherein s1 is an integer from 1 to 10 (e.g., from 1 to 6 or from 1 to 4), each of s2 and s3, independently, is an integer from 0 to 10 (e.g., from 0 to 4, from 0 to 6, from 1 to 4, from 1 to 6, or from 1 to 10), and each R^{N}1 is, independently, hydrogen or optionally substituted C₁₋₆ alkyl; and (21) amidine. In some embodiments, each of these groups can be further substituted as described herein. For example, the alkylene group of a C₁-alkaryl can be further substituted with an oxo group to afford the respective aryloyl substituent.

[0990] The term “alkylene” and the prefix “alk-,” as used herein, represent a saturated divalent hydrocarbon group derived from a straight or branched chain saturated hydrocarbon by the removal of two hydrogen atoms, and is exemplified by methylene, ethylene, isopropylene, and the like. The term “C_{x-y} alkylene” and the prefix “C_{x-y} alk-” represent alkylene groups having between x and y carbons. Exemplary values for x are 1, 2, 3, 4, 5, and 6, and exemplary values for y are 2, 3, 4, 5, 6, 7, 8, 9, 10, 12, 14, 16, 18, or 20 (e.g., C₁₋₆, C₁₋₁₀, C₂₋₂₀, C₂₋₆, C₂₋₁₀, or C₂₋₂₀ alkylene). In some embodiments, the alkylene can be further substituted with 1, 2, 3, or 4 substituent groups as defined herein for an alkyl group.

[0991] The term “alkylsulfinyl,” as used herein, represents an alkyl group attached to the parent molecular group through an —S(CO)— group. Exemplary unsubstituted alkylsulfinyl groups are from 1 to 6, from 1 to 10, or from 1 to 20 carbons. In some embodiments, the alkyl group can be further substituted with 1, 2, 3, or 4 substituent groups as defined herein.

[0992] The term “alkylsulfinylalkyl,” as used herein, represents an alkyl group, as defined herein, substituted by an alkylsulfinyl group. Exemplary unsubstituted alkylsulfinylalkyl groups are from 2 to 12, from 2 to 20, or from 2 to 40 carbons. In some embodiments, each alkyl group can be further substituted with 1, 2, 3, or 4 substituent groups as defined herein.

[0993] The term “alkynyl,” as used herein, represents monovalent straight or branched chain groups from 2 to 20 carbon atoms (e.g., from 2 to 4, from 2 to 6, or from 2 to 10 carbons) containing a carbon-carbon triple bond and is exemplified by ethynyl, 1-propynyl, and the like. Alkynyl groups may be optionally substituted with 1, 2, 3, or 4 substituent groups that are selected, independently, from aryl, cycloalkyl, or heterocyclyl (e.g., heteroaryl), as defined herein, or any of the exemplary alkyl substituent groups described herein.

[0994] The term “alkynyloxy” represents a chemical substituent of formula —OR, where R is a C₂₋₂₀ alkynyl group (e.g., C₂₋₆ or C₂₋₁₀ alkynyl), unless otherwise specified. Exemplary alkynyloxy groups include ethynyloxy, propynyloxy, and the like. In some embodiments, the alkynyl group can be further substituted with 1, 2, 3, or 4 substituent groups as defined herein (e.g., a hydroxy group).

[0995] The term “amidine,” as used herein, represents a —C(═NH)NH₂ group.

[0996] The term “amino,” as used herein, represents —N(R^{N1})₂, wherein each R^{N1} is, independently, H, OH, NO₂, N(R^{N2})₂, SO₂OR^{N2}, SO₂R^{N2}, SOR² an N-protecting group, alkyl, alkenyl, alkynyl, alkoxy, aryl, alkaryl, cycloalkyl, alkcycloalkyl, carboxyalkyl, sulfoalkyl, heterocyclyl (e.g., heteroaryl), or alkheterocyclyl (e.g., alkheteroaryl), wherein each of these recited R^{N1} groups can be optionally substituted, as defined herein for each group; or two R^{N1} combine to form a heterocyclyl or an N-protecting group, and wherein each R^{N2} is, independently, H, alkyl, or aryl. The amino groups of the invention can be an unsubstituted amino (i.e., —NH₂) or a substituted amino (i.e., —N(R^{N1})₂). In a preferred embodiment, amino is —NH₂ or —NHR^{N1}, wherein R^{N1} is, independently, OH, NO₂, NH₂, NR^{N2}₂, SO₂OR^{N2}, SO₂R^{N2}, SOR^{N2}₂, alkyl, carboxyalkyl, sulfoalkyl, or aryl, and each R^{N2} can be H, C₁₋₂₀ alkyl (e.g., C₁₋₆ alkyl), or C₆₋₁₀ aryl.

[0997] The term “amino acid,” as described herein, refers to a molecule having a side chain, an amino group, and an acid group (e.g., a carboxy group of —CO₂H or a sulfo group of —SO₃H), wherein the amino acid is attached to the parent molecular group by the side chain, amino group, or acid group (e.g., the side chain). In some embodiments, the amino acid is attached to the parent molecular group by a carbonyl group, where the side chain or amino group is attached to the carbonyl group. Exemplary side chains include an optionally substituted alkyl, aryl, heterocyclyl, alkaryl, alkheterocyclyl, aminoalkyl, carbamoylalkyl, and carboxyalkyl. Exemplary amino acids include alanine, arginine, asparagine, aspartic acid, cysteine, glutamic acid, glutamine, glycine, histidine, hydroxynorvaline, isoleucine, leucine, lysine, methionine, norvaline, ornithine, phenylalanine, proline, pyrrolysine, selenocysteine, serine, taurine, threonine, tryptophan, tyrosine, and valine. Amino acid groups may be optionally substituted with one, two, three, or, in the case of amino acid groups of two carbons or more, four substituents independently selected from the group consisting of: (1) C₁₋₆ alkoxy; (2) C₁₋₆ alkylsulfinyl; (3) amino, as defined herein (e.g., unsubstituted amino (i.e., —NH₂) or a substituted amino (i.e., —N(R^{N1})₂, where R^{N1} is as defined for amino); (4) C₆₋₁₀ aryl-C₁₋₆ alkoxy; (5) azido; (6) halo; (7) (C₂₋₉ heterocyclyl)oxy; (8) hydroxy; (9) nitro; (10) oxo (e.g., carboxyaldehyde or acyl); (11) C₁₋₇ spirocyclyl; (12) thioalkoxy; (13) thiol; (14) —CO₂R^{A′}, where R^{A′} is selected from the group consisting of (a) C₁₋₂₀ alkyl (e.g., C₁₋₆ alkyl), (b) C₂₋₂₀ alkenyl (e.g., C₂₋₆ alkenyl), (c) C₆₋₁₀ aryl, (d) hydrogen, (e) C₁₋₆ alk-C₆₋₁₀ aryl, (f) amino-C₁₋₂₀ alkyl, (g) polyethylene glycol of —(CH₂)ₛ₂(OCH₂CH₂)ₛ₁(CH₂)ₛ₃OR′, wherein s1 is an integer from 1 to 10 (e.g., from 1 to 6 or from 1 to 4), each of s2 and s3, independently, is an integer from 0 to 10 (e.g., from 0 to 4, from 0 to 6, from 1 to 4, from 1 to 6, or from 1 to 10), and R′ is H or C₁₋₂₀ alkyl, and (h) amino-polyethylene glycol of —NR^{N1}(CH₂)ₛ₂(CH₂CH₂O)ₛ₁(CH₂)ₛ₃NR^{N1}, wherein s1 is an integer from 1 to 10 (e.g., from 1 to 6 or from 1 to 4), each of s2 and s3, independently, is an integer from 0 to 10 (e.g., from 0 to 4, from 0 to 6, from 1 to 4, from 1 to 6, or from 1 to 10), and each R^{N1} is, independently, hydrogen or optionally substituted C₁₋₆ alkyl; (15) —C(O)NR^{B′}R^{C′}, where each of R^{B′} and R^{C′} is, independently, selected from the group consisting of (a) hydrogen, (b) C₁₋₆ alkyl, (c) C₆₋₁₀ aryl, and (d) C₁₋₆ alk-C₆₋₁₀ aryl; (16) —SO₂R^{D′}, where R^{D′} is selected from the group consisting of (a) C₁₋₆ alkyl, (b) C₆₋₁₀ aryl, (c) C₁₋₆ alk-C₆₋₁₀ aryl, and (d) hydroxy; (17) —SO₂NR^{E′}R^{F′}, where each of R^{E′} and R^{F′} is, independently, sleeted from the group consisting of (a) hydrogen, (b) C₁₋₆ alkyl, (c) C₆₋₁₀ aryl and (d) C₁₋₆ alk-C₆₋₁₀ aryl; (18) —C(O)R^{G′}, where R^{G′} is selected from the group consisting of (a) C₁₋₂₀ alkyl (e.g., C₁₋₆ alkyl), (b) C₂₋₂₀ alkenyl (e.g., C₂₋₆ alkenyl), (c) C₆₋₁₀ aryl, (d) hydrogen, (e) C₁₋₆ alk-C₆₋₁₀ aryl, (f) amino-C₁₋₂₀ alkyl, (g) polyethylene glycol of —(CH₂)ₛ₂(OCH₂CH₂)ₛ₁(CH₂)ₛ₃OR′, wherein s1 is an integer from 1 to 10 (e.g., from 1 to 6 or from 1 to 4), each of s2 and s3, independently, is an integer from 0 to 10 (e.g., from 0 to 4, from 0 to 6, from 1 to 4, from 1 to 6, or from 1 to 10), and R′ is H or C₁₋₂₀ alkyl, and (h) amino-polyethylene glycol of —NR^{N1}(CH₂)ₛ₂(CH₂CH₂O)ₛ₁(CH₂)ₛ₃NR^{N1}, wherein s1 is an integer from 1 to 10 (e.g., from 1 to 6 or from 1 to 4), each of s2 and s3, independently, is an integer from 0 to 10 (e.g., from 0 to 4, from 0 to 6, from 1 to 4, from 1 to 6, or from 1 to 10), and each R^{N1} is, independently, hydrogen or optionally substituted C₁₋₆ alkyl; (19) —NR^{H′}C(O)R^{1′}, wherein R^{H′} is selected from the group consisting of (a1) hydrogen and (b1) C₁₋₆ alkyl, and R^{1′} is selected from the group consisting of (a2) C₁₋₂₀ alkyl (e.g., C₁₋₆ alkyl), (b2) C₂₋₂₀ alkenyl (e.g., C₂₋₆ alkenyl), (c2) C₆₋₁₀ aryl, (d2) hydrogen, (e2) C₁₋₆ alk-C₆₋₁₀ aryl, (f2) amino-C₁₋₂₀ alkyl, (g2) polyethylene glycol of —(CH₂)ₛ₂(OCH₂CH₂)ₛ₁(CH₂)ₛ₃OR′, wherein s1 is an integer from 1 to 10 (e.g., from 1 to 6 or from 1 to 4), each of s2 and s3, independently, is an integer from 0 to 10 (e.g., from 0 to 4, from 0 to 6, from 1 to 4, from 1 to 6, or from 1 to 10), and R′ is H or C₁₋₂₀ alkyl, and (h2) amino-polyethylene glycol of NR^{N1}(CH₂)^{s2}(CH₂CH₂O)ₛ₁(CH₂)ₛ₃NR^{N1}, wherein s1 is an integer from 1 to 10 (e.g., from 1 to 6 or from 1 to 4), each of s2 and s3, independently, is an integer from 0 to 10 (e.g., from 0 to 4, from 0 to 6, from 1 to 4, from 1 to 6, or from 1 to 10), and each R^{N1} is, independently, hydrogen or optionally substituted C₁₋₆ alkyl; (20) —NR^{J′}C(O)OR^{K′}, wherein R^{J′} is selected from the group consisting of (a1) hydrogen and (b1) C₁₋₆ (alkyl, and R^{K′} is selected from the group consisting of (a2) C₁₋₂₀ alkyl (e.g., C₁₋₆ alkyl), (b2) C₂₋₂₀ alkenyl (e.g., C₂₋₆ alkenyl), (c2) C₆₋₁₀ aryl, (d2) hydrogen, (e2) C₁₋₆ alk-C₆₋₁₀ aryl, (f2) amino-C₁₋₂₀ alkyl, (g2) polyethylene glycol of —(CH₂)ₛ₂(OCH₂CH₂)ₛ₁(CH₂)ₛ₃OR′, wherein s1 is an integer from 1 to 10 (e.g., from 1 to 6 or from 1 to 4), each of s2 and s3, independently, is an integer from 0 to 10 (e.g., from 0 to 4, from 0 to 6, from 1 to 4, from 1 to 6, or from 1 to 10), and R′ is H or C₁₋₂₀ alkyl, and (h2) amino-polyethylene glycol of —NR^{N1}(CH₂)ₛ₂(CH₂CH₂O)ₛ₁(CH₂)ₛ₃NR^{N1}, wherein s1 is an integer from 1 to 10 (e.g., from 1 to 6 or from 1 to 4), each of s2 and s3, independently, is an integer from 0 to 10 (e.g., from 0 to 4, from 0 to 6, from 1 to 4, from 1 to 6, or from 1 to 10), and each R^{N1} is, independently, hydrogen or optionally substituted C₁₋₆ alkyl; and (21) amidine. In some embodiments, each of these groups can be further substituted as described herein.

[0998] The term “aminoalkoxy,” as used herein, represents an alkoxy group, as defined herein, substituted by an amino group, as defined herein. The alkyl and amino each can be further substituted with 1, 2, 3, or 4 substituent groups as described herein for the respective group (e.g., CO₂R^{A′}, where R^{A′} is selected from the group consisting of (a) C₁₋₆ alkyl, (b) C₆₋₁₀ aryl, (c) hydrogen, and (d) C₁₋₆ alk-C₁₋₁₀ aryl, e.g., carboxy).

[0999] The term “aminoalkyl,” as used herein, represents an alkyl group, as defined herein, substituted by an amino group, as defined herein. The alkyl and amino each can be further substituted with 1, 2, 3, or 4 substituent groups as described herein for the respective group (e.g., CO₂R^{A′}, where R^{A′} is selected from the group consisting of (a) C₁₋₆ alkyl, (b) C₆₋₁₀ aryl, (c) hydrogen, and (d) C₁₋₆ alk-C₆₋₁₀ aryl, e.g., carboxy).

[1000] The term “aryl,” as used herein, represents a mono-, bicyclic, or multicyclic carbocyclic ring system having one or two aromatic rings and is exemplified by phenyl, naphthyl, 1,2-dihydronaphthyl, 1,2,3,4-tetrahydronaphthyl, anthracenyl, phenanthrenyl, fluorenyl, indanyl, indenyl, and the like, and may be optionally substituted with 1, 2, 3, 4, or 5 substituents independently selected from the group consisting of: (1) C₁₋₇ acyl (e.g. carboxyaldehyde); (2) C₁₋₂₀ alkyl (e.g., C₁₋₆ alkyl, C₁₋₆ alkoxy-C₁₋₆ alkyl, C₁₋₆ alkylsulfinyl-C₁₋₆ alkyl, amino-C—, alkyl, azido-C₁₋₆ alkyl, (carboxyaldehyde)-C₁₋₆ alkyl, halo-C₁₋₆ alkyl (e.g., perfluoroalkyl), hydroxy-C₁₋₆ alkyl, nitro-C₁₋₆ alkyl, or C₁₋₆ thioalkoxy-C₁₋₆ alkyl); (3) C₁₋₂₀ alkoxy (e.g., C₁₋₆ alkoxy, such as perfluoroalkoxy); (4) C₁₋₆ alkylsulfinyl; (5) C₆₋₁₀ aryl; (6) amino; (7) C₁₋₆ alk-C₆₋₁₀ aryl; (8) azido; (9) C₃₋₈ cycloalkyl; (10) C₁₋₆ alk-C₃₋₈ cycloalkyl; (11) halo; (12) C₁₋₁₂ heterocyclyl (e.g., C₁₋₁₂ heteroaryl); (13) (C₁₋₁₂ heterocyclyl)oxy; (14) hydroxy; (15) nitro; (16) C₁₋₂₀ thioalkoxy (e.g., C₁₋₆ thioalkoxy); (17) —(CH₂)_{q}CO₂R^{A′}, where q is an integer from zero to four, and R^{A′} is selected from the group consisting of (a) C₁₋₆ alkyl, (b) C₆₋₁₄ aryl, (c) hydrogen, and (d) C₁₋₆ alk-C₆₋₁₀ aryl; (18) —(CH₂)_{q}CONR^{B′}R^{C′}, where q is an integer from zero to four and where R^{B′} and R^{C′} are independently selected from the group consisting of (a) hydrogen, (b) C₁₋₆ alkyl, (c) C₆₋₁₀ aryl, and (d) C₁₋₆ alk-C₆₋₁₀ aryl; (19) —(CH₂)_{q}SO₂R^{D′}, where q is an integer from zero to four and where RD is selected from the group consisting of (a) alkyl, (b) C₆₋₁₀ aryl, and (c) alk-C₆₋₁₀ aryl; (20) —(CH₂)_{q}SO₂NR^{E′}R^{F′}, where q is an integer from zero to four and where each of R^{E′} and R^{F′} is, independently, selected from the group consisting of (a) hydrogen, (b) C₁₋₆ alkyl, (c) C₆₋₁₀ aryl, and (d) C₁₋₆ alk-C₆₋₁₀ aryl; (21) thiol; (22) C₆₋₁₀ aryloxy; (23) C₃₋₈ cycloalkoxy; (24) C₆₋₁₀ aryl-C₁₋₆ alkoxy; (25) C₁₋₆ alk-C₁₋₁₂ heterocyclyl (e.g., C₁₋₆ alk-C₁₋₁₂ heteroaryl); (26) C₂₋₂₀ alkenyl; and (27) C₂₋₂₀ alkynyl. In some embodiments, each of these groups can be further substituted as described herein. For example, the alkylene group of a C₁-alkaryl or a C₁-alkheterocyclyl can be further substituted with an oxo group to afford the respective aryloyl and (heterocyclyl)oyl substituent group.

[1001] The term “arylalkoxy,” as used herein, represents an alkaryl group, as defined herein, attached to the parent molecular group through an oxygen atom. Exemplary unsubstituted alkoxyalkyl groups include from 7 to 30 carbons (e.g., from 7 to 16 or from 7 to 20 carbons, such as C₆₋₁₀ aryl-C₁₋₆ alkoxy, C₆₋₁₀ aryl-C₁₋₁₀ alkoxy, or C₆₋₁₀ aryl-C₁₋₂₀ alkoxy). In some embodiments, the arylalkoxy group can be substituted with 1, 2, 3, or 4 substituents as defined herein

[1002] The term “aryloxy” represents a chemical substituent of formula —OR′, where R′ is an aryl group of 6 to 18 carbons, unless otherwise specified. In some embodiments, the aryl group can be substituted with 1, 2, 3, or 4 substituents as defined herein.

[1003] The term “aryloyl,” as used herein, represents an aryl group, as defined herein, that is attached to the parent molecular group through a carbonyl group. Exemplary unsubstituted aryloyl groups are of 7 to 11 carbons. In some embodiments, the aryl group can be substituted with 1, 2, 3, or 4 substituents as defined herein.

[1004] The term “azido” represents an —N₃ group, which can also be represented as —N═N═N.

[1005] The term “bicyclic,” as used herein, refer to a structure having two rings, which may be aromatic or non-aromatic. Bicyclic structures include spirocyclyl groups, as defined herein, and two rings that share one or more bridges, where such bridges can include one atom or a chain including two, three, or more atoms. Exemplary bicyclic groups include a bicyclic carbocyclyl group, where the first and second rings are carbocyclyl groups, as defined herein; a bicyclic aryl groups, where the first and second rings are aryl groups, as defined herein; bicyclic heterocyclyl groups, where the first ring is a heterocyclyl group and the second ring is a carbocyclyl (e.g., aryl) or heterocyclyl (e.g., heteroaryl) group; and bicyclic heteroaryl groups, where the first ring is a heteroaryl group and the second ring is a carbocyclyl (e.g., aryl) or heterocyclyl (e.g., heteroaryl) group. In some embodiments, the bicyclic group can be substituted with 1, 2, 3, or 4 substituents as defined herein for cycloalkyl, heterocyclyl, and aryl groups.

[1006] The terms “carbocyclic” and “carbocyclyl,” as used herein, refer to an optionally substituted C₃₋₁₂ monocyclic, bicyclic, or tricyclic structure in which the rings, which may be aromatic or non-aromatic, are formed by carbon atoms. Carbocyclic structures include cycloalkyl, cycloalkenyl, and aryl groups.

[1007] The term “carbamoyl,” as used herein, represents —C(O)—N(R^{N1})₂, where the meaning of each R^{N1} is found in the definition of“amino” provided herein.

[1008] The term “carbamoylalkyl,” as used herein, represents an alkyl group, as defined herein, substituted by a carbamoyl group, as defined herein. The alkyl group can be further substituted with 1, 2, 3, or 4 substituent groups as described herein.

[1009] The term “carbaryl,” as used herein, refers to a carbamate group having the structure —NR^{N1}C(═O)OR or —OC(═O)N(R^{N1})₂, where the meaning of each R^{N1} is found in the definition of “amino” provided herein, and R is alkyl, cycloalkyl, alkcycloalkyl, aryl, alkaryl, heterocyclyl (e.g., heteroaryl), or alkheterocyclyl (e.g., alkheteroaryl), as defined herein.

[1010] The term “carbonyl,” as used herein, represents a C(O) group, which can also be represented as C═O.

[1011] The term “carboxyaldehyde” represents an acyl group having the structure —CHO.

[1012] The term “carboxy,” as used herein, means —CO₂H.

[1013] The term “carboxyalkoxy,” as used herein, represents an alkoxy group, as defined herein, substituted by a carboxy group, as defined herein. The alkoxy group can be further substituted with 1, 2, 3, or 4 substituent groups as described herein for the alkyl group.

[1014] The term “carboxyalkyl,” as used herein, represents an alkyl group, as defined herein, substituted by a carboxy group, as defined herein. The alkyl group can be further substituted with 1, 2, 3, or 4 substituent groups as described herein.

[1015] The term “cyano,” as used herein, represents an —CN group.

[1016] The term “cycloalkoxy” represents a chemical substituent of formula —OR, where R is a C₃₋₈ cycloalkyl group, as defined herein, unless otherwise specified. The cycloalkyl group can be further substituted with 1, 2, 3, or 4 substituent groups as described herein. Exemplary unsubstituted cycloalkoxy groups are from 3 to 8 carbons. In some embodiment, the cycloalkyl group can be further substituted with 1, 2, 3, or 4 substituent groups as described herein.

[1017] The term “cycloalkyl,” as used herein represents a monovalent saturated or unsaturated non-aromatic cyclic hydrocarbon group from three to eight carbons, unless otherwise specified, and is exemplified by cyclopropyl, cyclobutyl, cyclopentyl, cyclohexyl, cycloheptyl, bicyclo[2.2.1.]heptyl, and the like. When the cycloalkyl group includes one carbon-carbon double bond, the cycloalkyl group can be referred to as a “cycloalkenyl” group. Exemplary cycloalkenyl groups include cyclopentenyl, cyclohexenyl, and the like. The cycloalkyl groups of this invention can be optionally substituted with: (1) C₁₋₇ acyl (e.g., carboxyaldehyde); (2) C₁₋₂₀ alkyl (e.g., C₁₋₆ alkyl, C₁₋₆ alkoxy-C₁₋₆ alkyl, C₁₋₆ alkylsulfinyl-C₁₋₆ alkyl, amino-C₁₋₆ alkyl, azido-C₁₋₆ alkyl, (carboxyaldehyde)-C₁₋₆ alkyl, halo-C₁₋₆ alkyl (e.g., perfluoroalkyl), hydroxy-C₁₋₆ alkyl, nitro-C₁₋₆ alkyl, or C₁₋₆ thioalkoxy-C₁₋₆ alkyl); (3) C₁₋₂₀ alkoxy (e.g., C₁₋₆ alkoxy, such as perfluoroalkoxy); (4) C₁₋₆ alkylsulfinyl; (5) C₆₋₁₀ aryl; (6) amino; (7) C₁₋₆ alk-C₆₋₁₀ aryl; (8) azido; (9) C₃₋₈ cycloalkyl; (10) C₁₋₆ alk-C₃₋₈ cycloalkyl; (11) halo; (12) C₁₋₁₂ heterocyclyl (e.g., C₁₋₁₂ heteroaryl); (13) (C₁₋₁₂ heterocyclyl)oxy; (14) hydroxy; (15) nitro; (16) C₁₋₂₀ thioalkoxy (e.g., C₁₋₆ thioalkoxy); (17) —(CH₂)_{q}CO₂R^{A′}, where q is an integer from zero to four, and RA) is selected from the group consisting of (a) C₁₋₆ alkyl, (b) C₆₋₁₀ aryl, (c) hydrogen, and (d) C₁₋₆ alk-C₆₋₁₀ aryl; (18) —(CH₂) CONR^{B′}R^{C′}, where q is an integer from zero to four and where R^{B′} and R^{C′} are independently selected from the group consisting of (a) hydrogen, (b) C₆₋₁₀ alkyl, (c) C₆₋₁₀ aryl, and (d) C₁₋₆ alk-C₆₋₁₀ aryl; (19) —(CH₂)_{q}SO₂R^{D′}, where q is an integer from zero to four and where R^{D′} is selected from the group consisting of (a) C₆₋₁₀ alkyl, (b) C₆₋₁₀ aryl, and (c) C₁₋₆ alk-C₆₋₁₀ aryl; (20) —(CH₂)_{q}SO₂NR^{E′}R^{F′}, where q is an integer from zero to four and where each of R^{E′} and R^{F′} is, independently, selected from the group consisting of (a) hydrogen, (b) C₆₋₁₀ alkyl, (c) C₆₋₁₀ aryl, and (d) C₁₋₆ alk-C₆₋₁₀ aryl; (21) thiol; (22) C₆₋₁₀ aryloxy; (23) C₃₋₈ cycloalkoxy; (24) C₆₋₁₀ aryl-C₁₋₆ alkoxy; (25) C₁₋₆ alk-C₁₋₁₂ heterocyclyl (e.g., C₁₋₆ alk-C₁₋₁₂ heteroaryl); (26) oxo; (27) C₂₋₂₀ alkenyl; and (28) C₂₋₂₀ alkynyl. In some embodiments, each of these groups can be further substituted as described herein. For example, the alkylene group of a C₁-alkaryl or a C₁-alkheterocyclyl can be further substituted with an oxo group to afford the respective aryloyl and (heterocyclyl)oyl substituent group.

[1018] The term “diastereomer,” as used herein means stereoisomers that are not mirror images of one another and are non-superimposable on one another.

[1019] The term “effective amount” of an agent, as used herein, is that amount sufficient to effect beneficial or desired results, for example, clinical results, and, as such, an “effective amount” depends upon the context in which it is being applied. For example, in the context of administering an agent that treats cancer, an effective amount of an agent is, for example, an amount sufficient to achieve treatment, as defined herein, of cancer, as compared to the response obtained without administration of the agent.

[1020] The term “enantiomer,” as used herein, means each individual optically active form of a compound of the invention, having an optical purity or enantiomeric excess (as determined by methods standard in the art) of at least 80% (i.e., at least 90% of one enantiomer and at most 10% of the other enantiomer), preferably at least 90% and more preferably at least 98%.

[1021] The term “halo,” as used herein, represents a halogen selected from bromine, chlorine, iodine, or fluorine.

[1022] The term “haloalkoxy,” as used herein, represents an alkoxy group, as defined herein, substituted by a halogen group (i.e., F, Cl, Br, or I). A haloalkoxy may be substituted with one, two, three, or, in the case of alkyl groups of two carbons or more, four halogens. Haloalkoxy groups include perfluoroalkoxys (e.g., —OCF₃), —OCHF₂, —OCH₂F, —OCCl₃, —OCH₂CH₂Br, —OCH₂CH(CH₂CH₂Br)CH₃, and —OCHICH₃. In some embodiments, the haloalkoxy group can be further substituted with 1, 2, 3, or 4 substituent groups as described herein for alkyl groups.

[1023] The term “haloalkyl,” as used herein, represents an alkyl group, as defined herein, substituted by a halogen group (i.e., F, Cl, Br, or T). A haloalkyl may be substituted with one, two, three, or, in the case of alkyl groups of two carbons or more, four halogens. Haloalkyl groups include perfluoroalkyls (e.g., —CF₃), —CHF₂, —CH₂F, —CCl₃, —CH₂CH₂Br, —CH₂CH(CH₂CH₂Br)CH₃, and —CHICH₃. In some embodiments, the haloalkyl group can be further substituted with 1, 2, 3, or 4 substituent groups as described herein for alkyl groups.

[1024] The term “heteroalkylene,” as used herein, refers to an alkylene group, as defined herein, in which one or two of the constituent carbon atoms have each been replaced by nitrogen, oxygen, or sulfur. In some embodiments, the heteroalkylene group can be further substituted with 1, 2, 3, or 4 substituent groups as described herein for alkylene groups.

[1025] The term “heteroaryl,” as used herein, represents that subset of heterocyclyls, as defined herein, which are aromatic: i.e., they contain 4n+2 pi electrons within the mono- or multicyclic ring system. Exemplary unsubstituted heteroaryl groups are of 1 to 12 (e.g., 1 to 11, 1 to 10, 1 to 9, 2 to 12, 2 to 11, 2 to 10, or 2 to 9) carbons. In some embodiment, the heteroaryl is substituted with 1, 2, 3, or 4 substituents groups as defined for a heterocyclyl group.

[1026] The term “heterocyclyl,” as used herein represents a 5-, 6- or 7-membered ring, unless otherwise specified, containing one, two, three, or four heteroatoms independently selected from the group consisting of nitrogen, oxygen, and sulfur. The 5-membered ring has zero to two double bonds, and the 6- and 7-membered rings have zero to three double bonds. Exemplary unsubstituted heterocyclyl groups are of 1 to 12 (e.g., 1 to 11, 1 to 10, 1 to 9, 2 to 12, 2 to 11, 2 to 10, or 2 to 9) carbons. The term “heterocyclyl” also represents a heterocyclic compound having a bridged multicyclic structure in which one or more carbons and/or heteroatoms bridges two non-adjacent members of a monocyclic ring, e.g., a quinuclidinyl group. The term “heterocyclyl” includes bicyclic, tricyclic, and tetracyclic groups in which any of the above heterocyclic rings is fused to one, two, or three carbocyclic rings, e.g., an aryl ring, a cyclohexane ring, a cyclohexene ring, a cyclopentane ring, a cyclopentene ring, or another monocyclic heterocyclic ring, such as indolyl, quinolyl, isoquinolyl, tetrahydroquinolyl, benzofuryl, benzothienyl and the like. Examples of fused heterocyclyls include tropanes and 1,2,3,5,8,8a-hexahydroindolizine. Heterocyclics include pyrrolyl, pyrrolinyl, pyrrolidinyl, pyrazolyl, pyrazolinyl, pyrazolidinyl, imnidazolyl, imidazolinyl, imidazolidinyl, pyridyl, piperidinyl, homopiperidinyl, pyrazinyl, piperazinyl, pyrimidinyl, pyridazinyl, oxazolyl, oxazolidinyl, isoxazolyl, isoxazolidiniyl, morpholinyl, thiomorpholinyl, thiazolyl, thiazolidinyl, isothiazolyl, isothiazolidinyl, indolyl, indazolyl, quinolyl, isoquinolyl, quinoxalinyl, dihydroquinoxalinyl, quinazolinyl, cinnolinyl, phthalazinyl, benzimidazolyl, benzothiazolyl, benzoxazolyl, benzothiadiazolyl, furyl, thienyl, thiazolidinyl, isothiazolyl, triazolyl, tetrazolyl, oxadiazolyl (e.g., 1,2,3-oxadiazolyl), purinyl, thiadiazolyl (e.g., 1,2,3-thiadiazolyl), tetrahydrofuranyl, dihydrofuranyl, tetrahydrothienyl, dihydrothienyl, dihydroindolyl, dihydroquinolyl, tetrahydroquinolyl, tetrahydroisoquinolyl, dihydroisoquinolyl, pyranyl, dihydropyranyl, dithiazolyl, benzofuranyl, isobenzofuranyl, benzothienyl, and the like, including dihydro and tetrahydro forms thereof, where one or more double bonds are reduced and replaced with hydrogens. Still other exemplary heterocyclyls include: 2,3,4,5-tetrahydro-2-oxo-oxazolyl; 2,3-dihydro-2-oxo-1H-imidazolyl; 2,3,4,5-tetrahydro-5-oxo-1H-pyrazolyl (e.g. 2,3,4,5-tetrahydro-2-phenyl-5-oxo-1H-pyrazolyl); 2,3,4,5-tetrahydro-2,4-dioxo-1H-imidazolyl (e.g., 2,3,4,5-tetrabydro-2,4-dioxo-5-methyl-5-phenyl-1H-imidazolyl); 2,3-dihydro-2-thioxo-1,3,4-oxadiazolyl (e.g., 2,3-dihydro-2-thioxo-5-phenyl-1,3,4-oxadiazolyl); 4,5-dihydro-5-oxo-1-triazolyl (e.g., 4,5-dihydro-3-methyl-4-amino 5-oxo-1H-triazolyl); 1,2,3,4-tetrahydro-2,4-dioxopyridinyl (e.g., 1,2,3,4-tetrahydro-2,4-dioxo-3,3-diethylpyridinyl); 2,6-dioxo-piperidinyl (e.g., 2,6-dioxo-3-ethyl-3-phenylpiperidinyl); 1,6-dihydro-6-oxopyridiminyl; 1,6-dihydro-4-oxopyrimidinyl (e.g., 2-(methylthio)-1,6-dihydro-4-oxo-5-methylpyrimidin-1-yl); 1,2,3,4-tetrahydro-2,4-dioxopyrimidinyl (e.g. 1,2,3,4-tetrahydro-2,4-dioxo-3-ethylpyrimidinyl); 1,6-dihydro-6-oxo-pyridazinyl (e.g., 1,6-dihydro-6-oxo-3-ethylpyridazinyl); 1,6-dihydro-6-oxo-1,2,4-triazinyl (e.g., 1,6-dihydro-5-isopropyl-6-oxo-1,2,4-triazinyl); 2,3-dihydro-2-oxo-1H-indolyl (e.g., 3,3-dimethyl-2,3-dihydro-2-oxo-1H-indolyl and 2,3-dihydro-2-oxo-3,3′-spiropropane-1H-indol-1-yl); 1,3-dihydro-1-oxo-2-iso-indolyl; 1,3-dihydro-1,3-dioxo-2H-iso-indolyl; 1H-benzopyrazolyl (e.g., 1-(ethoxycarbonyl)-1H-benzopyrazolyl); 2,3-dihydro-2-oxo-1H-benzimidazolyl (e.g., 3-ethyl-2,3-dihydro-2-oxo-1H-benzimidazolyl); 2,3-dihydro-2-oxo-benzoxazolyl (e.g., 5-chloro-2,3-dihydro-2-oxo-benzoxazolyl); 2,3-dihydro-2-oxo-benzoxazolyl; 2-oxo-2H-benzopyranyl; 1,4-benzodioxanyl; 1,3-benzodioxanyl; 2,3-dihydro-3-oxo,4H-1,3-benzothiazinyl; 3,4-dihydro-4-oxo-31H-quinazolinyl (e.g., 2-methyl-3,4-dihydro-4-oxo-3H-quinazolinyl); 1,2,3,4-tetrahydro-2,4-dioxo-3H-quinazolyl (e.g., 1-ethyl-1,2,3,4-tetrahydro-2,4-dioxo-3H-quinazolyl); 1,2,3,6-tetrahydro-2,6-dioxo-7H-purinyl (e.g., 1,2,3,6-tetrahydro-1,3-dimethyl-2,6-dioxo-7H-purinyl); 1,2,3,6-tetrahydro-2,6-dioxo-1H-purinyl (e.g., 1,2,3,6-tetrahydro-3,7-dimethyl-2,6-dioxo-1H-purinyl); 2-oxobenz[c,d]indolyl; 1,1-dioxo-2H-naphth[1,8-c,d]isothiazolyl; and 1,8-naphthylenedicarboxamido. Additional heterocyclics include 3,3a,4,5,6,6a-hexahydro-pyrrolo[3,4-b]pyrrol-(2H)-yl, and 2,5-diazabicyclo[2.2.1]heptan-2-yl, homopiperazinyl (or diazepanyl), tetrahydropyranyl, dithiazolyl, benzofuranyl, benzothienyl, oxepanyl, thiepanyl, azocanyl, oxecanyl, and thiocanyl. Heterocyclic groups also include groups of the formula

[chemical structure]

where

[1027] E′ is selected from the group consisting of —N— and —CH—; F′ is selected from the group consisting of —N═CH—, —NH—CH₂—, —NH—C(O)—, —NH—, —CH═N—, —CH₂—NH—, —C(O)—NH—, —CH═CH—, —CH₂—, —CH₂CH₂—, —CH₂O—, —OCH₂—, —O—, and —S—; and G′ is selected from the group consisting of —CH— and —N—. Any of the heterocyclyl groups mentioned herein may be optionally substituted with one, two, three, four or five substituents independently selected from the group consisting of: (1) C₁₋₇ acyl (e.g., carboxyaldehyde); (2) C₁₋₂₀ alkyl (e.g., C₁₋₆ alkyl, C₁₋₆ alkoxy-C₁₋₆ alkyl, C₁₋₆ alkylsulfinyl-C₁₋₆ alkyl, amino-C₁₋₆ alkyl, azido-C₁₋₆ alkyl, (carboxyaldehyde)-C₁₋₆ alkyl, halo-C₁₋₆ alkyl (e.g., perfluoroalkyl), hydroxy-C₁₋₆ alkyl, nitro-C₁₋₆ alkyl, or C₁₋₆ thioalkoxy-C₁₋₆ alkyl); (3) C₁₋₂₀ alkoxy (e.g., C₁₋₆ alkoxy, such as perfluoroalkoxy); (4) C₁₋₆ alkylsulfinyl; (5) C₆₋₁₀ aryl; (6) amino; (7) C₁₋₆ alk-C₆₋₁₀ aryl; (8) azido; (9) C₃₋₈ cycloalkyl; (10) C₁₋₆ alk-C₃₋₈ cycloalkyl; (11) halo; (12) C₁₋₁₂ heterocyclyl (e.g., C₂₋₁₂ heteroaryl); (13) (C₁₋₁₂ heterocyclyl)oxy; (14) hydroxy; (15) nitro; (16) C₁₋₂₀ thioalkoxy (e.g., C₁₋₆ thioalkoxy); (17) —(CH₂)_{q}CO₂R, where q is an integer from zero to four, and RA is selected from the group consisting of (a) C₁₋₆ alkyl, (b) C₆₋₁₀ aryl, (c) hydrogen, and (d) C₁₋₆ alk-C₆₋₁₀ aryl; (18) —(CH₂)_{q}CONR^{B′}R^{C′}, where q is an integer from zero to four and where R^{B′} and R^{C′} are independently selected from the group consisting of (a) hydrogen, (b) C₁₋₆ alkyl, (c) C₆₋₁₀ aryl, and (d) C₁₋₆ alk-C₆₋₁₀ aryl; (19) —(CH₂)_{q}SO₂R^{D′}, where q is an integer from zero to four and where R^{D′} is selected from the group consisting of (a) C₁₋₆ alkyl, (b) C₆₋₁₀ aryl, and (c) C₁₋₆ alk-C₆₋₁₀ aryl; (20) —(CH₂)_{q}SO₂NR^{E′}R^{F′}, where q is an integer from zero to four and where each of R^{E′} and R^{F′} is, independently, selected from the group consisting of (a) hydrogen, (b) C₁₋₆ alkyl, (c) C₆₋₁₀ aryl, and (d) C₁₋₆ alk-C₆₋₁₀ aryl; (21) thiol; (22) C₆₋₁₀ aryloxy; (23) C₃₋₈ cycloalkoxy; (24) arylalkoxy; (25) C₁₋₆ alk-C₁₋₁₂ heterocyclyl (e.g., C₁₋₆ alk-C₁₋₁₂ heteroaryl); (26) oxo; (27) (C₁₋₁₂ heterocyclyl)imino; (28) C₂₋₂₀ alkenyl; and (29) C₂₋₂₀ alkynyl. In some embodiments, each of these groups can be further substituted as described herein. For example, the alkylene group of a C₁-alkaryl or a C₁-alkheterocyclyl can be further substituted with an oxo group to afford the respective aryloyl and (heterocyclyl)oyl substituent group.

[1028] The term “(heterocyclyl)imino,” as used herein, represents a heterocyclyl group, as defined herein, attached to the parent molecular group through an imino group. In some embodiments, the heterocyclyl group can be substituted with 1, 2, 3, or 4 substituent groups as defined herein.

[1029] The term “(heterocyclyl)oxy,” as used herein, represents a heterocyclyl group, as defined herein, attached to the parent molecular group through an oxygen atom. In some embodiments, the heterocyclyl group can be substituted with 1, 2, 3, or 4 substituent groups as defined herein.

[1030] The term “(heterocyclyl)oyl,” as used herein, represents a heterocyclyl group, as defined herein, attached to the parent molecular group through a carbonyl group. In some embodiments, the heterocyclyl group can be substituted with 1, 2, 3, or 4 substituent groups as defined herein.

[1031] The term “hydrocarbon,” as used herein, represents a group consisting only of carbon and hydrogen atoms.

[1032] The term “hydroxy,” as used herein, represents an —OH group.

[1033] The term “hydroxyalkenyl,” as used herein, represents an alkenyl group, as defined herein, substituted by one to three hydroxy groups, with the proviso that no more than one hydroxy group may be attached to a single carbon atom of the alkyl group, and is exemplified by dihydroxypropenyl, hydroxyisopentenyl, and the like.

[1034] The term “hydroxyalkyl,” as used herein, represents an alkyl group, as defined herein, substituted by one to three hydroxy groups, with the proviso that no more than one hydroxy group may be attached to a single carbon atom of the alkyl group, and is exemplified by hydroxymethyl, dihydroxypropyl, and the like.

[1035] The term “isomer,” as used herein, means any tautomer, stereoisomer, enantiomer, or diastereomer of any compound of the invention. It is recognized that the compounds of the invention can have one or more chiral centers and/or double bonds and, therefore, exist as stereoisomers, such as double-bond isomers (i.e., geometric E/Z isomers) or diastereomers (e.g., enantiomers (i.e., (+) or (−)) or cis/trans isomers). According to the invention, the chemical structures depicted herein, and therefore the compounds of the invention, encompass all of the corresponding stereoisomers, that is, both the stereomerically pure form (e.g., geometrically pure, enantiomerically pure, or diastereomerically pure) and enantiomeric and stereoisomeric mixtures, e.g., racemates. Enantiomeric and stereoisomeric mixtures of compounds of the invention can typically be resolved into their component enantiomers or stereoisomers by well-known methods, such as chiral-phase gas chromatography, chiral-phase high performance liquid chromatography, crystallizing the compound as a chiral salt complex, or crystallizing the compound in a chiral solvent. Enantiomers and stereoisomers can also be obtained from stereomerically or enantiomerically pure intermediates, reagents, and catalysts by well-known asymmetric synthetic methods.

[1036] The term “N-protected amino,” as used herein, refers to an amino group, as defined herein, to which is attached one or two N-protecting groups, as defined herein.

[1037] The term “N-protecting group,” as used herein, represents those groups intended to protect an amino group against undesirable reactions during synthetic procedures. Commonly used N-protecting groups are disclosed in Greene, “Protective Groups in Organic Synthesis,” 3^{rd} Edition (John Wiley & Sons, New York, 1999), which is incorporated herein by reference. N-protecting groups include acyl, aryloyl, or carbamyl groups such as formyl, acetyl, propionyl, pivaloyl, t-butylacetyl, 2-chloroacetyl, 2-bromoacetyl, trifluoroacetyl, trichloroacetyl, phthalyl, o-nitrophenoxyacetyl, α-chlorobutyryl, benzoyl, 4-chlorobenzoyl, 4-bromobenzoyl, 4-nitrobenzoyl, and chiral auxiliaries such as protected or unprotected D, L or D, L-amino acids such as alanine, leucine, phenylalanine, and the like; sulfonyl-containing groups such as benzenesulfonyl, p-toluenesulfonyl, and the like; carbamate forming groups such as benzyloxycarbonyl, p-chlorobenzyloxycarbonyl, p-methoxybenzyloxycarbonyl, p-nitrobenzyloxycarbonyl, 2-nitrobenzyloxycarbonyl, p-bromobenzyloxycarbonyl, 3,4-dimethoxybenzyloxycarbonyl, 3,5-dimethoxybenzyloxycarbonyl, 2,4-dimethoxybenzyloxycarbonyl, 4-methoxybenzyloxycarbonyl, 2-nitro-4,5-dimethoxybenzyloxycarbonyl, 3,4,5-trimethoxybenzyloxycarbonyl, 1-(p-biphenylyl)-1-methylethoxycarbonyl, α,α-dimethyl-3,5-dimethoxybenzyloxycarbonyl, benzhydryloxy carbonyl, t-butyloxycarbonyl, diisopropyl methoxycarbonyl, isopropyloxycarbonyl, ethoxycarbonyl, methoxycarbonyl, allyloxycarbonyl, 2,2,2,-trichloroethoxycarbonyl, phenoxycarbonyl, 4-nitrophenoxy carbonyl, fluorenyl-9-methoxycarbonyl, cyclopentyloxycarbonyl, adamantyloxycarbonyl, cyclohexyloxycarbonyl, phenylthiocarbonyl, and the like, alkaryl groups such as benzyl, triphenylmethyl, benzyloxymethyl, and the like and silyl groups, such as trimethylsilyl, and the like. Preferred N-protecting groups are formyl, acetyl, benzoyl, pivaloyl, t-butylacetyl, alanyl, phenylsulfonyl, benzyl, t-butyloxycarbonyl (Boc), and benzyloxycarbonyl (Cbz).

[1038] The term “nitro,” as used herein, represents an —NO₂ group.

[1039] The term “oxo” as used herein, represents ═O.

[1040] The term “perfluoroalkyl,” as used herein, represents an alkyl group, as defined herein, where each hydrogen radical bound to the alkyl group has been replaced by a fluoride radical. Perfluoroalkyl groups are exemplified by trifluoromethyl, pentafluoroethyl, and the like.

[1041] The term “perfluoroalkoxy,” as used herein, represents an alkoxy group, as defined herein, where each hydrogen radical bound to the alkoxy group has been replaced by a fluoride radical. Perfluoroalkoxy groups are exemplified by trifluoromethoxy, pentafluoroethoxy, and the like.

[1042] The term “spirocyclyl,” as used herein, represents a C₂₋₇ alkylene diradical, both ends of which are bonded to the same carbon atom of the parent group to form a spirocyclic group, and also a C₁₋₆ heteroalkylene diradical, both ends of which are bonded to the same atom. The heteroalkylene radical forming the spirocyclyl group can containing one, two, three, or four heteroatoms independently selected from the group consisting of nitrogen, oxygen, and sulfur. In some embodiments, the spirocyclyl group includes one to seven carbons, excluding the carbon atom to which the diradical is attached. The spirocyclyl groups of the invention may be optionally substituted with 1, 2, 3, or 4 substituents provided herein as optional substituents for cycloalkyl and/or heterocyclyl groups.

[1043] The term “stereoisomer,” as used herein, refers to all possible different isomeric as well as conformational forms which a compound may possess (e.g., a compound of any formula described herein), in particular all possible stereochemically and conformationally isomeric forms, all diastereomers, enantiomers and/or conformers of the basic molecular structure. Some compounds of the present invention may exist in different tautomeric forms, all of the latter being included within the scope of the present invention.

[1044] The term “sulfoalkyl,” as used herein, represents an alkyl group, as defined herein, substituted by a sulfo group of —SO₃H. In some embodiments, the alkyl group can be further substituted with 1, 2, 3, or 4 substituent groups as described herein.

[1045] The term “sulfonyl,” as used herein, represents an —S(O)₂— group.

[1046] The term “thioalkaryl,” as used herein, represents a chemical substituent of formula —SR, where R is an alkaryl group. In some embodiments, the alkaryl group can be further substituted with 1, 2, 3, or 4 substituent groups as described herein.

[1047] The term “thioalkheterocyclyl,” as used herein, represents a chemical substituent of formula —SR, where R is an alkheterocyclyl group. In some embodiments, the alkheterocyclyl group can be further substituted with 1, 2, 3, or 4 substituent groups as described herein.

[1048] The term “thioalkoxy,” as used herein, represents a chemical substituent of formula —SR, where R is an alkyl group, as defined herein. In some embodiments, the alkyl group can be further substituted with 1, 2, 3, or 4 substituent groups as described herein.

[1049] The term “thiol” represents an —SH group.

[1050] Compound: As used herein, the term “compound,” is meant to include all stereoisomers, geometric isomers, tautomers, and isotopes of the structures depicted.

[1051] The compounds described herein can be asymmetric (e.g., having one or more stereocenters). All stereoisomers, such as enantiomers and diastereomers, are intended unless otherwise indicated. Compounds of the present disclosure that contain asymmetrically substituted carbon atoms can be isolated in optically active or racemic forms. Methods on how to prepare optically active forms from optically active starting materials are known in the art, such as by resolution of racemic mixtures or by stereoselective synthesis. Many geometric isomers of olefins, (C═N double bonds, and the like can also be present in the compounds described herein, and all such stable isomers are contemplated in the present disclosure. Cis and trans geometric isomers of the compounds of the present disclosure are described and may be isolated as a mixture of isomers or as separated isomeric forms.

[1052] Compounds of the present disclosure also include tautomeric forms. Tautomeric forms result from the swapping of a single bond with an adjacent double bond and the concomitant migration of a proton. Tautomeric forms include prototropic tautomers which are isomeric protonation states having the same empirical formula and total charge. Examples prototropic tautomers include ketone—enol pairs, amide—imidic acid pairs, lactam—lactim pairs, amide—imidic acid pairs, enamnine—imine pairs, and annular forms where a proton can occupy two or more positions of a heterocyclic system, such as, 1H- and 3H-imidazole, 1H-, 2H- and 4H-1,2,4-triazole, 1H- and 2H-isoindole, and 1H- and 2H-pyrazole, Tautomeric forms can be in equilibrium or sterically locked into one form by appropriate substitution.

[1053] Compounds of the present disclosure also include all of the isotopes of the atoms occurring in the intermediate or final compounds. “Isotopes” refers to atoms having the same atomic number but different mass numbers resulting from a different number of neutrons in the nuclei. For example, isotopes of hydrogen include tritium and deuterium.

[1054] The compounds and salts of the present disclosure can be prepared in combination with solvent or water molecules to form solvates and hydrates by routine methods.

[1055] Conserved: As used herein, the term “conserved” refers to nucleotides or amino acid residues of a polynucleotide sequence or polypeptide sequence, respectively, that are those that occur unaltered in the same position of two or more sequences being compared. Nucleotides or amino acids that are relatively conserved are those that are conserved amongst more related sequences than nucleotides or amino acids appearing elsewhere in the sequences.

[1056] In some embodiments, two or more sequences are said to be “completely conserved” if they are 100% identical to one another. In some embodiments, two or more sequences are said to be “highly conserved” if they are at least 70% identical, at least 80% identical, at least 90% identical, or at least 95% identical to one another. In some embodiments, two or more sequences are said to be “highly conserved” if they are about 70% identical, about 80% identical, about 90% identical, about 95%, about 98%, or about 99% identical to one another. In some embodiments, two or more sequences are said to be “conserved” if they are at least 30% identical, at least 40% identical, at least 50% identical, at least 60% identical, at least 70% identical, at least 80% identical, at least 90% identical, or at least 95% identical to one another. In some embodiments, two or more sequences are said to be “conserved” if they are about 30% identical, about 40% identical, about 50% identical, about 60% identical, about 70% identical, about 80% identical, about 90% identical, about 95% identical, about 98% identical, or about 99% identical to one another. Conservation of sequence may apply to the entire length of an oligonucleotide or polypeptide or may apply to a portion, region or feature thereof.

[1057] Controlled Release: As used herein, the term “controlled release” refers to a pharmaceutical composition or compound release profile that conforms to a particular pattern of release to effect a therapeutic outcome.

[1058] Cyclic or Cyclized: As used herein, the term “cyclic” refers to the presence of a continuous loop. Cyclic molecules need not be circular, only joined to form an unbroken chain of subunits. Cyclic molecules such as the engineered RNA or mRNA of the present invention may be single units or multimers or comprise one or more components of a complex or higher order structure.

[1059] Cytostatic: As used herein, “cytostatic” refers to inhibiting, reducing, suppressing the growth, division, or multiplication of a cell (e.g., a mammalian cell (e.g., a human cell)), bacterium, virus, fungus, protozoan, parasite, prion, or a combination thereof.

[1060] Cytotoxic: As used herein, “cytotoxic” refers to killing or causing injurious, toxic, or deadly effect on a cell (e.g., a mammalian cell (e.g., a human cell)), bacterium, virus, fungus, protozoan, parasite, prion, or a combination thereof.

[1061] Delivery: As used herein, “delivery” refers to the act or manner of delivering a compound, substance, entity, moiety, cargo or payload.

[1062] Delivery Agent: As used herein, “delivery agent” refers to any substance which facilitates, at least in part, the in vivo delivery of a polynucleotide, primary construct or mmRNA to targeted cells.

[1063] Destabilized: As used herein, the term “destable,” “destabilize,” or “destabilizing region” means a region or molecule that is less stable than a starting, wild-type or native form of the same region or molecule.

[1064] Detectable label: As used herein, “detectable label” refers to one or more markers, signals, or moieties which are attached, incorporated or associated with another entity that is readily detected by methods known in the art including radiography, fluorescence, chemiluminescence, enzymatic activity, absorbance and the like. Detectable labels include radioisotopes, fluorophores, chromophores, enzymes, dyes, metal ions, ligands such as biotin, avidin, streptavidin and haptens, quantum dots, and the like. Detectable labels may be located at any position in the peptides or proteins disclosed herein. They may be within the amino acids, the peptides, or proteins, or located at the N- or C-termini.

[1065] Digest: As used herein, the term “digest” means to break apart into smaller pieces or components. When referring to polypeptides or proteins, digestion results in the production of peptides.

[1066] Distal: As used herein, the term “distal” means situated away from the center or away from a point or region of interest.

[1067] Dosing regimen: As used herein, a “dosing regimen” is a schedule of administration or physician determined regimen of treatment, prophylaxis, or palliative care.

[1068] Dose splitting factor (DSF)-ratio of PUD of dose split treatment divided by PUD of total daily dose or single unit dose. The value is derived from comparison of dosing regimens groups.

[1069] Encapsulate: As used herein, the term “encapsulate” means to enclose, surround or encase.

[1070] Encoded protein cleavage signal: As used herein, “encoded protein cleavage signal” refers to the nucleotide sequence which encodes a protein cleavage signal.

[1071] Engineered: As used herein, embodiments of the invention are “engineered” when they are designed to have a feature or property, whether structural or chemical, that varies from a starting point, wild type or native molecule.

[1072] Exosome: As used herein, “exosome” is a vesicle secreted by mammalian cells or a complex involved in RNA degradation.

[1073] Expression: As used herein, “expression” of a nucleic acid sequence refers to one or more of the following events: (1) production of an RNA template from a DNA sequence (e.g., by transcription); (2) processing of an RNA transcript (e.g., by splicing, editing, 5′ cap formation, and/or 3′ end processing); (3) translation of an RNA into a polypeptide or protein; and (4) post-translational modification of a polypeptide or protein.

[1074] Feature: As used herein, a “feature” refers to a characteristic, a property, or a distinctive element.

[1075] Formulation: As used herein, a “formulation” includes at least a polynucleotide, primary construct or mmRNA and a delivery agent.

[1076] Fragment: A “fragment,” as used herein, refers to a portion. For example, fragments of proteins may comprise polypeptides obtained by digesting full-length protein isolated from cultured cells.

[1077] Functional: As used herein, a “functional” biological molecule is a biological molecule in a form in which it exhibits a property and/or activity by which it is characterized.

[1078] Homology: As used herein, the term “homology” refers to the overall relatedness between polymeric molecules, e.g. between nucleic acid molecules (e.g. DNA molecules and/or RNA molecules) and/or between polypeptide molecules. In some embodiments, polymeric molecules are considered to be “homologous” to one another if their sequences are at least 25%, 30%, 35%, 40%, 45%, 50%, 55%, 60%, 65%, 70%, 75%, 80%, 85%, 90%, 95%, or 99% identical or similar. The term “homologous” necessarily refers to a comparison between at least two sequences (polynucleotide or polypeptide sequences). In accordance with the invention, two polynucleotide sequences are considered to be homologous if the polypeptides they encode are at least about 50%, 60%, 70%, 80%, 90%, 95%, or even 99% for at least one stretch of at least about 20 amino acids. In some embodiments, homologous polynucleotide sequences are characterized by the ability to encode a stretch of at least 4-5 uniquely specified amino acids. For polynucleotide sequences less than 60 nucleotides in length, homology is determined by the ability to encode a stretch of at least 4-5 uniquely specified amino acids. In accordance with the invention, two protein sequences are considered to be homologous if the proteins are at least about 50%, 60%, 70%, 80%, or 90% identical for at least one stretch of at least about 20 amino acids.

[1079] Identity: As used herein, the term “identity” refers to the overall relatedness between polymeric molecules, e.g., between oligonucleotide molecules (e.g. DNA molecules and/or RNA molecules) and/or between polypeptide molecules. Calculation of the percent identity of two polynucleotide sequences, for example, can be performed by aligning the two sequences for optimal comparison purposes (e.g., gaps can be introduced in one or both of a first and a second nucleic acid sequences for optimal alignment and non-identical sequences can be disregarded for comparison purposes). In certain embodiments, the length of a sequence aligned for comparison purposes is at least 30%, at least 40%, at least 50%, at least 60%, at least 70%, at least 80%, at least 90%, at least 95%, or 100% of the length of the reference sequence. The nucleotides at corresponding nucleotide positions are then compared. When a position in the first sequence is occupied by the same nucleotide as the corresponding position in the second sequence, then the molecules are identical at that position. The percent identity between the two sequences is a function of the number of identical positions shared by the sequences, taking into account the number of gaps, and the length of each gap, which needs to be introduced for optimal alignment of the two sequences. The comparison of sequences and determination of percent identity between two sequences can be accomplished using a mathematical algorithm. For example, the percent identity between two nucleotide sequences can be determined using methods such as those described in Computational Molecular Biology, Lesk, A. M, ed., Oxford University Press, New York, 1988; Biocomputing: Informatics and Genome Projects, Smith, D. W., ed., Academic Press, New York, 1993; Sequence Analysis in Molecular Biology, von Heinje, G., Academic Press, 1987; Computer Analysis of Sequence Data, Part I, Griffin, A. M., and Griffin, H. G., eds., Humana Press, New Jersey, 1994; and Sequence Analysis Primer, Gribskov, M. and Devereux, J., eds., M Stockton Press, New York, 1991; each of which is incorporated herein by reference. For example, the percent identity between two nucleotide sequences can be determined using the algorithm of Meyers and Miller (CABIOS, 1989, 4:11-17), which has been incorporated into the ALIGN program (version 2.0) using a PAM120 weight residue table, a gap length penalty of 12 and a gap penalty of 4. The percent identity between two nucleotide sequences can, alternatively, be determined using the GAP program in the GCG software package using an NWSgapdna.CMP matrix. Methods commonly employed to determine percent identity between sequences include, but are not limited to those disclosed in Carillo, H., and Lipman, D., SIAM J Applied Math., 48:1073 (1988); incorporated herein by reference. Techniques for determining identity are codified in publicly available computer programs. Exemplary computer software to determine homology between two sequences include, but are not limited to, GCG program package, Devereux, J., et al., Nucleic Acids Research, 12(1), 387 (1984)), BLASTP, BLASTN, and FASTA Altschul, S. F. et al., J. Molec. Biol., 215, 403 (1990)).

[1080] Inhibit expression of a gene: As used herein, the phrase “inhibit expression of a gene” means to cause a reduction in the amount of an expression product of the gene. The expression product can be an RNA transcribed from the gene (e.g., an mRNA) or a polypeptide translated from an mRNA transcribed from the gene. Typically a reduction in the level of an mRNA results in a reduction in the level of a polypeptide translated therefrom. The level of expression may be determined using standard techniques for measuring mRNA or protein.

[1081] In vitro: As used herein, the term “in vitro” refers to events that occur in an artificial environment, e.g., in a test tube or reaction vessel, in cell culture, in a Petri dish, etc., rather than within an organism (e.g., animal, plant, or microbe).

[1082] In vivo: As used herein, the term “in vivo” refers to events that occur within an organism (e.g., animal, plant, or microbe or cell or tissue thereof).

[1083] Isolated: As used herein, the term “isolated” refers to a substance or entity that has been separated from at least some of the components with which it was associated (whether in nature or in an experimental setting). Isolated substances nay have varying levels of purity in reference to the substances from which they have been associated. Isolated substances and/or entities may be separated from at least about 10%, about 20%, about 30%, about 40%, about 50%, about 60%, about 70%, about 80%, about 90%, or more of the other components with which they were initially associated. In some embodiments, isolated agents are more than about 80%, about 85%, about 90%, about 91%, about 92%, about 93%, about 94%, about 95%, about 96%, about 97%, about 98%, about 99%, or more than about 99% pure. As used herein, a substance is “pure” if it is substantially free of other components. Substantially isolated: By “substantially isolated” is meant that the compound is substantially separated from the environment in which it was formed or detected. Partial separation can include, for example, a composition enriched in the compound of the present disclosure. Substantial separation can include compositions containing at least about 50%, at least about 60%, at least about 70%, at least about 80%, at least about 90%, at least about 95%, at least about 97%, or at least about 99% by weight of the compound of the present disclosure, or salt thereof. Methods for isolating compounds and their salts are routine in the art.

[1084] Linker: As used herein, a linker refers to a group of atoms, e.g., 10-1,000 atoms, and can be comprised of the atoms or groups such as, but not limited to, carbon, amino, alkylamino, oxygen, sulfur, sulfoxide, sulfonyl, carbonyl, and imine. The linker can be attached to a modified nucleoside or nucleotide on the nucleobase or sugar moiety at a first end, and to a payload, e.g., a detectable or therapeutic agent, at a second end. The linker may be of sufficient length as to not interfere with incorporation into a nucleic acid sequence. The linker can be used for any useful purpose, such as to form mmRNA multimers (e.g., through linkage of two or more polynucleotides, primary constructs, or mmRNA molecules) or mmRNA conjugates, as well as to administer a payload, as described herein. Examples of chemical groups that can be incorporated into the linker include, but are not limited to, alkyl, alkenyl, alkynyl, amido, amino, ether, thioether, ester, alkylene, heteroalkylene, aryl, or heterocyclyl, each of which can be optionally substituted, as described herein. Examples of linkers include, but are not limited to, unsaturated alkanes, polyethylene glycols (e.g., ethylene or propylene glycol monomeric units, e.g., diethylene glycol, dipropylene glycol, triethylene glycol, tripropylene glycol, tetraethylene glycol, or tetraethylene glycol), and dextran polymers and derivatives thereof. Other examples include, but are not limited to, cleavable moieties within the linker, such as, for example, a disulfide bond (—S—S—) or an azo bond (—N═N—), which can be cleaved using a reducing agent or photolysis. Non-limiting examples of a selectively cleavable bond include an amido bond can be cleaved for example by the use of tris(2-carboxyethyl)phosphine (TCEP), or other reducing agents, and/or photolysis, as well as an ester bond can be cleaved for example by acidic or basic hydrolysis.

[1085] MicroRNA (miRNA) binding site: As used herein, a microRNA (miRNA) binding site represents a nucleotide location or region of a nucleic acid transcript to which at least the “seed” region of a miRNA binds.

[1086] Modified: As used herein “modified” refers to a changed state or structure of a molecule of the invention. Molecules may be modified in many ways including chemically, structurally, and functionally. In one embodiment, the mRNA molecules of the present invention are modified by the introduction of non-natural nucleosides and/or nucleotides, e.g., as it relates to the natural ribonucleotides A, U, G, and C. Noncanonical nucleotides such as the cap structures are not considered “modified” although they differ from the chemical structure of the A, C, G, U ribonucleotides.

[1087] Mucus: As used herein, “mucus” refers to the natural substance that is viscous and comprises mucin glycoproteins.

[1088] Naturally occurring: As used herein, “naturally occurring” means existing in nature without artificial aid.

[1089] Aon-human vertebrate: As used herein, a “non human vertebrate” includes all vertebrates except Homo sapiens, including wild and domesticated species. Examples of non-human vertebrates include, but are not limited to, mammals, such as alpaca, banteng, bison, camel, cat, cattle, deer, dog, donkey, gayal, goat, guinea pig, horse, llama, mule, pig, rabbit, reindeer, sheep water buffalo, and yak.

[1090] Off-target: As used herein, “off target” refers to any unintended effect on any one or more target, gene, or cellular transcript.

[1091] Open reading frame: As used herein, “open reading frame” or “ORF” refers to a sequence which does not contain a stop codon in a given reading frame.

[1092] Operably linked: As used herein, the phrase “operably linked” refers to a functional connection between two or more molecules, constructs, transcripts, entities, moieties or the like.

[1093] Optionally substituted: Herein a phrase of the form “optionally substituted X” (e.g., optionally substituted alkyl) is intended to be equivalent to “X, wherein X is optionally substituted” (e.g., “alkyl, wherein said alkyl is optionally substituted”). It is not intended to mean that the feature “X” (e.g. alkyl) per se is optional.

[1094] Peptide: As used herein, “peptide” is less than or equal to 50 amino acids long, e.g., about 5, 10, 15, 20, 25, 30, 35, 40, 45, or 50 amino acids long.

[1095] Paratope: As used herein, a “paratope” refers to the antigen-binding site of an antibody.

[1096] Patient: As used herein, “patient” refers to a subject who may seek or be in need of treatment, requires treatment, is receiving treatment, will receive treatment, or a subject who is under care by a trained professional for a particular disease or condition.

[1097] Pharmaceutically acceptable: The phrase “pharmaceutically acceptable” is employed herein to refer to those compounds, materials, compositions, and/or dosage forms which are, within the scope of sound medical judgment, suitable for use in contact with the tissues of human beings and animals without excessive toxicity, irritation, allergic response, or other problem or complication, commensurate with a reasonable benefit/risk ratio.

[1098] Pharmaceutically acceptable excipients: The phrase “pharmaceutically acceptable excipient,” as used herein, refers any ingredient other than the compounds described herein (for example, a vehicle capable of suspending or dissolving the active compound) and having the properties of being substantially nontoxic and non-inflammatory in a patient. Excipients may include, for example: antiadherents, antioxidants, binders, coatings, compression aids, disintegrants, dyes (colors), emollients, emulsifiers, fillers (diluents), film formers or coatings, flavors, fragrances, glidants (flow enhancers), lubricants, preservatives, printing inks, sorbents, suspensing or dispersing agents, sweeteners, and waters of hydration. Exemplary excipients include, but are not limited to: butylated hydroxytoluene (BHT), calcium carbonate, calcium phosphate (dibasic), calcium stearate, croscarmellose, crosslinked poly-vinyl pyrrolidone, citric acid, crospovidone, cysteine, ethylcellulose, gelatin, hydroxypropyl cellulose, hydroxypropyl methylcellulose, lactose, magnesium stearate, maltitol, mannitol, methionine, methylcellulose, methyl paraben, microcrystalline cellulose, polyethylene glycol, polyvinyl pyrrolidone, povidone, pregelatinized starch, propyl paraben, retinyl palmitate, shellac, silicon dioxide, sodium carboxymethyl cellulose, sodium citrate, sodium starch glycolate, sorbitol, starch (corn), stearic acid, sucrose, tale, titanium dioxide, vitamin A, vitamin E, vitamin C, and xylitol.

[1099] Pharmaceutically acceptable salts: The present disclosure also includes pharmaceutically acceptable salts of the compounds described herein. As used herein, “pharmaceutically acceptable salts” refers to derivatives of the disclosed compounds wherein the parent compound is modified by converting an existing acid or base moiety to its salt form (e.g., by reacting the free base group with a suitable organic acid). Examples of pharmaceutically acceptable salts include, but are not limited to, mineral or organic acid salts of basic residues such as amines; alkali or organic salts of acidic residues such as carboxylic acids; and the like. Representative acid addition salts include acetate, adipate, alginate, ascorbate, aspartate, benzenesulfonate, benzoate, bisulfate, borate, butyrate, camphorate, camphorsulfonate, citrate, cyclopentanepropionate, digluconate, dodecylsulfate, ethanesulfonate, fumarate, glucoheptonate, glycerophosphate, hemisulfate, heptonate, hexanoate, hydrobromide, hydrochloride, hydroiodide, 2-hydroxy-ethanesulfonate, lactobionate, lactate, laurate, lauryl sulfate, malate, maleate, malonate, methanesulfonate, 2-naphthalenesulfonate, nicotinate, nitrate, oleate, oxalate, palmitate, pamoate, pectinate, persulfate, 3-phenylpropionate, phosphate, picrate, pivalate, propionate, stearate, succinate, sulfate, tartrate, thiocyanate, toluenesulfonate, undecanoate, valerate salts, and the like. Representative alkali or alkaline earth metal salts include sodium, lithium, potassium, calcium, magnesium, and the like, as well as nontoxic ammonium, quaternary ammonium, and amine cations, including, but not limited to ammonium, tetramethylammonium, tetraethylammonium, methylamine, dimethylamine, trimethylamine, triethylamine, ethylamine, and the like. The pharmaceutically acceptable salts of the present disclosure include the conventional non-toxic salts of the parent compound formed, for example, from non-toxic inorganic or organic acids. The pharmaceutically acceptable salts of the present disclosure can be synthesized from the parent compound which contains a basic or acidic moiety by conventional chemical methods. Generally, such salts can be prepared by reacting the free acid or base forms of these compounds with a stoichiometric amount of the appropriate base or acid in water or in an organic solvent, or in a mixture of the two; generally, nonaqueous media like ether, ethyl acetate, ethanol, isopropanol, or acetonitrile are preferred. Lists of suitable salts are found in Remington s Pharmaceutical Sciences, 17^{th} ed., Mack Publishing Company, Easton, Pa., 1985, p. 1418, Pharmaceutical Salts: Properties, Selection, and Use, P.H. Stahl and (C.G. Wennuth (eds.), Wiley-VCH, 2008, and Berge et al., Journal of Pharmaceutical Science, 66, 1-19 (1977), each of which is incorporated herein by reference in its entirety.

[1100] Pharmaceutically acceptable solvate: The term “pharmaceutically acceptable solvate,” as used herein, means a compound of the invention wherein molecules of a suitable solvent are incorporated in the crystal lattice. A suitable solvent is physiologically tolerable at the dosage administered. For example, solvates may be prepared by crystallization, recrystallization, or precipitation from a solution that includes organic solvents, water, or a mixture thereof. Examples of suitable solvents are ethanol, water (for example, mono-, di-, and tri-hydrates), N-methylpyrrolidinone (NMP), dimethyl sulfoxide (DMSO), N,N′-dimethylformamide (DMF), N,N′-dimethylacetamide (DMAC), 1,3-dlimethyl-2-imidazolidinone (DMEU), 1,3-dimethyl-3,4,5,6-tetrahydro-2-(1H)-pyrimidinone (DMPU), acetonitrile (ACN), propylene glycol, ethyl acetate, benzyl alcohol, 2-pyrrolidone, benzyl benzoate, and the like. When water is the solvent, the solvate is referred to as a “hydrate.”

[1101] Pharmacokinetic: As used herein, “pharmacokinetic” refers to any one or more properties of a molecule or compound as it relates to the determination of the fate of substances administered to a living organism. Pharmacokinetics is divided into several areas including the extent and rate of absorption, distribution, metabolism and excretion. This is commonly referred to as ADME where: (A) Absorption is the process of a substance entering the blood circulation; (D) Distribution is the dispersion or dissemination of substances throughout the fluids and tissues of the body; (M) Metabolism (or Biotransformation) is the irreversible transformation of parent compounds into daughter metabolites; and (E) Excretion (or Elimination) refers to the elimination of the substances from the body. In rare cases, some drugs irreversibly accumulate in body tissue.

[1102] Physicochemical: As used herein, “physicochemical” means of or relating to a physical and/or chemical property.

[1103] Polypeptide per unit drug (PUD): As used herein, a PUD or product per unit drug, is defined as a subdivided portion of total daily dose, usually 1 mg, pg, kg, etc., of a product (such as a polypeptide) as measured in body fluid or tissue, usually defined in concentration such as pmol/mL, mmol/mL, etc divided by the measure in the body fluid.

[1104] Preventing: As used herein, the term “preventing” refers to partially or completely delaying onset of an infection, disease, disorder and/or condition; partially or completely delaying onset of one or more symptoms, features, or clinical manifestations of a particular infection, disease, disorder, and/or condition; partially or completely delaying onset of one or more symptoms, features, or manifestations of a particular infection, disease, disorder, and/or condition; partially or completely delaying progression from an infection, a particular disease, disorder and/or condition; and/or decreasing the risk of developing pathology associated with the infection, the disease, disorder, and/or condition.

[1105] Prodrug: The present disclosure also includes prodrugs of the compounds described herein. As used herein, “prodrugs” refer to any substance, molecule or entity which is in a form predicate for that substance, molecule or entity to act as a therapeutic upon chemical or physical alteration. Prodrugs may by covalently bonded or sequestered in some way and which release or are converted into the active drug moiety prior to, upon or after administered to a mammalian subject. Prodrugs can be prepared by modifying functional groups present in the compounds in such a way that the modifications are cleaved, either in routine manipulation or in vivo, to the parent compounds. Prodrugs include compounds wherein hydroxyl, amino, sulfhydryl, or carboxyl groups are bonded to any group that, when administered to a mammalian subject, cleaves to form a free hydroxyl, amino, sulfhydryl, or carboxyl group respectively. Preparation and use of prodrugs is discussed in T. Higuchi and V. Stella, “Pro-drugs as Novel Delivery Systems,” Vol. 14 of the A.C.S. Symposium Series, and in Bioreversible Carriers in Drug Design, ed. Edward B. Roche, American Pharmaceutical Association and Pergamon Press, 1987, both of which are hereby incorporated by reference in their entirety.

[1106] Proliferate: As used herein, the term “proliferate” means to grow, expand or increase or cause to grow, expand or increase rapidly. “Proliferative” means having the ability to proliferate. “Anti-proliferative” means having properties counter to or inapposite to proliferative properties.

[1107] Protein cleavage site: As used herein, “protein cleavage site” refers to a site where controlled cleavage of the amino acid chain can be accomplished by chemical, enzymatic or photochemical means.

[1108] Protein cleavage signal: As used herein “protein cleavage signal” refers to at least one amino acid that flags or marks a polypeptide for cleavage.

[1109] Protein of interest: As used herein, the terms “proteins of interest” or “desired proteins” include those provided herein and fragments, mutants, variants, and alterations thereof.

[1110] Proximal: As used herein, the term “proximal” means situated nearer to the center or to a point or region of interest.

[1111] Pseudouridine: As used herein, pseudouridine refers to the C-glycoside isomer of the nucleoside uridine. A “pseudouridine analog” is any modification, variant, isoform or derivative of pseudouridine. For example, pseudouridine analogs include but are not limited to 1-carboxymethyl-pseudouridine, 1-propynyl-pseudouridine, 1-taurinomethyl-pseudouridine, 1-taurinomethyl-4-thio-pseudouridine, 1-methylpseudouridine (m¹ψ), 1-methyl-4-thio-pseudouridine (m¹s⁴ψ), 4-thio-1-methyl-pseudouridine, 3-methyl-pseudouridine (m³ψ), 2-thio-1-methyl-pseudouridine, 1-methyl-1-deaza-pseudouridine, 2-thio-1-methyl-1-deaza-pseudouridine, dihydropseudouridine, 2-thio-dihydropseudouridine, 2-methoxyuridine, 2-methoxy-4-thio-uridine, 4-methoxy-pseudouridine, 4-methoxy-2-thio-pseudouridine, N1-methyl-pseudouridine, 1-methyl-3-(3-amino-3-carboxypropyl)pseudouridine (acp³ψ), and 2′-O-methyl-pseudouridine (ψm).

[1112] Purified: As used herein, “purify,” “purified,” “purification” means to make substantially pure or clear from unwanted components, material defilement, admixture or imperfection.

[1113] Sample: As used herein, the term “sample” or “biological sample” refers to a subset of its tissues, cells or component parts (e.g. body fluids, including but not limited to blood, mucus, lymphatic fluid, synovial fluid, cerebrospinal fluid, saliva, amniotic fluid, amniotic cord blood, urine, vaginal fluid and semen). A sample further may include a homogenate, lysate or extract prepared from a whole organism or a subset of its tissues, cells or component parts, or a fraction or portion thereof, including but not limited to, for example, plasma, serum, spinal fluid, lymph fluid, the external sections of the skin, respiratory, intestinal, and genitourinary tracts, tears, saliva, milk, blood cells, tumors, organs. A sample further refers to a medium, such as a nutrient broth or gel, which may contain cellular components, such as proteins or nucleic acid molecule.

[1114] Signal Sequences: As used herein, the phrase “signal sequences” refers to a sequence which can direct the transport or localization of a protein.

[1115] Single unit dose: As used herein, a “single unit dose” is a dose of any therapeutic administed in one dose/at one time/single route/single point of contact, i.e., single administration event.

[1116] Similarity: As used herein, the term “similarity” refers to the overall relatedness between polymeric molecules, e.g. between polynucleotide molecules (e.g. DNA molecules and/or RNA molecules) and/or between polypeptide molecules. Calculation of percent similarity of polymeric molecules to one another can be performed in the same manner as a calculation of percent identity, except that calculation of percent similarity takes into account conservative substitutions as is understood in the art.

[1117] Split dose: As used herein, a “split dose” is the division of single unit dose or total daily dose into two or more doses.

[1118] Stable: As used herein “stable” refers to a compound that is sufficiently robust to survive isolation to a useful degree of purity from a reaction mixture, and preferably capable of formulation into an efficacious therapeutic agent.

[1119] Stabilized: As used herein, the term “stabilize”, “stabilized,” “stabilized region” means to make or become stable.

[1120] Subject: As used herein, the term “subject” or “patient” refers to any organism to which a composition in accordance with the invention may be administered, e.g., for experimental, diagnostic, prophylactic, and/or therapeutic purposes. Typical subjects include animals (e.g., mammals such as mice, rats, rabbits, non-human primates, and humans) and/or plants.

[1121] Substantiality: As used herein, the term “substantially” refers to the qualitative condition of exhibiting total or near-total extent or degree of a characteristic or property of interest. One of ordinary skill in the biological arts will understand that biological and chemical phenomena rarely, if ever, go to completion and/or proceed to completeness or achieve or avoid an absolute result. The term “substantially” is therefore used herein to capture the potential lack of completeness inherent in many biological and chemical phenomena.

[1122] Substantially equal: As used herein as it relates to time differences between doses, the term means plus/minus 2%.

[1123] Substantially simultaneously: As used herein and as it relates to plurality of doses, the term means within 2 seconds.

[1124] Suffering from: An individual who is “suffering from” a disease, disorder, and/or condition has been diagnosed with or displays one or more symptoms of a disease, disorder, and/or condition.

[1125] Susceptible to: An individual who is “susceptible to” a disease, disorder, and/or condition has not been diagnosed with and/or may not exhibit symptoms of the disease, disorder, and/or condition but harbors a propensity to develop a disease or its symptoms. In some embodiments, an individual who is susceptible to a disease, disorder, and/or condition (for example, cancer) may be characterized by one or more of the following: (1) a genetic mutation associated with development of the disease, disorder, and/or condition; (2) a genetic polymorphism associated with development of the disease, disorder, and/or condition; (3) increased and/or decreased expression and/or activity of a protein and/or nucleic acid associated with the disease, disorder, and/or condition; (4) habits and/or lifestyles associated with development of the disease, disorder, and/or condition; (5) a family history of the disease, disorder, and/or condition; and (6) exposure to and/or infection with a microbe associated with development of the disease, disorder, and/or condition. In some embodiments, an individual who is susceptible to a disease, disorder, and/or condition will develop the disease, disorder, and/or condition. In some embodiments, an individual who is susceptible to a disease, disorder, and/or condition will not develop the disease, disorder, and/or condition.

[1126] Sustained release: As used herein, the term “sustained release” refers to a pharmaceutical composition or compound release profile that conforms to a release rate over a specific period of time.

[1127] Synthetic: The term “synthetic” means produced, prepared, and/or manufactured by the hand of man. Synthesis of polynucleotides or polypeptides or other molecules of the present invention may be chemical or enzymatic.

[1128] Targeted Cells: As used herein, “targeted cells” refers to any one or more cells of interest. The cells may be found in vitro, in vivo, in situ or in the tissue or organ of an organism. The organism may be an animal, preferably a mammal, more preferably a human and most preferably a patient.

[1129] Therapeutic Agent: The term “therapeutic agent” refers to any agent that, when administered to a subject, has a therapeutic, diagnostic, and/or prophylactic effect and/or elicits a desired biological and/or pharmacological effect.

[1130] Therapeutically effective amount: As used herein, the term “therapeutically effective amount” means an amount of an agent to be delivered (e.g., nucleic acid, drug, therapeutic agent, diagnostic agent, prophylactic agent, etc.) that is sufficient, when administered to a subject suffering from or susceptible to an infection, disease, disorder, and/or condition, to treat, improve symptoms of, diagnose, prevent, and/or delay the onset of the infection, disease, disorder, and/or condition.

[1131] Therapeutically effective outcome: As used herein, the term “therapeutically effective outcome” means an outcome that is sufficient in a subject suffering from or susceptible to an infection, disease, disorder, and/or condition, to treat, improve symptoms of, diagnose, prevent, and/or delay the onset of the infection, disease, disorder, and/or condition.

[1132] Total daily dose: As used herein, a “total daily dose” is an amount given or prescribed in 24 hr period. It may be administered as a single unit dose.

[1133] Transcription factor: As used herein, the term “transcription factor” refers to a DNA-binding protein that regulates transcription of DNA into RNA, for example, by activation or repression of transcription. Some transcription factors effect regulation of transcription alone, while others act in concert with other proteins. Some transcription factor can both activate and repress transcription under certain conditions. In general, transcription factors bind a specific target sequence or sequences highly similar to a specific consensus sequence in a regulatory region of a target gene. Transcription factors may regulate transcription of a target gene alone or in a complex with other molecules.

[1134] Treating: As used herein, the term “treating” refers to partially or completely alleviating, ameliorating, improving, relieving, delaying onset of, inhibiting progression of, reducing severity of, and/or reducing incidence of one or more symptoms or features of a particular infection, disease, disorder, and/or condition. For example, “treating” cancer may refer to inhibiting survival, growth, and/or spread of a tumor. Treatment may be administered to a subject who does not exhibit signs of a disease, disorder, and/or condition and/or to a subject who exhibits only early signs of a disease, disorder, and/or condition for the purpose of decreasing the risk of developing pathology associated with the disease, disorder, and/or condition.

[1135] Unmodified: As used herein, “unmodified” refers to any substance, compound or molecule prior to being changed in any way. Unmodified may, but does not always, refer to the wild type or native form of a biomolecule. Molecules may undergo a series of modifications whereby each modified molecule may serve as the “unmodified” starting molecule for a subsequent modification.

### EQUIVALENTS AND SCOPE

[1136] Those skilled in the art will recognize, or be able to ascertain using no more than routine experimentation, many equivalents to the specific embodiments in accordance with the invention described herein. The scope of the present invention is not intended to be limited to the above Description, but rather is as set forth in the appended claims.

[1137] In the claims, articles such as “a,” “an,” and “the” may mean one or more than one unless indicated to the contrary or otherwise evident from the context. Claims or descriptions that include “or” between one or more members of a group are considered satisfied if one, more than one, or all of the group members are present in, employed in, or otherwise relevant to a given product or process unless indicated to the contrary or otherwise evident from the context. The invention includes embodiments in which exactly one member of the group is present in, employed in, or otherwise relevant to a given product or process. The invention includes embodiments in which more than one, or all of the group members are present in, employed in, or otherwise relevant to a given product or process.

[1138] It is also noted that the term “comprising” is intended to be open and permits but does not require the inclusion of additional elements or steps. When the term “comprising” is used herein, the term “consisting of” is thus also encompassed and disclosed.

[1139] Where ranges are given, endpoints are included. Furthermore, it is to be understood that unless otherwise indicated or otherwise evident from the context and understanding of one of ordinary skill in the art, values that are expressed as ranges can assume any specific value or subrange within the stated ranges in different embodiments of the invention, to the tenth of the unit of the lower limit of the range, unless the context clearly dictates otherwise.

[1140] In addition, it is to be understood that any particular embodiment of the present invention that falls within the prior art may be explicitly excluded from any one or more of the claims. Since such embodiments are deemed to be known to one of ordinary skill in the art, they may be excluded even if the exclusion is not set forth explicitly herein. Any particular embodiment of the compositions of the invention (e.g., any nucleic acid or protein encoded thereby; any method of production; any method of use; etc.) can be excluded from any one or more claims, for any reason, whether or not related to the existence of prior art.

[1141] All cited sources, for example, references, publications, databases, database entries, and art cited herein, are incorporated into this application by reference, even if not expressly stated in the citation. In case of conflicting statements of a cited source and the instant application, the statement in the instant application shall control.

[1142] Section and table headings are not intended to be limiting.

### EXAMPLES

### Example 1. Modified mRNA Production

[1143] Modified mRNAs (mmRNA) according to the invention may be made using standard laboratory methods and materials. The open reading frame (ORF) of the gene of interest may be flanked by a 5′ untranslated region (UTR) which may contain a strong Kozak translational initiation signal and/or an alpha-globin 3′ UTR which may include an oligo(dT) sequence for templated addition of a poly-A tail. The modified mRNAs may be modified to reduce the cellular innate immune response. The modifications to reduce the cellular response may include pseudouridine (ψ) and 5-methyl-cytidine (5meC, 5mc or mC). (See, Kariko K et al. Immunity 23:165-75 (2005), Kariko K et al. Mol Ther 16:1833-40 (2008), Anderson B R et al. NAR (2010); each of which are herein incorporated by reference in their entireties).

[1144] The ORF may also include various upstream or downstream additions (such as, but not limited to, β-globin, tags, etc.) may be ordered from an optimization service such as, but limited to, DNA2.0 (Menlo Park, CA) and may contain multiple cloning sites which may have XbaI recognition. Upon receipt of the construct, it may be reconstituted and transformed into chemically competent E. coli.

[1145] For the present invention, NEB DH5-alpha Competent E. coli are used. Transformations are performed according to NEB instructions using 100 ng of plasmid. The protocol is as follows:
[1146] 1 Thaw a tube of NEB 5-alpha Competent E. coli cells on ice for 10 minutes.
[1147] 2 Add 1-5 pg containing 1 pg-100 ng of plasmid DNA to the cell mixture. Carefully flick the tube 4-5 times to mix cells and DNA. Do not vortex.
[1148] 3 Place the mixture on ice for 30 minutes. Do not mix.
[1149] 4 Heat shock at 42° C. for exactly 30 seconds. Do not mix.
[1150] 5 Place on ice for 5 minutes. Do not mix.
[1151] 6 Pipette 950 μl of room temperature SOC into the mixture.
[1152] 7 Place at 37° C. for 60 minutes. Shake vigorously (250 rpm) or rotate.
[1153] 8 Warm selection plates to 37° C.
[1154] 9 Mix the cells thoroughly by flicking the tube and inverting.

[1155] Spread 50-100 μl of each dilution onto a selection plate and incubate overnight at 37° C. Alternatively, incubate at 30° C. for 24-36 hours or 25° C. for 48 hours.

[1156] A single colony is then used to inoculate 5 ml of LB growth media using the appropriate antibiotic and then allowed to grow (250 RPM, 37° C.) for 5 hours. This is then used to inoculate a 200 ml culture medium and allowed to grow overnight under the same conditions.

[1157] To isolate the plasmid (up to 850 μg), a maxi prep is performed using the Invitrogen PURELINK™ HiPure Maxiprep Kit (Carlsbad, CA), following the manufacturer's instructions.

[1158] In order to generate cDNA for In Vitro Transcription (IVT), the plasmid (an Example of which is shown in FIG. 3) is first linearized using a restriction enzyme such as XbaI. A typical restriction digest with XbaI will comprise the following: Plasmid 1.0 μg; 10× Buffer 1.0 μl; XbaI 1.5 μl; dH₂O up to 10 μl; incubated at 37° C. for 1 hr. If performing at lab scale (<5 μg), the reaction is cleaned up using Invitrogen's PURELINK™ PCR Micro Kit (Carlsbad, CA) per manufacturer's instructions. Larger scale purifications may need to be done with a product that has a larger load capacity such as Invitrogen's standard PURELINK™ PCR. Kit (Carlsbad, CA). Following the cleanup, the linearized vector is quantified using the NanoDrop and analyzed to confirm linearization using agaorse gel electrophoresis.

[1159] The methods described herein to make modified mRNA may be used to produce molecules of all sizes including long molecules. Modified mRNA using the described methods has been made for different sized molecules including glucosidase, alpha; acid (GAA) (3.2 kb), cystic fibrosis transmembrane conductance regulator (CFTR) (4.7 kb), Factor VII (7.3 kb), lysosomal acid lipase (45.4 kDa), glucocerebrosidase (59.7 kDa) and iduronate 2-sulfatase (76 kDa).

[1160] As a non-limiting, example, G-CSF may represent the polypeptide of interest. Sequences used in the steps outlined in Examples 1-5 are shown in Table 11. It should be noted that the start codon (ATG) has been underlined in each sequence of Table 11.

TABLE 11
G-CSF Sequences

| SEQ ID NO | Description |
|---|---|
| 16099 | cDNA sequence: |
| | ATGGCTGGACCTGCCACCCAGAGCCCCATGAAGCTGATGGCCCTGCAGCTGCTGCTGTGGCACAGTGC |
| | ACTCTGACAGTGCAGGAAGCCACCCCCCTGGGCCCTGCCAGCTCCCTGCCCCAGAGCTTCCTGCTCAA |
| | GTGCTTAGAGCAAGTGAGGAAGATCCAGGGCGATGGCGCAGCGCTCCAGGAGAAGCTGTGTGCCACCT |
| | ACAAGCTGTGCCACCCCGAGGAGCTGGTGCTGCTCGGACACTCTCTGGGCATCCCCTGGGCTCCCCTG |
| | AGCAGCTGCCCCAGCCAGGCCCTGCAGCTGGCAGGCTGCTTGAGCCAACTCCATAGCGGCCTTTTCCT |
| | CTACCAGGGGCTCCTGCAGGCCCTGGAAGGGATCTCCCCCGAGTTGGGTCCCACCTTGGACACACTGC |
| | AGCTGGACGTCGCCGACTTTGCCACCACCATCTGGCAGCAGATGGAAGAACTGGGAATGGCCCCTGCC |
| | CTGCAGCCCACCCAGGGTGCCATGCCGGCCTTCGCCTCTGCTTTCCAGCGCCGGGCAGGAGGGGTCCT |
| | GGTTCCTCCCATCTGCAGAGCTTCCTGGAGGTGTCGTACCGCGTTCTACGCCACCTTGCCCAGCCCTG |
| | A |
| 16100 | cDNA having T7 polymerase site, AfeI and Xba restriction site: |
| | TAATACGACTCACTATAGGGAAATAAGAGAGAAAAGAAGAGTAAGAAGAAATATAAGAGCCACCATGG |
| | CTGGACCTGCCACCCAGAGCCCCATGAAGCTGATGGCCCTGCAGCTGCTGCTGTGGCACAGTGCACTC |
| | TGGACAGTGCAGGAAGCCACCCCCCTGGGCCCTGCCAGCTCCCTGCCCAGAGCTTCCTGCTCAAGTGC |
| | TTAGAGCAAGTGAGGAAGATCCAGGGCGATGGCGCAGCGCTCCAGGAGAAGCTGTGTGCCACCTACAA |
| | GCTGTGCCACCCCGAGGAGCTGGTGCTGCTCGGACACTCTCTGGGCATCCCCTGGGCTCCCCTGAGCA |
| | GCTGCCCCAGCCAGGCCCTGCAGCTGGCAGGCTGCTTGAGCCAACTCCATAGCGGCCTTTTCCTCTAC |
| | CAGGGGCTCCTGCAGGCCCTGGAAGGGATCTCCCCCGAGTTGGGTCCCACCTTGGACACACTGCAGCT |
| | GGACGTCGCCGACTTTGCCACCACCATCTGGCAGCAGATGGAAGAACTGGGAATGGCCCCTGCCCTGC |
| | AGCCCACCCAGGGTGCCATGCCGGCCTTCGCCTCTGCTTTCCAGCGCCGGGCAGGAGGGGTCCTGGTT |
| | GCCTCCCATCTGCAGAGCTTCCTGGAGGTGTCGTACCGCGTTCTACGCCACCTTGCCCAGCCCTGAAG |
| | CGCTGCCTTCTGCGGGGCTTGCCTTCTGGCCATGCCCTTCTTCTCTCCCTTGCACCTGTACCTCTTGG |
| | TCTTTGAATAAAGCCTGAGTAGGAAGGCGGCCGCTCGAGCATGCATCTAGA |
| 16101 | Optimized sequence; containing T7 polymerase site, AfeI and Xba |
| | restriction site |
| | TAATACGACTCACTATAGGGAAATAAGAGAGAAAAGAAGAGTAAGAAGAAATATAAGAGCCACCATGG |
| | CCGGTCCCGCGACCCAAAGCCCCATGAAACTTATGGCCCTGCAGTTGCTGCTTTGGCACTCGGCCCTC |
| | TGGACAGTCCAAGAAGCGACTCCTCTCGGACCTGCCTCATCGTTGCCGCAGTCATTCCTTTTGAAGTG |
| | TCTGGAGCAGGTGCGAAAGATTCAGGGCGATGGAGCCGCACTCCAAGAGAAGCTCTGCGCGACATACA |
| | AACTTTGCCATCCCGAGGAGCTCGTACTGCTCGGGCACAGCTTGGGGATTCCCTGGGCTCCTCTCTCG |
| | TCCTGTCCGTCGCAGGCTTTGCAGTTGGCAGGGTGCCTTTCCCAGCTCCACTCCGGTTTGTTCTTGTA |
| | TCAGGGACTGCTGCAAGCCCTTGAGGGAATCTCGCCAGAATTGGGCCCGACGCTGGACACGTTGCAGC |
| | TCGACGTGGCGGATTTCGCAACAACCATCTGGCAGCAGATGGAGGAACTGGGGATGGCACCCGCGCTG |
| | CAGCCCACGCAGGGGGCAATGCCGGCCTTTGCGTCCGCGTTTCAGCGCAGGGCGGGTGGAGTCCTCGT |
| | AGCGAGCCACCTTCAATCATTTTTGGAAGTCTCGTACCGGGTGCTGAGACATCTTGCGCAGCCGTGAA |
| | GCGCTGCCTTCTGCGGGGCTTGCCTTCTGGCCATGCCCTTCTTCTCTCCCTTGCACCTGTACCTCTTG |
| | GTCTTTGAATAAAGCCTGAGTAGGAAGGCGGCCGCTCGAGCATGCATCTAGA |
| 16102 | mRNA sequence (transcribed) |
| | GGGAAAUAAGAGAGAAAAGAAGAGUAAGAAGAAAUAUAAGAGCCACCAUGGCCGGUCCCGCGACCCAA |
| | AGCCCCAUGAAACUUAUGGCCCUGCAGUUGCUGCUUUGGCACUCGGCCCUCUGGACAGUCCAAGAAGC |
| | GACUCCUCUCGGACCUGCCUCAUCGUUGCCGCAGUCAUUCCUUUUGAAGUGUCUGGAGCAGGUGCGAA |
| | AGAUUCAGGGCGAUGGAGCCGCACUCCAAGAGAAGCUCUGCGCGACAUACAAACUUUGCCAUCCCGAG |
| | GAGCUCGUACUGCUCGGGCACAGCUUGGGGAUUCCCUGGGCUCCUCUCUCGUCCUGUCCGUCGCAGGC |
| | UUUGCAGUUGGCAGGGUGCCUUUCCCAGCUCCACUCCGGUUUGUUCUUGUAUCAGGGACUGCUGCAAG |
| | CCCUUGAGGGAAUCUCGCCAGAAUUGGGCCCGACGCUGGACACGUUGCAGCUCGACGUGGCGGAUUUC |
| | GCAACAACCAUCUGGCAGCAGAUGGAGGAACUGGGGAUGGCACCCGCGCUGCAGCCCACGCAGGGGGC |
| | AAUGCCGGCCUUUGCGUCCGCGUUUCAGCGCAGGGCGGGUGGAGUCCUCGUAGCGAGCCACCUUCAAU |
| | CAUUUUUGGAAGUCUCGUACCGGGUGCUGAGACAUCUUGCGCAGCCGUGAAGCGCUGCCUUCUGCGGG |
| | GCUUGCCUUCUGGCCAUGCCCUUCUUCUCUCCCUUGCACCUGUACCUCUUGGUCUUUGAAUAAAGCCU |
| | GAGUAGGAAG |

### Example 2: PCR for cDNA Production

[1161] PCR procedures for the preparation of cDNA are performed using 2×KAPA HIFI™ HotStart ReadyMix by Kapa Biosystems (Woburn, MA). This system includes 2×KAPA ReadyMix12.5 μl; Forward Primer (10 uM) 0.75 μl; Reverse Primer (10 uM) 0.75 μl; Template cDNA 100 ng; and dH₂O diluted to 25.0 μl. The reaction conditions are at 95° C. for 5 min. and 25 cycles of 98° C. for 20 see, then 58° C. for 15 see, then 72° C. for 45 see, then 72° C. for 5 min. then 4° C. to termination.

[1162] The reverse primer of the instant invention incorporates a Poly-T₁₂₀ for a poly-A₁₂₀ in the mRNA. Other reverse primers with longer or shorter poly(T) tracts can be used to adjust the length of the poly(A) tail in the mRNA.

[1163] The reaction is cleaned up using Invitrogen's PURELINK™ PCR Micro Kit (Carlsbad, CA) per manufacturer's instructions (up to 5 pig). Larger reactions will require a cleanup using a product with a larger capacity. Following the cleanup, the CDNA is quantified using the NANODROP™ and analyzed by agarose gel electrophoresis to confirm the cDNA is the expected size. The cDNA is then submitted for sequencing analysis before proceeding to the in vitro transcription reaction.

### Example 3. In Vitro Transcription (WYT)

[1164] The in vitro transcription reaction generates mRNA containing modified nucleotides or modified RNA. The input nucleotide triphosphate (NTP) mix is made in-house using natural and un-natural NTPs.

[1165] A typical in vitro transcription reaction includes the following:

| | | | |
|---|---|---|---|
| 1. | Template cDNA | 1.0 | μg |
| 2. | 10 × transcription buffer (400 mM Tris- | 2.0 | μl |
| | HCl pH 8.0, 190 mM MgCl₂, 50 mM DTT, | | |
| | 10 mM Spermidine) | | |
| 3. | Custom NTPs (25 mM each) | 7.2 | μl |
| 4. | RNase Inhibitor | 20 | U |
| 5. | T7 RNA polymerase | 3000 | U |

| | | |
|---|---|---|
| 6. | dH₂0 | Up to 20.0 μl. and |
| 7. | Incubation at 37° C. for 3 hr-5 hrs. | |

[1166] The crude IVT mix may be stored at 4° C. overnight for cleanup the next day. 1 U of RNase-free DNase is then used to digest the original template. After 15 minutes of incubation at 37° C., the mRNA is purified using Ambion's MEGACLEAR™ Kit (Austin, TX) following the manufacturer's instructions. This kit can purify up to 500 μg of RNA. Following the cleanup, the RNA is quantified using the NanoDrop and analyzed by agarose gel electrophoresis to confirm the RNA is the proper size and that no degradation of the RNA has occurred.

### Example 4. Enzymatic Capping of RNA

[1167] Capping of the mRNA is performed as follows where the mixture includes: IVT RNA 60 μg-180 μg and dH₂O up to 72 μl. The mixture is incubated at 65° C. for 5 minutes to denature RNA, and then is transferred immediately to ice.

[1168] The protocol then involves the mixing of 10× Capping Buffer (0.5 M Tris-HCl (pH 8.0), 60 mM KCl, 12.5 mM MgCl₂) (10.0 μl); 20 mM GTP (5.0 μl); 20 mM S-Adenosyl Methionine (2.5 μl); RNase Inhibitor (100 U); 2′-O-Methyltransferase (400U); Vaccinia capping enzyme (Guanylyl transferase) (40 U); dH₂O (Up to 28 μl); and incubation at 37° C. for 30 minutes for 60 μg RNA or up to 2 hours for 180 μg of RNA.

[1169] The mRNA is then purified using Arbion's MEGACLEAR™ Kit (Austin, TX) following the manufacturer's instructions. Following the cleanup, the RNA is quantified using the NANODROP™ (ThermoFisher, Waltham, MA) and analyzed by agarose gel electrophoresis to confirm the RNA is the proper size and that no degradation of the RNA has occurred. The RNA product may also be sequenced by running a reverse-transcription-PCR to generate the cDNA for sequencing.

### Example 5. PolyA Tailing Reaction

[1170] Without a poly-T in the cDNA, a poly-A tailing reaction must be performed before cleaning the final product. This is done by mixing Capped IVT RNA (100 μl); RNase Inhibitor (20 U); 10× Tailing Buffer (0.5 M Tris-HCl (pH 8.0), 2.5 M NaCl, 100 mM MgCl₂)(12 μl); 20 mM ATP (6.0 μl); Poly-A Polymerase (20 U); dH₂O up to 123.5 μl and incubation at 37° C. for 30 min. If the poly-A tail is already in the transcript, then the tailing reaction may be skipped and proceed directly to cleanup with Ambion's MEGACLEAR™ kit (Austin, TX) (up to 500 μg), Poly-A Polymerase is preferably a recombinant enzyme expressed in yeast.

[1171] For studies performed and described herein, the poly-A tail is encoded in the IVT template to comprise 160 nucleotides in length. However, it should be understood that the processivity or integrity of the polyA tailing reaction may not always result in exactly 160 nucleotides. Hence polyA tails of approximately 160 nucleotides, e.g., about 150-165, 155, 156, 157, 158, 159, 160, 161, 162, 163, 164 or 165 are within the scope of the invention.

### Example 6. Natural 5′ Caps and 5′ Cap Analogues

[1172] 5′-capping of modified RNA may be completed concomitantly during the in vitro-transcription reaction using the following chemical RNA cap analogs to generate the 5′-guanosine cap structure according to manufacturer protocols: 3′-O-Me-m7G(5′)ppp(⁵′) G [the ARCA cap]; G(5′)ppp(5′)A; G(5′)ppp(5′)G; m7G(5′)ppp(5′)A; m7G(5′)ppp(5′)G (New England BioLabs, Ipswich, MA). 5′-capping of modified RNA may be completed post-transcriptionally using a Vaccinia Virus Capping Enzyme to generate the “Cap 0” structure: m7G(5′)ppp(5′)G (New England BioLabs, Ipswich, MA). Cap 1 structure may be generated using both Vaccinia Virus Capping Enzyme and a 2′-O methyl-transferase to generate: m7G(5′)ppp(5′)G-2′-O-methyl. Cap 2 structure may be generated from the Cap 1 structure followed by the 2′-O-methylation of the 5′-antepenultimate nucleotide using a 2′-O methyl-transferase. Cap 3 structure may be generated from the Cap 2 structure followed by the 2′-O-methylation of the 5′-preantepenultimate nucleotide using a 2′-O methyl-transferase. Enzymes are preferably derived from a recombinant source.

[1173] When transfected into mammalian cells, the modified mRNAs have a stability of between 12-18 hours or more than 18 hours, e.g., 24, 36, 48, 60, 72 or greater than 72 hours.

### Example 7. Capping

### A. Protein Expression Assay

[1174] Synthetic mRNAs encoding human G-CSF (cDNA shown in SEQ ID NO: 16099; mRNA sequence fully modified with 5-methylcytosine at each cytosine and pseudouridine replacement at each uridine site shown in SEQ ID NO: 16102 with a polyA tail approximately 160 nucleotides in length not shown in sequence) containing the ARCA (3′ O-Me-m7G(5′)ppp(5′)G) cap analog or the Cap 1 structure can be transfected into human primary keratinocytes at equal concentrations. 6, 12, 24 and 36 hours post-transfection the amount of G-CSF secreted into the culture medium can be assayed by ELISA. Synthetic mRNAs that secrete higher levels of G-CSF into the medium would correspond to a synthetic mRNA with a higher translationally-competent Cap structure.

### B. Purity Analysis Synthesis

[1175] Synthetic mRNAs encoding human G-CSF (cDNA shown in SEQ ID NO: 16099; mRNA sequence fully modified with 5-methylcytosine at each cytosine and pseudouridine replacement at each uridine site shown in SEQ ID NO: 16102 with a polyA tail approximately 160 nucleotides in length not shown in sequence) containing the ARCA cap analog or the Cap1 structure crude synthesis products can be compared for purity using denaturing Agarose-Urea gel electrophoresis or HPLC analysis. Synthetic mRNAs with a single, consolidated band by electrophoresis correspond to the higher purity product compared to a synthetic mRNA with multiple bands or streaking bands. Synthetic mRNAs with a single HPLC peak would also correspond to a higher purity product. The capping reaction with a higher efficiency would provide a more pure mRNA population.

### C. Cytokine Analysis

[1176] Synthetic mRNAs encoding human G-CSF (cDNA shown in SEQ ID NO: 16099; mRNA sequence fully modified with 5-methylcytosine at each cytosine and pseudouridine replacement at each uridine site shown in SEQ ID NO: 16102 with a polyA tail approximately 160 nucleotides in length not shown in sequence) containing the ARCA cap analog or the Cap1 structure can be transfected into human primary keratinocytes at multiple concentrations. 6, 12, 24 and 36 hours post-transfection the amount of pro-inflammatory cytokines such as TNF-alpha and IFN-beta secreted into the culture medium can be assayed by ELISA. Synthetic mRNAs that secrete higher levels of pro-inflammatory cytokines into the medium would correspond to a synthetic mRNA containing an immune-activating cap structure.

### D. Capping Reaction Efficiency

[1177] Synthetic mRNAs encoding human G-CSF (cDNA shown in SEQ ID NO: 16099; mRNA sequence fully modified with 5-methylcytosine at each cytosine and pseudouridine replacement at each uridine site shown in SEQ ID NO: 16102 with a polyA tail approximately 160 nucleotides in length not shown in sequence) containing the ARCA cap analog or the Cap1 structure can be analyzed for capping reaction efficiency by LC-MIS after capped mRNA nuclease treatment. Nuclease treatment of capped mRNAs would yield a mixture of free nucleotides and the capped 5′-5-triphosphate cap structure detectable by LC-MS. The amount of capped product on the LC-MS spectra can be expressed as a percent of total mRNA from the reaction and would correspond to capping reaction efficiency. The cap structure with higher capping reaction efficiency would have a higher amount of capped product by LC-MS.

### Example 8. Agarose Gel Electrophoresis of Modified RNA or RT PCR Products

[1178] Individual modified RNAs (200-400 ng in a 20 μl volume) or reverse transcribed PCR products (200-400 ng) are loaded into a well on a non-denaturing 1.2% Agarose E-Gel (Invitrogen, Carlsbad, CA) and run for 12-15 minutes according to the manufacturer protocol.

### Example 9. Nanodrop Modified RNA Quantification and UV Spectral Data

[1179] Modified RNAs in TE buffer (1 μl) are used for Nanodrop UV absorbance readings to quantitate the yield of each modified RNA from an in vitro transcription reaction.

### Example 10. Formulation of Modified mRNA Using Lipidoids

[1180] Modified mRNAs (mmRNA) are formulated for in vitro experiments by mixing the mmRNA with the lipidoid at a set ratio prior to addition to cells. In vivo formulation may require the addition of extra ingredients to facilitate circulation throughout the body. To test the ability of these lipidoids to form particles suitable for in vivo work, a standard formulation process used for siRNA-lipidoid formulations was used as a starting point, Initial mmRNA-lipidoid formulations may consist of particles composed of 42% lipidoid, 48% cholesterol and 10% PEG, with further optimization of ratios possible. After formation of the particle, mmRNA is added and allowed to integrate with the complex. The encapsulation efficiency is determined using a standard dye exclusion assays.

### Materials and Methods for Examples 11-15

### A. Lipid Synthesis

[1181] Six lipids, DLin-DMA, DLin-K-DMA, DLin-KC2-DMA, 98N12-5, C12-200 and DLin-MC3-DMA, were synthesized by methods outlined in the art in order to be formulated with modified RNA. DLin-DMA and precursors were synthesized as described in Heyes et. al, J. Control Release, 2005, 107, 276-287. DLin-K-DMA and DLin-KC2-DM4A and precursors were synthesized as described in Semple et. al, Nature Biotechnology, 2010, 28, 172-176. 98N12-5 and precursor were synthesized as described in Akinc et. al, Nature Biotechnology, 2008, 26, 561-569.

[1182] C12-200 and precursors were synthesized according to the method outlined in Love et. al, PNAS, 2010, 107. 1864-1869. 2-epoxydodecane (5.10 g, 27.7 mmol, 8.2 eq) was added to a vial containing Amine 200 (0.723 g, 3.36 mmol, 1 eq) and a stirring bar. The vial was sealed and warmed to 80° C., The reaction was stirred for 4 days at 80° C. Then the mixture was purified by silica gel chromatography using a gradient from pure dichloromethane (DCM) to DCM:MeOH 98:2. The target compound was further purified by RP-HPLC to afford the desired compound.

[1183] DLin-MC3-DMA and precursors were synthesized according to procedures described in WO 2010054401 herein incorporated by reference in its entirety. A mixture of dilinoleyl methanol (1.5 g, 2.8 mmol, 1 eq), N,N-dimethylaminobutyric acid (1.5 g, 2.8 mmol, 1 eq), DIPEA (0.73 mL, 4.2 mmol, 1.5 eq) and TBTU (1.35 g, 4.2 mmol, 1.5 eq) in 10 mL of DMF was stirred for 10 h at room temperature. Then the reaction mixture was diluted in ether and washed with water. The organic layer was dried over anhydrous sodium sulfate, filtrated and concentrated under reduced pressure. The crude product was purified by silica gel chromatography using a gradient DCM to DCM:MeOH 98:2. Subsequently the target compound was subjected to an additional RP-HPLC purification which was done using a YMC—Pack C4 column to afford the target compound.

### B. Formulation of Modified RNA Nanoparticles

[1184] Solutions of synthesized lipid, 1,2-distearoyl-3-phosphatidylcholine (DSPC) (Avanti Polar Lipids, Alabaster, AL), cholesterol (Sigma-Aldrich, Taufkirchen, Germany), and α-[3′-(1,2-dimyristoyl-3-propanoxy)-carboxamide-propyl]-o-methoxy-polyoxyethylene (PEG-c-DOMG) (NOF, Bouwelven, Belgium) were prepared at concentrations of 50 mM in ethanol and stored at −20° C. The lipids were combined to yield molar ratio of 50:10:38.5:1.5 (Lipid: DSPC: Cholesterol: PEG-c-DOMG) and diluted with ethanol to a final lipid concentration of 25 mM. Solutions of modified mRNA at a concentration of 1-2 mg/mL in water were diluted in 50 mM sodium citrate buffer at a pH of 3 to form a stock modified mRNA solution. Formulations of the lipid and modified mRNA were prepared by combining the synthesized lipid solution with the modified mRNA solution at total lipid to modified mRNA weight ratio of 10:1, 15:1, 20:1 and 30: L. The lipid ethanolic solution was rapidly injected into aqueous modified mRNA solution to afford a suspension containing 33% ethanol. The solutions were injected either manually (MI) or by the aid of a syringe pump (SP) (Harvard Pump 33 Dual Syringe Pump Harvard Apparatus Holliston, MA).

[1185] To remove the ethanol and to achieve the buffer exchange, the formulations were dialyzed twice against phosphate buffered saline (PBS), pH 7.4 at volumes 200-times of the primary product using a Slide-A-Lyzer cassettes (Thermo Fisher Scientific Inc. Rockford, IL) with a molecular weight cutoff (MWCO) of 10 kD. The first dialysis was carried at room temperature for 3 hours and then the formulations were dialyzed overnight at 4° C. The resulting nanoparticle suspension was filtered through 0.2 μm sterile filter (Sarstedt, Nimbrecht, Germany) into glass vials and sealed with a crimp closure.

### C. Characterization of Formulations

[1186] A Zetasizer Nano ZS (Malvern Instruments Ltd, Malvern, Worcestershire, UK) was used to determine the particle size, the polydispersity index (PDI) and the zeta potential of the modified mRNA nanoparticles in 1×PBS in determining particle size and 15 mM PBS in determining zeta potential.

[1187] Ultraviolet-visible spectroscopy was used to determine the concentration of modified mRNA nanoparticle formulation. 100 μL of the diluted formulation in 1×PBS was added to 900 μL of a 4:1 (v/v) mixture of methanol and chloroform. After mixing, the absorbance spectrum of the solution was recorded between 230 nm and 330 nm on a DU 800 spectrophotometer (Beckman Coulter, Beckman Coulter, Inc., Brea, CA). The modified RNA concentration in the nanoparticle formulation was calculated based on the extinction coefficient of the modified RNA used in the formulation and on the difference between the absorbance at a wavelength of 260 nm and the baseline value at a wavelength of 330 nm.

[1188] QUANT-IT™ RIBOGREEN● RNA assay (Invitrogen Corporation Carlsbad, CA) was used to evaluate the encapsulation of modified RNA by the nanoparticle. The samples were diluted to a concentration of approximately 5 μg/mL in TIE buffer (10 mM Tris-HCl, 1 mM EDTA, pH 7.5). 50 μL of the diluted samples were transferred to a polystyrene 96 well plate, then either 50 μL of TE buffer or 50 μL of a 2% Triton X-100 solution was added. The plate was incubated at a temperature of 37° C. for 15 minutes. The RIBOGREEN® reagent was diluted 1:100 in TE buffer, 100 μL of this solution was added to each well. The fluorescence intensity was measured using a fluorescence plate reader (Wallac Victor 1420 Multilabel Counter; Perkin Ehner, Waltham, MA) at an excitation wavelength of ˜480 nm and an emission wavelength of ˜520 nm. The fluorescence values of the reagent blank were subtracted from that of each of the samples and the percentage of free modified RNA was determined by dividing the fluorescence intensity of the intact sample (without addition of Triton X-100) by the fluorescence value of the disrupted sample (caused by the addition of Triton X-100).

### D. In Vitro Incubation

[1189] Human embryonic kidney epithelial (HEK293) and hepatocellular carcinoma epithelial (HepG2) cells (LGC standards GmbH, Wesel, Germany) were seeded on 96-well plates (Greiner Bio-one GmbH, Frickenhausen, Germany) and plates for HEK293 cells were precoated with collagen type1. HEK293 were seeded at a density of 30,000 and HepG2 were seeded at a density of 35,000 cells per well in 100 μl cell culture medium. For HEK293 the cell culture medium was DMEM, 10% FCS, adding 2 mM L-Glutamine, 1 mM Sodium pyruvate and 1× non-essential amino acids (Biochrom AG, Berlin, Germany) and 1.2 mg/ml Sodium bicarbonate (Sigma-Aldrich, Munich, Germany) and for HepG2 the culture medium was MEM (Gibco Life Technologies, Darmstadt, Germany), 10% FCS adding 2 mM L-Glutamine, 1 mM Sodium pyruvate and 1× non-essential amino acids (Biochrom AG, Berlin, Germany. Formulations containing mCherry mRNA (mRNA sequence shown in SEQ ID NO: 16103; polyA tail of approximately 160 nucleotides not shown in sequence; 5′cap, Cap1) were added in quadruplicates directly after seeding the cells and incubated. The mCherry cDNA with the T7 promoter, 5′untranslated region (UTR) and 3′ UTR used in in vitro transcription (IVT) is given in SEQ ID NO: 16104. The mCherry mRNA was modified with a 5meC at each cytosine and pseudouridine replacement at each uridine site.

[1190] Cells were harvested by transferring the culture media supernatants to a 96-well Pro-Bind U-bottom plate (Beckton Dickinson GmbH, Heidelberg, Germany). Cells were trypsinized with 1 volume Trypsin/EDTA (Biochrom AG, Berlin, Germany), pooled with respective supernatants and fixed by adding one volume PBS/2% FCS (both Biochrom AG, Berlin, Germany)/0.5% formaldehyde (Merck, Darmstadt, Germany). Samples then were submitted to a flow cytometer measurement with a 532 nm excitation laser and the 610/20 filter for PE-Texas Red in a LSRII cytometer (Beckton Dickinson GmbH, Heidelberg, Germany). The mean fluorescence intensity (MFI) of all events and the standard deviation of four independent wells are presented in for samples analyzed.

### Example 11. Purification of Nanoparticle Formulations

[1191] Nanoparticle formulations of DLin-KC2-DMA and 98N12-5 in HEK293 and HepG2 were tested to determine if the mean fluorescent intensity (MFI) was dependent on the lipid to modified RNA ratio and/or purification. Three formulations of DLin-KC2-DMA and two formulations of 98N12-5 were produced using a syringe pump to the specifications described in Table 12. Purified samples were purified by SEPHADEX™ G-25 DNA grade (GE Healthcare, Sweden). Each formulation before and after purification (aP) was tested at concentration of 250 ng modified RNA per well in a 24 well plate. The percentage of cells that are positive for the marker for FL4 channel (% FL4-positive) when analyzed by the flow cytometer for each formulation and the background sample, and the MFI of the marker for the FL4 channel for each formulation and the background sample are shown in Table 13. The formulations which had been purified had a slightly higher MFI than those formulations tested before purification.

TABLE 12
Formulations

| Formulation # | Lipid | Lipid/RNA wt/wt | Mean size (nm) |
|---|---|---|---|
| NPA-001-1 | DLin-KC2-DMA | 10 | PDI: 0.08 |
| NPA-001-1 aP | DLin-KC2-DMA | 10 | PDI: 0.14 |
| NPA-002-1 | DLin-KC2-DMA | 15 | PDI: 0.11 |
| NPA-002-1 aP | DLin-KC2-DMA | 15 | PDI: 0.12 |
| NPA-003-1 | DLin-KC2-DMA | 20 | PDI: 0.08 |
| NPA-003-1 aP | DLin-KC2-DMA | 20 | PDI: 0.06 |
| NPA-005-1 | 98N12-5 | 15 | 127 nm |
| | | | PDI: 0.12 |
| NPA-005-1 aP | 98N12-5 | 15 | 134 nm |
| | | | PDI: 0.17 |
| NPA-006-1 | 98N12 | 20 | 126 nm |
| | | | PDI: 0.08 |
| NPA-006-1 aP | 98N12 | 20 | 118 nm |
| | | | PDI: 0.13 |

TABLE 13
HEK293 and HepG2, 24-well, 250 ng Modified RNA/well

| | % FL4-positive | | FL4 MFI | |
|---|---|---|---|---|
| Formulation | HEK293 | HepG2 | HEK293 | HepG2 |
| Untreated | 0.33 | 0.40 | 0.25 | 0.30 |
| NPA-001-1 | 62.42 | 5.68 | 1.49 | 0.41 |
| NPA-001-ap | 87.32 | 9.02 | 3.23 | 0.53 |
| NPA-002-1 | 91.28 | 9.90 | 4.43 | 0.59 |
| NPA-002-ap | 92.68 | 14.02 | 5.07 | 0.90 |
| NPA-003-1 | 87.70 | 11.76 | 6.83 | 0.88 |
| NPA-003-ap | 88.88 | 15.46 | 8.73 | 1.06 |
| NPA-005-1 | 50.60 | 4.75 | 1.83 | 0.46 |
| NPA-005-ap | 38.64 | 5.16 | 1.32 | 0.46 |
| NPA-006-1 | 54.19 | 13.16 | 1.30 | 0.60 |
| NPA-006-ap | 49.97 | 13.74 | 1.27 | 0.61 |

### Example 12. Concentration Response Curve

[1192] Nanoparticle formulations of 98N12-5 (NPA-005) and DLin-KC2-DMA (NPA-003) were tested at varying concentrations to determine the MFI of FL4 or mCherry (mRNA sequence shown in SEQ ID NO: 16103; polyA tail of approximately 160 nucleotides not shown in sequence; 5′cap, Cap1; fully modified with 5-methylcytosine and pseudouridine) over a range of doses. The formulations tested are outlined in Table 14. To determine the optimal concentration of nanoparticle formulations of 98N1 2-5, varying concentrations of formulated modified RNA (100 ng, 10 ng, 1.0 ng, 0.1 ng and 0.01 ng per well) were tested in a 24-well plate of HEK293, and the results of the FL4 MFI of each dose are shown in Table 15. Likewise, to determine the optimal concentration of nanoparticle formulations of DLin-KC2-DMA, varying concentrations of formulated modified RNA (250 ng 100 ng, 10 ng, 1.0 ng, 0.1 ng and 0.01 ng per well) were tested in a 24-well plate of HEK293, and the results of the FL4 MFI of each dose are shown in Table 16. Nanoparticle formulations of, DLin-KC2-DMA were also tested at varying concentrations of formulated modified RNA (1250 ng, 100 ng and 30 ng per well) in a 24 well plate of HEK293, and the results of the FL4 MFI of each dose are shown in Table 17. A dose of 1 ng/well for 98N12-5 and a dose of 10 ng/well for DLin-KC2-DMA were found to resemble the FL4 MFI of the background.

[1193] To determine how close the concentrations resembled the background, we utilized a flow cytometer with optimized filter sets for detection of mCherry expression, and were able to obtain results with increased sensitivity relative to background levels. Doses of 25 ng/well, 0.25 ng/well, 0.025 ng/well and 0.0025 ng/well were analyzed for 98N12-5 (NPA-005) and DLin-KC2-DMA (NPA-003) to determine the MFI of mCherry. As shown in Table 18, the concentration of 0.025 ng/well and lesser concentrations are similar to the background MFI level of mCherry which is about 386.125.

TABLE 14
Formulations

| Formulation # | NPA-003 | NPA-005 |
|---|---|---|
| Lipid | DLin-KC2-DMA | 98N12-5 |
| Lipid/RNA | 20 | 15 |
| wt/wt | | |
| Mean size | 114 nm | 106 nm |
| | PDI: 0.08 | PDI: 0.12 |

TABLE 15
HEK293, NPA-005, 24-well, n = 4

| Formulation | FL4 MFI |
|---|---|
| Untreated control | 0.246 |
| NPA-005 100 ng | 2.2175 |
| NPA-005 10 ng | 0.651 |
| NPA-005 1.0 ng | 0.28425 |
| NPA-005 0.1 ng | 0.27675 |
| NPA-005 0.01 ng | 0.2865 |

TABLE 16
HEK293, NPA-003, 24-well, n = 4

| Formulation | FL4 MFI |
|---|---|
| Untreated control | 0.3225 |
| NPA-003 250 ng | 2.9575 |
| NPA-003 100 ng | 1.255 |
| NPA-003 10 ng | 0.40025 |
| NPA-003 1 ng | 0.33025 |
| NPA-003 0.1 ng | 0.34625 |
| NPA-003 0.01 ng | 0.3475 |

TABLE 17
HEK293, NPA-003, 24-well, n = 4

| Formulation | FL4 MFI |
|---|---|
| Untreated control | 0.27425 |
| NPA-003 250 ng | 5.6075 |
| NPA-003 100 ng | 3.7825 |
| NPA-003 30 ng | 1.5525 |

TABLE 18
Concentration and MFI

| | | MFI mCherry | |
|---|---|---|---|
| Formulati | | NPA-003 | NPA-005 |
| 25 | ng/well | 11963.25 | 12256.75 |
| 0.25 | ng/well | 1349.75 | 2572.75 |
| 0.025 | ng/well | 459.50 | 534.75 |
| 0.0025 | ng/well | 310.75 | 471.75 |

### Example 13. Manual Injection and Syringe Pump Formulations

[1194] Two formulations of DLin-KC2-DMA and 98N12-5 were prepared by manual injection (MI) and syringe pump injection (SP) and analyzed along with a background sample to compare the MFI of mCherry (mRNA sequence shown in SEQ ID NO: 16103; polyA tail of approximately 160 nucleotides not shown in sequence; 5′cap, Cap1; fully modified with 5-methylcytosine and pseudouridine) of the different formulations. Table 19 shows that the syringe pump formulations had a higher MFI as compared to the manual injection formulations of the same lipid and lipid/RNA ratio.

TABLE 19
Formulations and MFI

| | | Lipid/ | | | |
|---|---|---|---|---|---|
| Formulation | | RNA | Mean size | Method of | |
| # | Lipid | wt/wt | (nm) | formulation | MFI |
| Untreated | N/A | N/A | N/A | N/A | 674.67 |
| Control | | | | | |
| NPA-002 | DLin-KC2- | 15 | 140 nm | MI | 10318.25 |
| | DMA | | PDI: 0.11 | | |
| NPA-002-2 | DLin-KC2- | 15 | 105 nm | SP | 37054.75 |
| | DMA | | PDI: 0.04 | | |
| NPA-003 | DLin-KC2- | 20 | 114 nm | MI | 22037.5 |
| | DMA | | PDI: 0.08 | | |
| NPA-003-2 | DLin-KC2- | 20 | 95 nm | SP | 37868.75 |
| | DMA | | PDI: 0.02 | | |
| NPA-005 | 98N12-5 | 15 | 127 nm | MI | 11504.75 |
| | | | PDI: 0.12 | | |
| NPA-005-2 | 98N12-5 | 15 | 106 nm | SP | 9343.75 |
| | | | PDI: 0.07 | | |
| NPA-006 | 98N12-5 | 20 | 126 nm | MI | 11182.25 |
| | | | PDI: 0.08 | | |
| NPA-006-2 | 98N12-5 | 20 | 93 nm | SP | 5167 |
| | | | PDI: 0.08 | | |

### Example 14. Lipid Nano Article Formulations

[1195] Formulations of DLin-DMA, DLin-K-DMA, DLin-KC2-DMA, 98N12-5, C12-200 and DLin-MC3-DMA were incubated at a concentration of 60 ng/well or 62.5 ng/well in a plate of HEK293 and 62.5 ng/well in a plate of HepG2 cells for 24 hours to determine the MFI of mCherry (mRNA sequence shown in SEQ ID NO: 16103; polyA tail of approximately 160 nucleotides not shown in sequence; 5′cap, Cap1; fully modified with 5-methylcytosine and pseudouridine) for each formulation. The formulations tested are outlined in Table 20 below. As shown in Table 21 for the 60 ng/well and Tables 22, 23, 24 and 25 for the 62.5 ng/well, the formulation of NPA-003 and NPA-018 have the highest mCherry MFI and the formulations of NPA-008, NPA-010 and NPA-013 are most the similar to the background sample mCherry MFI value.

TABLE 20
Formulations

| Formulation | | Lipid/RNA | |
|---|---|---|---|
| # | Lipid | wt/wt | Mean size (nm) |
| NPA-001 | DLin-KC2-DMA | 10 | PDI: 0.08 |
| NPA-002 | DLin-KC2-DMA | 15 | PDI: 0.11 |
| NPA-002-2 | DLin-KC2-DMA | 15 | PDI: 0.04 |
| NPA-003 | DLin-KC2-DMA | 20 | PDI: 0.08 |
| NPA-003-2 | DLin-KC2-DMA | 20 | PDI: 0.02 |
| NPA-005 | 98N12-5 | 15 | 127 nm |
| | | | PDI: 0.12 |
| NPA-006 | 98N12-5 | 20 | 126 nm |
| | | | PDI: 0.08 |
| NPA-007 | DLin-DMA | 15 | PDI: 0.09 |
| NPA-008 | DLin-K-DMA | 15 | PDI: 0.08 |
| NPA-009 | C12-200 | 15 | 138 nm |
| | | | PDI: 0.15 |
| NPA-010 | DLin-MC3-DMA | 15 | PDI: 0.09 |
| NPA-012 | DLin-DMA | 20 | PDI: 0.08 |
| NPA-013 | DLin-K-DMA | 20 | 104 nm |
| | | | PDI: 0.03 |
| NPA-014 | C12-200 | 20 | 101 nm |
| | | | PDI: 0.06 |
| NPA-015 | DLin-MC3-DMA | 20 | 109 nm |
| | | | PDI: 0.07 |

TABLE 21
HEK293, 96-well, 60 ng Modified RNA/well

| Formulation | MFI mCherry |
|---|---|
| Untreated | 871.81 |
| NPA-001 | 6407.25 |
| NPA-002 | 14995 |
| NPA-003 | 29499.5 |
| NPA-005 | 3762 |
| NPA-006 | 2676 |
| NPA-007 | 9905.5 |
| NPA-008 | 1648.75 |
| NPA-009 | 2348.25 |
| NPA-010 | 4426.75 |
| NPA-012 | 11466 |
| NPA-013 | 2098.25 |
| NPA-014 | 3194.25 |
| NPA-015 | 14524 |

TABLE 22
HEK293, 62.5 ng/well

| Formulation | MFI mCherry |
|---|---|
| Untreated | 871.81 |
| NPA-001 | 6407.25 |
| NPA-002 | 14995 |
| NPA-003 | 29499.5 |
| NPA-005 | 3762 |
| NPA-006 | 2676 |
| NPA-007 | 9905.5 |
| NPA-008 | 1648.75 |
| NPA-009 | 2348.25 |
| NPA-010 | 4426.75 |
| NPA-012 | 11466 |
| NPA-013 | 2098.25 |
| NPA-014 | 3194.25 |
| NPA-015 | 14524 |

TABLE 23
HEK293, 62.5 ng/well

| Formulation | MFI mCherry |
|---|---|
| Untreated | 295 |
| NPA-007 | 3504 |
| NPA-012 | 8286 |
| NPA-017 | 6128 |
| NPA-003-2 | 17528 |
| NPA-018 | 34142 |
| NPA-010 | 1095 |
| NPA-015 | 5859 |
| NPA-019 | 3229 |

TABLE 24
HepG2, 62.5 ng/well

| Formulation | MFI mCherry |
|---|---|
| Untreated | 649.94 |
| NPA-001 | 6006.25 |
| NPA-002 | 8705 |
| NPA-002-2 | 15860.25 |
| NPA-003 | 15059.25 |
| NPA-003-2 | 28881 |
| NPA-005 | 1676 |
| NPA-006 | 1473 |
| NPA-007 | 15678 |
| NPA-008 | 2976.25 |
| NPA-009 | 961.75 |
| NPA-010 | 3301.75 |
| NPA-012 | 18333.25 |
| NPA-013 | 5853 |
| NPA-014 | 2257 |
| NPA-015 | 16225.75 |

TABLE 25
HepG2, 62.5 ng/well

| Formulation | MFI mCherry |
|---|---|
| Untreated control | 656 |
| NPA-007 | 16798 |
| NPA-012 | 21993 |
| NPA-017 | 20377 |
| NPA-003-2 | 35651 |
| NPA-018 | 40154 |
| NPA-010 | 2496 |
| NPA-015 | 19741 |
| NPA-019 | 16373 |

### Example 15. In Vivo Formulation Studies

[1196] Rodents (n=5) are administered intravenously, subcutaneously or intramuscularly a single dose of a formulation containing a modified mRNA and a lipid. The modified mRNA administered to the rodents is selected from G-CSF (mRNA sequence shown in SEQ ID NO: 16102; polyA tail of approximately 160 nucleotides not shown in sequence; 5′cap, Cap1), erythropoietin (EPO) (mRNA sequence shown in SEQ ID NO: 16105; polyA tail of approximately 160 nucleotides not shown in sequence: 5′cap, Cap1), Factor IX (mRNA sequence shown in SEQ ID NO: 16106; polyA tail of approximately 160 nucleotides not shown in sequence; 5′cap, Cap1) or mCherry (mRNA sequence shown in SEQ ID NO: 16103; polyA tail of approximately 160 nucleotides not shown in sequence; 5′cap, Cap1). The erythropoietin cDNA with the T7 promoter, 5′untranslated region (UTR) and 3′ UTR used in in vitro transcription (IVT) is given in SEQ ID NO: 16107 and SEQ ID NO: 16108.

[1197] Each formulation also contains a lipid which is selected from one of DLin-DMA, DLin-K-DMA, DLin-KC2-DMA, 98N12-5, C12-200, DLin-MC3-DMA, reLNP, ATUPLEX●, DACC and DBTC. The rodents are injected with 100 ug, 10 ug or 1 ug of the formulated modified mRNA and samples are collected at specified time intervals.

[1198] Serum from the rodents administered formulations containing human G-CSF modified mRNA are measured by specific G-CSF ELISA and serum from mice administered human factor IX modified RNA is analyzed by specific factor IX ELISA or chromogenic assay. The liver and spleen from the mice administered with mCherry modified mRNA are analyzed by immunohistochemistry (IHC) or fluorescence-activated cell sorting (FACS). As a control, a group of mice are not injected with any formulation and their serum and tissue are collected analyzed by ELISA, FACS and/or IHC.

### A. Time Course

[1199] The rodents are administered formulations containing at least one modified mRNA to study the time course of protein expression for the administered formulation. The rodents are bled at specified time intervals prior to and after administration of the modified mRNA formulations to determine protein expression and complete blood count. Samples are also collected from the site of administration of rodents administered modified mRNA formulations subcutaneously and intramuscularly to determine the protein expression in the tissue.

### B. Dose Response

[1200] The rodents are administered formulations containing at least one modified mRNA to determine dose response of each formulation. The rodents are bled at specified time intervals prior to and after administration of the modified mRNA formulations to determine protein expression and complete blood count. The rodents are also scarified to analyze the effect of the modified mRNA formulation on the internal tissue. Samples are also collected from the site of administration of rodents administered modified mRNA formulations subcutaneously and intramuscularly to determine the protein expression in the tissue.

### C. Toxicity

[1201] The rodents are administered formulations containing at least one modified mRNA to study toxicity of each formulation. The rodents are bled at specified time intervals prior to and after administration of the modified mRNA formulations to determine protein expression and complete blood count. The rodents are also sacrificed to analyze the effect of the modified mRNA formulation on the internal tissue. Samples are also collected from the site of administration of rodents administered modified mmRNA formulations subcutaneously and intramuscularly to determine the protein expression in the tissue.

### Example 16. PLGA Microsphere Formulations

[1202] Optimization of parameters used in the formulation of PLGA microspheres may allow for tunable release rates and high encapsulation efficiencies while maintaining the integrity of the modified RNA encapsulated in the microspheres. Parameters such as, but not limited to, particle size, recovery rates and encapsulation efficiency may be optimized to achieve the optimal formulation.

### A. Synthesis of PLGA Microspheres

[1203] Polylacticglycolic acid (PLGA) microspheres were synthesized using the water/oil/water double emulsification methods known in the art using PLGA (Lactel, Cat #B6010-2, inherent viscosity 0.55-0.75, 50:50 LA:GA), polyvinylalcohol (PVA) (Sigma, Cat #348406-25G, MW 13-23 k) dichloromethane and water. Briefly, 0.1 ml of water (W1) was added to 2 ml of PLGA dissolved in dichloromethane (DCM) (O1) at concentrations ranging from 50-200 mg/ml of PLGA. The W1/O1 emulsion was homogenized (IKA Ultra-Turrax Homogenizer, T18) for 30 seconds at speed 4 (˜15,000 rpm). The W1/O1 emulsion was then added to 100 to 200 ml of 0.3 to 1% PVA (W2) and homogenized for 1 minute at varied speeds, Formulations were left to stir for 3 hours and then washed by centrifugation (20-25 min, 4,000 rpm, 4° C.). The supernatant was discarded and the PLGA pellets were resuspended in 5-10 ml of water, which was repeated 2×. Average particle size (represents 20-30 particles) for each formulation was determined by microscopy after washing. Table 26 shows that an increase in the PLGA concentration led to larger sized microspheres. A PLGA concentration of 200 mg/mL gave an average particle size of 14.8 μm, 100 mg/mL was 8.7 μm, and 50 mg/mL of PLGA gave an average particle size of 4.0 μm.

TABLE 26
Varied PLGA Concentration

| | | PLGA | | PVA | | |
|---|---|---|---|---|---|---|
| | O1 | Concen- | W2 | Concen- | | Average |
| Sample | Volume | tration | Volume | tration | | Size |
| ID | (mL) | (mg/mL) | (mL) | (%) | Speed | (μm) |
| 1 | 2 | 200 | 100 | 0.3 | 5 | 14.8 |
| 2 | 2 | 100 | 100 | 0.3 | 5 | 8.7 |
| 3 | 2 | 50 | 100 | 0.3 | 5 | 4.0 |

[1204] Table 27 shows that decreasing the homogenization speed from 5 (˜20,000 rpm) to speed 4 (˜15,000 rpm) led to an increase in particle size from 14.8 am to 29.7 μm.

TABLE 27
Varied Homogenization Speed

| | | PLGA | | PVA | | |
|---|---|---|---|---|---|---|
| | O1 | Concen- | W2 | Concen- | | Average |
| Sample | Volume | tration | Volume | tration | | Size |
| ID | (mL) | (mg/mL) | (mL) | (%) | Speed | (μm) |
| 1 | 2 | 200 | 100 | 0.3 | 5 | 14.8 |
| 4 | 2 | 200 | 100 | 0.3 | 4 | 29.7 |

[1205] Table 28 shows that increasing the W2 volume (i.e. increasing the ratio of W2:O1 from 50:1 to 100:1), decreased average particle size slightly, Altering the PVA concentration from 0.3 to 1 wt % had little impact on PLGA microsphere size.

TABLE 28
Varied W2 Volume and Concentration

| | | PLGA | | PVA | | |
|---|---|---|---|---|---|---|
| | O1 | Concen- | W2 | Concen- | | Average |
| Sample | Volume | tration | Volume | tration | | Size |
| ID | (mL) | (mg/mL) | (mL) | (%) | Speed | (μm) |
| 1 | 2 | 200 | 100 | 0.3 | 5 | 14.8 |
| 5 | 2 | 200 | 200 | 0.3 | 5 | 11.7 |
| 6 | 2 | 200 | 190 | 0.3 | 5 | 11.4 |
| 7 | 2 | 200 | 190 | 1.0 | 5 | 12.3 |

B. Encapsulation of Modified mRNA

[1206] Modified G-CSF mRNA (mRNA sequence shown in SEQ ID NO: 16102; polyA tail of approximately 160 nucleotides not shown in sequence; 5′cap, Cap1; fully modified with 5-methylcytosine and pseudouridine) was dissolved in water at a concentration of 2 mg/ml (W3). Three batches of PLGA microsphere formulations were made as described above with the following parameters: 0.1 ml of W3 at 2 mg/ml, 1.6 ml of O1 at 200 mg/ml, 160 ml of W2 at 1%, and homogenized at a speed of 4 for the first emulsion (W3/O1) and homogenized at a speed of 5 for the second emulsion (W3/O1/W2). After washing by centrifugation, the formulations were frozen in liquid nitrogen and then lyophilized for 3 days. To test the encapsulation efficiency of the formulations, the lyophilized material was deformulated in DCM for 6 hours followed by an overnight extraction in water. The modified RNA concentration in the samples was then determined by OD260. Encapsulation efficiency was calculated by taking the actual amount of modified RNA and dividing by the starting amount of modified RNA. In the three batches tested, there was an encapsulation efficiency of 59.2, 49.8 and 61.3.

C. Integrity of Modified mRNA Encapsulated in PLGA Microspheres

[1207] Modified Factor IX mRNA (mRNA sequence shown in SEQ ID NO: 16106; polyA tail of approximately 160 nucleotides not shown in sequence; 5′cap, Cap1; fully modified with 5-methylcytosine and pseudouridine) was dissolved in water at varied concentrations (W4) to vary the weight percent loading in the formulation (mg modified RNA/mg PLGA*100) and to determine encapsulation efficiency. The parameters in Table 29 were used to make four different batches of PLGA microsphere formulations with a homogenization speed of 4 for the first emulsion (W4/O1) and a homogenization speed of 5 for the second emulsion (W4/O1/W2).

TABLE 29
Factor IX PLGA Microsphere Formulation Parameters

| | | Factor | Factor | | | | | Weight |
|---|---|---|---|---|---|---|---|---|
| | W4 | IX | IX | O1 | PLGA | W2 | PVA | % |
| | Vol. | Conc. | Amount | Vol. | Conc. | Vol. | Conc. | (wt %) |
| ID | (uL) | (mg/ml) | (ug) | (ml) | (mg/ml) | (ml) | (%) | Loading |
| A | 100 | 2.0 | 200.0 | 2.0 | 200 | 200 | 1.0 | 0.05 |
| B | 100 | 4.0 | 400.0 | 2.0 | 200 | 200 | 1.0 | 0.10 |
| C | 400 | 2.0 | 800.0 | 2.0 | 200 | 200 | 1.0 | 0.20 |
| D | 400 | 4.0 | 1600.0 | 2.0 | 200 | 200 | 1.0 | 0.40 |

[1208] After lyophilization, PLGA microspheres were weighed out in 2 ml eppendorf tubes to correspond to ˜10 μg of modified RNA. Lyophilization was found to not destroy the overall structure of the PLGA microspheres. To increase weight percent loading (wt %) for the PLGA microspheres, increasing amounts of modified RNA were added to the samples. PLGA microspheres were deformulated by adding 1.0 ml of DCM to each tube and then shaking the samples for 6 hours. For modified RNA extraction, 0.5 nil of water was added to each sample and the samples were shaken overnight before the concentration of modified RNA in the samples was determined by OD260. To determine the recovery of the extraction process, unformulated Factor IX modified RNA (mRNA sequence shown in SEQ ID NO: 16106; polyA tail of approximately 160 nucleotides not shown in sequence; 5′cap, (Cap1; fully modified with 5-methylcytosine and pseudouridine) (deformulation control) was spiked into DCM and was subjected to the deformulation process. Table 30 shows the loading and encapsulation efficiency for the samples. All encapsulation efficiency samples were normalized to the deformulation control.

TABLE 30
Weight Percent Loading and Encapsulation Efficiency

| | Theoretical | Actual | |
|---|---|---|---|
| | modified RNA | modified RNA | Encapsulation |
| ID | loading (wt %) | loading (wt %) | Efficiency (%) |
| A | 0.05 | 0.06 | 97.1 |
| B | 0.10 | 0.10 | 85.7 |
| C | 0.20 | 0.18 | 77.6 |
| D | 0.40 | 0.31 | 68.1 |
| Control | — | — | 100.0 |

D. Release Study of Modified mRNA Encapsulated in PLGA Microspheres

[1209] PLGA microspheres formulated with Factor IX modified RNA (mRNA sequence shown in SEQ ID NO: 16106; polyA tail of approximately 160E nucleotides not shown in sequence; 5′cap, Cap1; fully modified with 5-methylcytosine and pseudouridine) were deformulated as described above and the integrity of the extracted modified RNA was determined by automated electrophoresis (Bio-Rad Experion). The extracted modified mRNA was compared against unformulated modified mRNA and the deformulation control in order to test the integrity of the encapsulated modified mRNA. As shown in FIG. 4, the majority of modRNA was intact for batch ID A. B, C and D, for the deformulated control (Deform control) and the unformulated control (Uniform control).

E. Protein Expression of Modified mRNA Encapsulated in PIA Microspheres

[1210] PLGA microspheres formulated with Factor IX modified RNA (mRNA sequence shown in SEQ ID NO: 16106: polyA tail of approximately 160 nucleotides not shown in sequence; 5′cap, Cap1; fully modified with 5-methylcytosine and pseudouridine) were deformulated as described above and the protein expression of the extracted modified RNA was determined by an in vitro transfection assay. HEK293 cells were reverse transfected with 250 ng of Factor IX modified RNA complexed with RNAiMAX (Invitrogen) in triplicate.

[1211] Factor IX modified RNA was diluted in nuclease-free water to a concentration of 25 ng/μl and RNAiMAX was diluted 13.3× in serum-free EMEM. Equal volumes of diluted modified RNA and diluted RNAiMAX were mixed together and were allowed to stand for 20 to 30 minutes at room temperature. Subsequently, 20 μl of the transfection mix containing 250 ng of Factor IX modified RNA was added to 80 μl of a cell suspension containing 30,000 cells. Cells were then incubated for 16 h in a humidified 37° C./5% CO2 cell culture incubator before harvesting the cell culture supernatant. Factor IX protein expression in the cell supernatant was analyzed by an ELISA kit specific for Factor IX (Molecular Innovations, Cat # HFIXKT-TOT) and the protein expression is shown in Table 31 and FIG. 5. In all PLGA microsphere batches tested, Factor IX modified RNA remained active and expressed Factor IX protein after formulation in PLGA microspheres and subsequent deformulation.

TABLE 31
Protein Expression

| | Factor IX Protein |
|---|---|
| Sample | Expression (ng/ml) |
| Batch A | 0.83 |
| Batch B | 1.83 |
| Batch C | 1.54 |
| Batch D | 2.52 |
| Deformulated Control | 4.34 |
| Unformulated Control | 3.35 |

F. Release Study of Modified mRNA Encapsulated in PLGA Microspheres

[1212] PLGA microspheres formulated with Factor IX modified RNA (mRNA sequence shown in SEQ ID NO: 16106; polyA tail of approximately 160 nucleotides not shown in sequence; 5′cap, Cap1; fully modified with 5-methylcytosine and pseudouridine) were resuspended in water to a PLGA microsphere concentration of 24 mg/ml. After resuspension, 150 ul of the PLGA microsphere suspension was aliquoted into eppendorf tubes. Samples were kept incubating and shaking at 37° C. during the course of the study. Triplicate samples were pulled at 0.2, 1, 2, 8, 14, and 21 days. To determine the amount of modified RNA released from the PLGA microspheres, samples were centrifuged, the supernatant was removed, and the modified RNA concentration in the supernatant was determined by OD 260. The percent release, shown in Table 32, was calculated based on the total amount of modified RNA in each sample. After 31 days, 96% of the Factor IX modified RNA was released from the PLGA microsphere formulations.

TABLE 32
Percent Release

| Time (days) | % Release |
|---|---|
| 0 | 0.0 |
| 0.2 | 27.0 |
| 1 | 37.7 |
| 2 | 45.3 |
| 4 | 50.9 |
| 8 | 57.0 |
| 14 | 61.8 |
| 21 | 75.5 |
| 31 | 96.4 |

### G. Particle Size Reproducibility of PLGA Microspheres

[1213] Three batches of Factor IX modified RNA (mRNA sequence shown in SEQ ID NO: 16106; polyA tail of approximately 160 nucleotides not shown in sequence; 5′cap, Cap1; fully modified with 5-methylcytosine and pseudouridine) PLGA microspheres were made using the same conditions described for Batch D, shown in Table 29, (0.4 ml of W4 at 4 mg/ml, 2.0 ml of O1 at 200 mg/ml, 200 ml of W2 at 1%, and homogenized at a speed of 5 for the W4/O1/W2 emulsion). To improve the homogeneity of the PLGA microsphere suspension, filtration was incorporated prior to centrifugation. After stirring for 3 hours and before centrifuging, all formulated material was passed through a 100 μm nylon mesh strainer (Fisherbrand Cell Strainer, Cat #22-363-549) to remove larger aggregates. After washing and resuspension with water, 100-200 μl of a PLGA microspheres sample was used to measure particle size of the formulations by laser diffraction (Malvern Mastersizer2000). The particle size of the samples is shown in Table 33.

TABLE 33
Particle Size Summary

| | | | | Volume | |
|---|---|---|---|---|---|
| | | | | Weighted | |
| ID | D10 (μm) | D50 (μm) | D90 (μm) | Mean (um) | Filtration |
| Control | 19.2 | 62.5 | 722.4 | 223.1 | No |
| A | 9.8 | 31.6 | 65.5 | 35.2 | Yes |
| B | 10.5 | 32.3 | 66.9 | 36.1 | Yes |
| C | 10.8 | 35.7 | 79.8 | 41.4 | Yes |

[1214] Results of the 3 PLGA microsphere batches using filtration were compared to a PLGA microsphere batch made under the same conditions without filtration. The inclusion of a filtration step before washing reduced the mean particle size and demonstrated a consistent particle size distribution between 3 PLGA microsphere batches.

### H. Serum Stability of Factor IX PLGA Microspheres

[1215] Factor IX mRNA RNA (mRNA sequence shown in SEQ ID NO: 16106; polyA tail of approximately 160 nucleotides not shown in sequence; 5′cap, Cap1; fully modified with 5-methylcytosine and pseudouridine) in buffer (TE) or 90% serum (Se), or Factor IX mRNA in PLGA in buffer, 90% s^{e}rum or 1% serum was incubated in buffer, 90% serum or 1% serum at an mRNA concentration of 50 ng/μl in a total volume of 70 μl. The samples were removed at 0, 30, 60 or 120 minutes. RNases were inactivated with proteinase K digestion for 20 minutes at 55° C. by adding 25 μl of 4× proteinase K buffer (0.4 ml IM TRIS-HCl pH 7.5, 0.1 ml 0.5M EDTA, 0.12 ml 5M NaCl, and 0.4 ml 10% SDS) and 8 μl of proteinase K at 20 mg/ml. The Factor IX mRNA was precipitated (add 250 μl 95% ethanol for 1 hour, centrifuge for 10 min at 13 k rpm and remove supernatant, add 200 μl 70% ethanol to the pellet, centrifuge again for 5 min at 13 k rpm and remove supernatant and resuspend the pellet in 70 μl water) or extracted from PLGA microspheres (centrifuge 5 min at 13 k rpm and remove supernatant, wash pellet with 1 ml water, centrifuge 5 min at 13 k rpm and remove supernatant, add 280 ul dichloromethane to the pellet and shake for 15 minutes, add 70 ul water and then shake for 2 hours and remove the aqueous phase) before being analyzed by bioanalyzer. PLGA microspheres protect Factor IX modified mRNA from degradation in 90% and 1% serum over 2 hours. Factor IX modified mRNA completely degrades in 90% serum at the initial time point.

### Example 17. Lipid Nanoparticle In Vivo Studies

[1216] G-CSF (cDNA with the T7 promoter, 5′ Untranslated region (UTR) and 3′UTR used in in vitro transcription is given in SEQ ID NO: 1610. mRNA sequence shown in SEQ ID NO: 16102; polyA tail of approximately 160 nucleotides not shown in sequence; 5′cap, Cap 1; fully modified with 5-methylcytosine and pseudouridine) and Factor IX (cDNA with the T7 promoter, 5′ UTR and 3′UTR used in in vitro transcription is given in SEQ ID NO: 16109. mRNA sequence shown in SEQ ID NO: 16106; polyA tail of approximately 160 nucleotides not shown in sequence; 5′cap, Cap 1; fully modified with 5-methylcytosine and pseudouridine) modified mRNA were formulated as lipid nanoparticles (LNPs) using the syringe pump method. The LNPs were formulated at a 20:1 weight ratio of total lipid to modified mRNA with a final lipid molar ratio of 50:10:38.5: 0.5 (DLin-IKC2-DMA: DSPC: Cholesterol: PEG-c-DOIMG). Formulations, listed in Table 34, were characterized by particle size, zeta potential, and encapsulation.

TABLE 34
Formulations

| Formulation # | NPA-029-1 | NPA-030-1 |
|---|---|---|
| Modified mRNA | Factor IX | G-CSF |
| Mean size | 91 nm | 106 nm |
| | PDI: 0.04 | PDI: 0.06 |
| Zeta at pH 7.4 | 1.8 mV | 0.9 mV |
| Encaps. | 92% | 100% |
| (RiboGr) | | |

[1217] LNP formulations were administered to mice (n=5) intravenously at a modified mRNA dose of 100, 10, or 1 ug. Mice were sacrificed at 8 hrs after dosing. Serum was collected by cardiac puncture from mice that were administered with G-CSF or Factor IX modified mRNA formulations. Protein expression was determined by ELISA.

[1218] There was no significant body weight loss (<5%) in the G-CSF or Factor IX dose groups. Protein expression for G-CSF or Factor IX dose groups was determined by ELISA from a standard curve. Serum samples were diluted (about 20-2500× for G-CSF and about 10-250× for Factor IX) to ensure samples were within the linear range of the standard curve. As shown in Table 35, G-CSF protein expression determined by ELISA was approximately 17, 1200, and 4700 ng/ml for the 1, 10, and 100 ug dose groups, respectively. As shown in Table 36, Factor IX protein expression determined by ELISA was approximately 36, 380, and 3000-11000 ng/ml for the 1, 10, and 100 ug dose groups, respectively.

TABLE 35
G-CSF Protein Expression

| Dose (ug) | Conc (ng/ml) | Dilution Factor | Sample Volume |
|---|---|---|---|
| 1 | 17.73 | 20x | 5 ul |
| 10 | 1204.82 | 2500x | 0.04 ul |
| 100 | 4722.20 | 2500x | 0.04 ul |

TABLE 36
Factor IX Protein Expression

| Dose (ug) | Conc (ng/ml) | Dilution Factor | Sample Volume |
|---|---|---|---|
| 1 | 36.05 | 10x | 5 ul |
| 10 | 383.04 | 10x | 5 ul |
| 100* | 3247.75 | 50x | 1 ul |
| 100* | 11177.20 | 250x | 0.2 ul |

[1219] As shown in Table 37, the LNP formulations described above have about a 10,000-100,000-fold increase in protein production compared to an administration of an intravenous (IV)-lipoplex formulation for the same dosage of modified mRNA and intramuscular (IM) or subcutaneous (SC) administration of the same dose of modified mRNA in saline. As used in Table 37, the symbol “˜” means about.

TABLE 37
Protein Production

| | | Serum Concentration (pg/ml) |
|---|---|---|
| G-CSF | Dose (ug) | 8-12 hours after administration |
| IM | 100 | ~20-80 |
| SC | 100 | ~10-40 |
| IV (Lipoplex) | 100 | ~30 |
| IV (LNP) | 100 | ~5,000,000 |
| IV (LNP) | 10 | ~1,000,000 |
| IV (LNP) | 1 | ~20,000 |

| | | Serum Concentration (ng/ml) | |
|---|---|---|---|
| Factor IX | Dose (ug) | 8-12 hours after administration | |
| IM | 2 × 100 | ~1.6 | ng/ml |
| IV (LNP) | 100 | ~3,000-10,000 | ng/ml |
| IV (LNP) | 10 | ~400 | ng/ml |
| IV (LNP) | 1 | ~40 | ng/ml |

### Materials and Methods for Examples 18-23

[1220] G-CSF (mRNA sequence shown in SEQ ID NO: 16102; polyA tail of approximately 160 nucleotides not shown in sequence; 5′cap, Cap 1; fully modified with 5-methylcytosine and pseudouridine) and EPO (r RNA sequence shown in SEQ ID NO: 16105: polyA tail of approximately 160 nucleotides not shown in sequence; 5′cap, Cap 1; fully modified with 5-methylcytosine and pseudouridine) modified mRNA were formulated as lipid nanoparticles (LNPs) using the syringe pump method. The LNPs were formulated at a 20:1 weight ratio of total lipid to modified mRNA with a final lipid molar ratio of 50:10:38.5:1.5 (DLin-.KC2-DMA: DSPC: Cholesterol: PEG-c-DOMG). Formulations, listed in Table 38, were characterized by particle size, zeta potential, and encapsulation.

TABLE 38
Formulations

| Formulation # | NPA-030-2 | NPA-060-1 |
|---|---|---|
| Modified mRNA | G-CSF | EPO |
| Mean size | 84 nm | 85 nm |
| | PDI: 0.04 | PDI: 0.03 |
| Zeta at pH 7.4 | 0.8 mV | 1.5 mV |
| Encapsulation | 95% | 98% |
| (RiboGreen) | | |

### Example 18. Lipid Nanoparticle In Vivo Studies with Modified mRNA

[1221] LNP formulations, shown in Table 38 (above), were administered to rats (n=5) intravenously (IV), intramuscularly (IM) or subcutaneously (SC) at a single modified mRNA dose of 0.05 mg/kg. A control group of rats (n=4) was untreated. The rats were bled at 2 hours, 8 hours, 24 hours, 48 hours and 96 hours and after they were administered with G-CSF or EPO modified mRNA formulations to determine protein expression using ELISA The rats administered EPO modified mRNA intravenously were also bled at 7 days.

[1222] As shown in Table 39, EPO protein expression in the rats intravenously administered modified EPO mRNA was detectable out to 5 day's. G-CSF in the rats intravenously administered modified G-CSF mRNA was detectable to 7 days. Subcutaneous and, intramuscular administration of EPO modified mRNA was detectable to at least 24 hours and G-CSF modified mRNA was detectable to at least 8 hours. In Table 39, “OSC” refers to values that were outside the standard curve and “NT” means not tested.

TABLE 39
G-CSF and EPO Protein Expression

| | | | EPO Serum | G-CSF Serum |
|---|---|---|---|---|
| | | | Concentration | Concentration |
| Route | Time | | (pg/ml) | (pg/ml) |
| IV | 2 | hours | 36,981.0 | 31,331.9 |
| IV | 8 | hours | 62,053.3 | 70,532.4 |
| IV | 24 | hours | 42,077.0 | 5,738.6 |
| IV | 48 | hours | 5,561.5 | 233.8 |
| IV | 5 | days | 0.0 | 60.4 |
| IV | 7 | days | 0.0 | NT |
| IM | 2 | hours | 1395.4 | 1620.4 |
| IM | 8 | hours | 8974.6 | 7910.4 |
| IM | 24 | hours | 4678.3 | 893.3 |
| IM | 48 | hours | NT | OSC |
| IM | 5 | days | NT | OSC |
| SC | 2 | hours | 386.2 | 80.3 |
| SC | 8 | hours | 985.6 | 164.2 |
| SC | 24 | hours | 544.2 | OSC |
| SC | 48 | hours | NT | OSC |
| SC | 5 | days | NT | OSC |

| | | | |
|---|---|---|---|
| Untreated | All bleeds | 0 | 0 |

### Example 19. Time Course In Vivo Study

[1223] LNP formulations, shown in Table 38 (above), were administered to mice (n=5) intravenously (IV) at a single modified mRNA dose of 0.5, 0.05 or 0.005 mg/kg. The mice were bled at 8 hours, 24 hours, 72 hours and 6 days after they were administered with G-CSF or EPO modified mRNA formulations to determine protein expression using ELISA.

[1224] As shown in Table 40, EPO and G-CSF protein expression in the mice administered with the modified mRNA intravenously was detectable out to 72 hours for the mice dosed with 0.005 mg/kg and 0.05 mg/kg of modified mRNA and out to 6 days for the mice administered the EPO modified mRNA. In Table 40, “>” means greater than and “ND” means not detected.

TABLE 40
Protein Expression

| | | | EPO Serum | G-CSF Serum |
|---|---|---|---|---|
| | | | Concentration | Concentration |
| Dose (mg/kg) | Time | | (pg/ml) | (pg/ml) |
| 0.005 | 8 | hours | 12,508.3 | 11,550.6 |
| 0.005 | 24 | hours | 6,803.0 | 5,068.9 |
| 0.005 | 72 | hours | ND | ND |
| 0.005 | 6 | days | ND | ND |
| 0.05 | 8 | hours | 92,139.9 | 462,312.5 |
| 0.05 | 24 | hours | 54,389.4 | 80,903.8 |
| 0.05 | 72 | hours | ND | ND |
| 0.05 | 6 | days | ND | ND |
| 0.5 | 8 | hours | 498,515.3 | >1,250,000 |
| 0.5 | 24 | hours | 160,566.3 | 495,812.5 |
| 0.5 | 72 | hours | 3,492.5 | 1,325.6 |
| 0.5 | 6 | days | 21.2 | ND |

### Example 20. LNP Formulations In Vivo Stud in Rodents

### A. LNP Formulations in Mice

[1225] LNP formulations, shown in Table 38 (above), were administered to mice (n=4) intravenously (IV) at a single modified mRNA dose 0.05 mg/kg or 0.005 mg/kg. There was also 3 control groups of mice (n=4) that were untreated. The mice were bled at 2 hours, 8 hours, 24 hours, 48 hours and 72 hours after they were administered with G-CSF or EPO modified mRNA formulations to determine the protein expression. Protein expression of G-CSF and EPO were determined using ELISA.

[1226] As shown in Table 41, EPO and G-CSF protein expression in the mice was detectable at least out to 48 hours for the mice that received a dose of 0.005 ng/kg modified RNA and 72 hours for the mice that received a dose of 0.05 mg/kg modified RNA. In Table 41, “OSC” refers to values that were outside the standard curve and “NT” means not tested.

TABLE 41
Protein Expression in Mice

| | | | EPO Serum | G-CSF Serum |
|---|---|---|---|---|
| | | | Concentration | Concentration |
| Dose (mg/kg) | Time | | (pg/ml) | (pg/ml) |
| 0.005 | 2 | hours | OSC | 3,447.8 |
| 0.005 | 8 | hours | 1,632.8 | 11,454.0 |
| 0.005 | 24 | hours | 1,141.0 | 4,960.2 |
| 0.005 | 48 | hours | 137.4 | 686.4 |
| 0.005 | 72 | hours | 0 | NT |
| 0.05 | 2 | hours | 10,027.3 | 20,951.4 |
| 0.05 | 8 | hours | 56,547.2 | 70,012.8 |
| 0.05 | 24 | hours | 25,027.3 | 19,356.2 |
| 0.05 | 48 | hours | 1,432.3 | 1,963.0 |
| 0.05 | 72 | hours | 82.2 | 47.3 |

### B. LNP Formulations in Rodents

[1227] LNP formulations, shown in Table 38 (above), are administered to rats (n=:4) intravenously (IV) at a single modified mRNA dose 0.05 mg/kg. There is also a control group of rats (n=4) that are untreated. The rats are bled at 2 hours, 8 hours, 24 hours, 48 hours, 72 hours, 7 days and 14 days after they were administered with G-CSF or EPO modified mRNA formulations to determine the protein expression. Protein expression of G-CSF and EPO are determined using ELISA.

### Example 21. Early Time Course Study of LNPs

[1228] LNP formulations, shown in Table 38 (above), are administered to mammals intravenously (IV), intramuscularly (IM) or subcutaneously (SC) at a single modified mRNA dose of 0.5 mg/kg, 0.05 mg/kg or 0.005 mg/kg. A control group of mammals are not treated. The mammals are bled at 5 minutes, 10 minutes, 20 minutes, 30 minutes, 45 minutes, 1 hour, 1.5 hours and/or 2 hours after they are administered with the modified mRNA LNP formulations to determine protein expression using ELISA. The mammals are also bled to determine the complete blood count such as the granulocyte levels and red blood cell count.

### Example 22. Non-Human Primate In Vivo Study

[1229] LNP formulations, shown in Table 38 (above), were administered to non-human primates (NHP) (cynomolgus monkey) (n:=2) as a bolus intravenous injection (IV) over approximately 30 seconds using a hypodermic needle, which may be attached to a syringe/abbocath or butterfly if needed. The NHP were administered a single modified mRNA IV dose of 0.05 mg/kg of EPO or G-CSF or 0.005 mg/kg of EPO in a dose volume of 0.5 mL/kg. The NHPs were bled 5-6 days before dosing with the modified mRNA LNP formulations to determine protein expression in the serum and a baseline complete blood count. After administration with the modified mRNA formulation the NHP were bled at 8, 24, 48 and 72 hours to determined protein expression. At 24 and 72 hours after administration the complete blood count of the NHP was also determined. Protein expression of G-CSF and EPO was determined by ELISA. Urine from the N-IPs was collected over the course of the entire experiment and analyzed to evaluate clinical safety. Samples were collected from the NHPs after they were administered with G-CSF or EPO modified mRNA formulations to determine protein expression using ELISA. Clinical chemistry, hematology, urinalysis and cytokines of the non-human primates were also analyzed.

[1230] As shown in Table 42, EPO protein expression in the NHPs administered 0.05 mg/kg is detectable out to 72 hours and the 0,005 mg/kg dosing of the EPO formulation is detectable out to 48 hours. In Table 42, the “<” means less than a given value. G-CSF protein expression was seen out to 24 hours after administration with the modified mRNA formulation. Preliminarily, there was an increase in granulocytes and reticulocytes levels seen in the NHP after administration with the modified mRNA formulations.

TABLE 42
Protein Expression in Non-Human Primates

| | | | Female NHP | Male NHP | Average |
|---|---|---|---|---|---|
| | | | Serum | Serum | Serum |
| | | | Concen- | Concen- | Conen- |
| Modified | Dose | | tration | tration | tration |
| mRNA | (mg/kg) | Time | (pg/ml) | (pg/ml) | (pg/ml) |
| G-CSF | 0.05 | Pre-bleed | 0 | 0 | 0 |
| | | 8 hours | 3289 | 1722 | 2,506 |
| | | 24 hours | 722 | 307 | 515 |
| | | 48 hours | 0 | 0 | 0 |
| | | 72 hours | 0 | 0 | 0 |
| EPO | 0.05 | Pre-bleed | 0 | 0 | 0 |
| | | 8 hours | 19,858 | 7,072 | 13,465 |
| | | 24 hours | 18,178 | 4,913 | 11,546 |
| | | 48 hours | 5,291 | 498 | 2,895 |
| | | 72 hours | 744 | 60 | 402 |
| EPO | 0.005 | Pre-bleed | 0 | 0 | 0 |
| | | 8 hours | 523 | 250 | 387 |
| | | 24 hours | 302 | 113 | 208 |
| | | 48 hours | <7.8 | <7.8 | <7.8 |
| | | 72 hours | 0 | 0 | 0 |

### Example 23. Non-Human Primate In Vivo Study for G-CSF and EPO

[1231] LNP formulations, shown in Table 38 (above), were administered to non-human primates (NHP) (cynomolgus monkey) (n==2) as intravenous injection (IV). The NU P were administered a single modified mRNA IV dose of 0.5 mg/kg, 0.05 mg/kg or 0.005 mg/kg of G-CSF or EPO in a dose volume of 0.5 mL/kg. The NHPs were bled before dosing—with the modified mRNA LNP formulations to determine protein expression in the serum and a baseline complete blood count. After administration with the G-CSF modified RNA formulation the NHP were bled at 8, 24, 48 and 72 hours to determined protein expression. After administration with the EPO modified mRNA formulation the NHP were bled at 8, 24, 48, 72 hours and 7 days to determined protein expression.

[1232] Samples collected from the NHPs after they were administered with G-CSF or EPO modified mRNA formulations were analyzed by ELIS A to determine protein expression, Neutrophil and reticulocyte count was also determined pre-dose, 24 hours, 3 days, 7 days, 14 days and 18 days after administration of the modified G-CSF or EPO formulation.

[1233] As shown in Table 43, G-CSF protein expression was not detected beyond 72 hours. In Table 43, “<39” refers to a value below the lower limit of detection of 39 pg/ml.

TABLE 43
G-CSF Protein Expression

| | | | Female NHP | Male NHP |
|---|---|---|---|---|
| | | | Serum G-CSF | Serum G-CSF |
| Modified | Dose | | Concentration | Concentration |
| mRNA | (mg/kg) | Time | (pg/ml) | (pg/ml) |
| G-CSF | 0.5 | Pre-bleed | <39 | <39 |
| | | 8 hours | 43,525 | 43,594 |
| | | 24 hours | 11,374 | 3,628 |
| | | 48 hours | 1,100 | 833 |
| | | 72 hours | <39 | 306 |
| G-CSF | 0.05 | Pre-bleed | <39 | <39 |
| | | 8 hours | 3,289 | 1,722 |
| | | 24 hours | 722 | 307 |
| | | 48 hours | <39 | <39 |
| | | 72 hours | <39 | <39 |
| G-CSF | 0.005 | Pre-bleed | <39 | <39 |
| | | 8 hours | 559 | 700 |
| | | 24 hours | 155 | <39 |
| | | 48 hours | <39 | <39 |
| | | 72 hours | <39 | <39 |

[1234] As shown in Table 44, EPO protein expression was not detected beyond 7 days. In Table 44, “<7.8” refers to a value below the lower limit of detection, of 7.8 pg/ml.

TABLE 44
EPO Protein Expression

| | | | Female NHP | Male NHP |
|---|---|---|---|---|
| | | | Serum EPO | Serum EPO |
| Modified | Dose | | Concentration | Concentration |
| mRNA | (mg/kg) | Time | (pg/ml) | (pg/ml) |
| EPO | 0.5 | Pre-bleed | <7.8 | <7.8 |

| | | | |
|---|---|---|---|
| 8 | hours | 158,771 | 119,086 |
| 24 | hours | 133,978 | 85,825 |
| 48 | hours | 45,250 | 64,793 |
| 72 | hours | 15,097 | 20,407 |
| 7 | days | <7.8 | <7.8 |

| | | | | |
|---|---|---|---|---|
| EPO | 0.05 | Pre-bleed | <7.8 | <7.8 |

| | | | |
|---|---|---|---|
| 8 | hours | 19,858 | 7,072 |
| 24 | hours | 18,187 | 4,913 |
| 48 | hours | 5,291 | 498 |
| 72 | hours | 744 | 60 |
| 7 | days | <7.8 | <7.8 |

| | | | | |
|---|---|---|---|---|
| EPO | 0.005 | Pre-bleed | <7.8 | <7.8 |

| | | | |
|---|---|---|---|
| 8 | hours | 523 | 250 |
| 24 | hours | 302 | 113 |
| 48 | hours | 11 | 29 |
| 72 | hours | <7.8 | <7.8 |
| 7 | days | <7.8 | <7.8 |

[1235] As shown in Table 45, there was an increase in neutrophils in all G-CSF groups relative to pre-dose levels.

TABLE 45
Pharmacologic Effect of G-CSF mRNA in NHP

| | | | Male NHP | Female NHP | Male NHP | Female NHP |
|---|---|---|---|---|---|---|
| | | | (G-CSF) | (G-CSF) | (EPO) | (EPO) |
| Dose | | | Neutrophils | Neutrophils | Neutrophils | Neutrophils |
| (mg/kg) | Time | | (10⁹/L) | (10⁹/L) | (10⁹/L) | (10⁹/L) |
| 0.5 | Pre-dose | | 1.53 | 1.27 | 9.72 | 1.82 |
| | 24 | hours | 14.92 | 13.96 | 7.5 | 11.85 |
| | 3 | days | 9.76 | 13.7 | 11.07 | 5.22 |
| | 7 | days | 2.74 | 3.81 | 11.8 | 2.85 |
| | 14/18 | days | 2.58 | 1.98 | 7.16 | 2.36 |
| 0.05 | Pre-dose | | 13.74 | 3.05 | 0.97 | 2.15 |
| | 24 | hours | 19.92 | 29.91 | 2.51 | 2.63 |
| | 3 | days | 7.49 | 10.77 | 1.73 | 4.08 |
| | 7 | days | 4.13 | 3.8 | 1.23 | 2.77 |
| | 14/18 | days | 3.59 | 1.82 | 1.53 | 1.27 |
| 0.005 | Pre-dose | | 1.52 | 2.54 | 5.46 | 5.96 |
| | 24 | hours | 16.44 | 8.6 | 5.37 | 2.59 |
| | 3 | days | 3.74 | 1.78 | 6.08 | 2.83 |
| | 7 | days | 7.28 | 2.27 | 3.51 | 2.23 |
| | 14/18 | days | 4.31 | 2.28 | 1.52 | 2.54 |

[1236] As shown in Table 46, there was an increase in reticulocytes in all EPO groups 3 days to 14/18 days after dosing relative to reticulocyte levels 24 hours after dosing.

TABLE 46
Pharmacologic Effect of EPO mRNA on Neutrophil Count

| | | | Male NHP | Female NHP | Male NHP | Female NHP |
|---|---|---|---|---|---|---|
| | | | (G-CSF) | (G-CSF) | (EPO) | (EPO) |
| Dose | | | Neutrophils | Neutrophils | Neutrophils | Neutrophils |
| (mg/kg) | Time | | (10¹²/L) | (10¹²/L) | (10¹²/L) | (10¹²/L) |
| 0.5 | Pre-dose | | 0.067 | 0.055 | 0.107 | 0.06 |
| | 24 | hours | 0.032 | 0.046 | 0.049 | 0.045 |
| | 3 | days | 0.041 | 0.017 | 0.09 | 0.064 |
| | 7 | days | 0.009 | 0.021 | 0.35 | 0.367 |
| | 14/18 | days | 0.029 | 0.071 | 0.066 | 0.071 |
| 0.05 | Pre-dose | | 0.055 | 0.049 | 0.054 | 0.032 |
| | 24 | hours | 0.048 | 0.046 | 0.071 | 0.04 |
| | 3 | days | 0.101 | 0.061 | 0.102 | 0.105 |
| | 7 | days | 0.157 | 0.094 | 0.15 | 0.241 |
| | 14/18 | days | 0.107 | 0.06 | 0.067 | 0.055 |
| 0.005 | Pre-dose | | 0.037 | 0.06 | 0.036 | 0.052 |
| | 24 | hours | 0.037 | 0.07 | 0.034 | 0.061 |
| | 3 | days | 0.037 | 0.054 | 0.079 | 0.118 |
| | 7 | days | 0.046 | 0.066 | 0.049 | 0.087 |
| | 14/18 | days | 0.069 | 0.057 | 0.037 | 0.06 |

[1237] As shown in Tables 47-49, the administration of EPO modified RNA had an effect on other erythropoietic parameters including hemoglobin (HGB), hematocrit (HCT) and red blood cell (RBC) count.

TABLE 47
Pharmacologic Effect of EPO mRNA on Hemoglobin

| Dose | | | Male NHP (G- | Female NHP (G- | Male NHP (EPO) | Female NHP (EPO) |
|---|---|---|---|---|---|---|
| (mg/kg) | Time | | CSF) HGB (g/L) | CSF) HGB (g/L) | HGB (g/L) | HGB (g/L) |
| 0.5 | Pre-dose | | 133 | 129 | 134 | 123 |
| | 24 | hours | 113 | 112 | 127 | 108 |
| | 3 | days | 118 | 114 | 126 | 120 |
| | 7 | days | 115 | 116 | 140 | 134 |
| | 14/18 | days | 98 | 113 | 146 | 133 |
| 0.05 | Pre-dose | | 137 | 129 | 133 | 133 |
| | 24 | hours | 122 | 117 | 123 | 116 |
| | 3 | days | 126 | 115 | 116 | 120 |
| | 7 | days | 126 | 116 | 126 | 121 |
| | 14/18 | days | 134 | 123 | 133 | 129 |
| 0.005 | Pre-dose | | 128 | 129 | 132 | 136 |
| | 24 | hours | 117 | 127 | 122 | 128 |
| | 3 | days | 116 | 127 | 125 | 130 |
| | 7 | days | 116 | 129 | 119 | 127 |
| | 14/18 | days | 118 | 129 | 128 | 129 |

TABLE 48
Pharmacologic Effect of EPO mRNA on Hematocrit

| Dose | | | Male NHP (G- | Female NHP (G- | Male NHP (EPO) | Female NHP (EPO) |
|---|---|---|---|---|---|---|
| (mg/kg) | Time | | CSF) HCT (L/L) | CSF) HCT (L/L) | HCT (L/L) | HCT (L/L) |
| 0.5 | Pre-dose | | 0.46 | 0.43 | 0.44 | 0.4 |
| | 24 | hours | 0.37 | 0.38 | 0.4 | 0.36 |
| | 3 | days | 0.39 | 0.38 | 0.41 | 0.39 |
| | 7 | days | 0.39 | 0.38 | 0.45 | 0.45 |
| | 14/18 | days | 0.34 | 0.37 | 0.48 | 0.46 |
| 0.05 | Pre-dose | | 0.44 | 0.44 | 0.45 | 0.43 |
| | 24 | hours | 0.39 | 0.4 | 0.43 | 0.39 |
| | 3 | days | 0.41 | 0.39 | 0.38 | 0.4 |
| | 7 | days | 0.42 | 0.4 | 0.45 | 0.41 |
| | 14/18 | days | 0.44 | 0.4 | 0.46 | 0.43 |
| 0.005 | Pre-dose | | 0.42 | 0.42 | 0.48 | 0.45 |
| | 24 | hours | 0.4 | 0.42 | 0.42 | 0.43 |
| | 3 | days | 0.4 | 0.41 | 0.44 | 0.42 |
| | 7 | days | 0.39 | 0.42 | 0.41 | 0.42 |
| | 14/18 | days | 0.41 | 0.42 | 0.42 | 0.42 |

TABLE 49
Pharmacologic Effect of EPO mRNA on Red Blood Cells

| | | | Male NHP (G- | Female NHP (G- | | |
|---|---|---|---|---|---|---|
| Dose | | | CSF) RBC | CSF) RBC | Male NHP (EPO) | Female NHP (EPO) |
| (mg/kg) | Time | | (10¹²/L) | (10¹²/L) | RBC (10¹²/L) | RBC (10¹²/L) |
| 0.5 | Pre-dose | | 5.57 | 5.57 | 5.43 | 5.26 |
| | 24 | hours | 4.66 | 4.96 | 5.12 | 4.69 |
| | 3 | days | 4.91 | 4.97 | 5.13 | 5.15 |
| | 7 | days | 4.8 | 5.04 | 5.55 | 5.68 |
| | 14/18 | days | 4.21 | 4.92 | 5.83 | 5.72 |
| 0.05 | Pre-dose | | 5.68 | 5.64 | 5.57 | 5.84 |
| | 24 | hours | 4.96 | 5.08 | 5.25 | 5.18 |
| | 3 | days | 5.13 | 5.04 | 4.81 | 5.16 |
| | 7 | days | 5.17 | 5.05 | 5.37 | 5.31 |
| | 14/18 | days | 5.43 | 5.26 | 5.57 | 5.57 |
| 0.005 | Pre-dose | | 5.67 | 5.36 | 6.15 | 5.72 |
| | 24 | hours | 5.34 | 5.35 | 5.63 | 5.35 |
| | 3 | days | 5.32 | 5.24 | 5.77 | 5.42 |
| | 7 | days | 5.25 | 5.34 | 5.49 | 5.35 |
| | 14/18 | days | 5.37 | 5.34 | 5.67 | 5.36 |

[1238] As shown in Tables 50 and 51, the administration of modified RNA had an effect on serum chemistry parameters including alanine transaminase (ALT) and aspartate transaminase (AST).

TABLE 50
Pharmacologic Effect of EPO mRNA on Alanine Transaminase

| Dose | | | Male NHP (G- | Female NHP (G- | Male NHP (EPO) | Female NHP (EPO) |
|---|---|---|---|---|---|---|
| (mg/kg) | Time | | CSF) ALT (U/L) | CSF) ALT (U/L) | ALT (U/L) | ALT (U/L) |
| 0.5 | Pre-dose | | 29 | 216 | 50 | 31 |
| | 2 | days | 63 | 209 | 98 | 77 |
| | 4 | days | 70 | 98 | 94 | 87 |
| | 7 | days | 41 | 149 | 60 | 59 |
| | 14 | days | 43 | 145 | 88 | 44 |
| 0.05 | Pre-dose | | 58 | 53 | 56 | 160 |
| | 2 | days | 82 | 39 | 95 | 254 |
| | 4 | days | 88 | 56 | 70 | 200 |
| | 7 | days | 73 | 73 | 64 | 187 |
| | 14 | days | 50 | 31 | 29 | 216 |
| 0.005 | Pre-dose | | 43 | 51 | 45 | 45 |
| | 2 | days | 39 | 32 | 62 | 48 |
| | 4 | days | 48 | 58 | 48 | 50 |
| | 7 | days | 29 | 55 | 21 | 48 |
| | 14 | days | 44 | 46 | 43 | 51 |

TABLE 51
Pharmacologic Effect of EPO mRNA on Aspartate Transaminase

| Dose | | | Male NHP (G- | Female NHP (G- | Male NHP (EPO) | Female NHP (EPO) |
|---|---|---|---|---|---|---|
| (mg/kg) | Time | | CSF) AST (U/L) | CSF) AST (U/L) | AST (U/L) | AST (U/L) |
| 0.5 | Pre-dose | | 32 | 47 | 59 | 20 |
| | 2 | days | 196 | 294 | 125 | 141 |
| | 4 | days | 67 | 63 | 71 | 60 |
| | 7 | days | 53 | 68 | 56 | 47 |
| | 14 | days | 47 | 67 | 82 | 44 |
| 0.05 | Pre-dose | | 99 | 33 | 74 | 58 |
| | 2 | days | 95 | 34 | 61 | 80 |
| | 4 | days | 69 | 42 | 48 | 94 |
| | 7 | days | 62 | 52 | 53 | 78 |
| | 14 | days | 59 | 20 | 32 | 47 |
| 0.005 | Pre-dose | | 35 | 54 | 39 | 40 |
| | 2 | days | 70 | 34 | 29 | 25 |
| | 4 | days | 39 | 36 | 43 | 55 |
| | 7 | days | 28 | 31 | 55 | 31 |
| | 14 | days | 39 | 20 | 35 | 54 |

[1239] As shown in Table 52, the administration of lipid nanoparticle-formulated modified RNA at high doses (0.5 mg/kg) caused an increase in cytokines, interferon-alpha (IFN-alpha) after administration of modified mRNA.

TABLE 52
Pharmacologic Effect of EPO mRNA on Alanine Transaminase

| | | Male NHP (G- | Female NHP (G- | Male NHP (EPO) | Female NHP (EPO) |
|---|---|---|---|---|---|
| Dose | | CSF) IFN-alpha | CSF) IFN-alpha | IFN-alpha | IFN-alpha |
| (mg/kg) | Time | (pg/mL) | (pg/mL) | (pg/mL) | (pg/mL) |
| 0.5 | Pre-dose | 0 | 0 | 0 | 0 |
| | Day 1 + 8 hr | 503.8 | 529.2 | 16.79 | 217.5 |
| | 4 days | 0 | 0 | 0 | 0 |
| 0.05 | Pre-dose | 0 | 0 | 0 | 0 |
| | Day 1 + 8 hr | 0 | 0 | 0 | 0 |
| | 4 days | 0 | 0 | 0 | 0 |
| 0.005 | Pre-dose | 0 | 0 | 0 | 0 |
| | Day 1 + 8 hr | 0 | 0 | 0 | 0 |
| | 4 days | 0 | 0 | 0 | 0 |

### Example 24. Stud of Intramuscular and/or Subcutaneous Administration in Non-Human Primates

[1240] Formulations containing modified EPO mRNA (mRNA sequence shown in SEQ ID NO: 16105; polyA tail of approximately 160 nucleotides not shown in sequence; 5′cap, Cap1; fully modified with 5-methylcytosine and pseudouridine) or G-CSF mRNA (mRNA sequence shown in SEQ ID NO: 16102; polyA tail of approximately 160 nucleotides not shown in sequence; 5′cap, Cap1; fully modified with 5-methylcytosine and pseudouridine) in saline were administered to non-human primates (Cynomolgus monkey) (NHP) intramuscularly (IM) or subcutaneously (SC). The single modified mRNA dose of 0.05 mg/kg or 0.005 mg/kg was in a dose volume of 0.5 mL/kg. The non-human primates are bled 5-6 days prior to dosing to determine serum protein concentration and a baseline complete blood count. After administration with the modified mRNA formulation the NHP are bled at 8 hours, 24 hours, 48 hours, 72 hours, 7 days and 14 days to determined protein expression. Protein expression of G-CSF and EPO is determined by ELISA. At 24 hours, 72 hours, 7 days and 14 days after administration the complete blood count of the NHP is also determined. Urine from the NHPs is collected over the course of the entire experiment and analyzed to evaluate clinical safety. Tissue near the injection site is also collected and analyzed to determine protein expression.

### Example 25. Modified mRNA Trafficking

[1241] In order to determine localization and/or trafficking of the modified mRNA, studies may be performed as follows.

[1242] LNP formulations of siRNA and modified mRNA are formulated according to methods known in the art and/or described herein. The LNP formulations may include at least one modified mRNA which may encode a protein such as G-CSF, EPO, Factor VII, and/or any protein described herein. The formulations may be administered locally into muscle of mammals using intramuscular or subcutaneous injection. The dose of modified mRNA and the size of the LNP may be varied to determine the effect on trafficking in the body of the mammal and/or to assess the impact on a biologic reaction such as, but not limited to, inflammation. The mammal may be bled at different time points to determine the expression of protein encoded by the modified mRNA administered present in the serum and/or to determine the complete blood count in the mammal.

[1243] For example, modified mRNA encoding Factor VII, expressed in the liver and secreted into the serum, may be administered intramuscularly and/or subcutaneously. Coincident or prior to modified mRNA administration, siRNA is administered to knock out endogenous Factor VII. Factor VII arising from the intramuscular and/or subcutaneous injection of modified mRNA is administered is measured in the blood. Also, the levels of Factor VII is measured in the tissues near the injection site. If Factor VII is expressed in blood then there is trafficking of the modified mRNA. If Factor VII is expressed in tissue and not in the blood than there is only local expression of Factor VII.

### Example 26. Formulations of Multiple Modified mRNA

[1244] LNP formulations of modified mRNA are formulated according to methods known in the art and/or described herein or known in the art. The LNP formulations may include at least one modified mRNA which may encode a protein such as G-CSF, EPO, thrombopoietin and/or any protein described herein. The at least one modified mRNA may include 1, 2, 3, 4 or 5 modified mRNA molecules. The formulations containing at least one modified mRNA may be administered intravenously, intramuscularly or subcutaneously in a single or multiple dosing regimens. Biological samples such as, but not limited to, blood and/or serum may be collected and analyzed at different time points before and/or after administration of the at least one modified mRNA formulation. An expression of a protein in a biological sample of 50-200 μg/mli after the mammal has been administered a formulation containing at least one modified mRNA encoding said protein would be considered biologically effective.

### Example 27. Polyethylene Glycol Ratio Studies

### A. Formulation and Characterization of PEG LNPs

[1245] Lipid nanoparticles (LNPs) were formulated using the syringe pump method. The LNPs were formulated at a 20:1 weight ratio of total lipid to modified G-CSF mRNA (mRNA sequence shown in SEQ ID NO: 16102; polyA tail of approximately 160 nucleotides not shown in sequence; 5′cap, Cap1; fully modified with 5-methylcytosine and pseudouridine). The molar ratio ranges of the formulations are shown in Table 53.

TABLE 53
Molar Ratios

| | DLin-KC2-DMA | DSPC | Cholesterol | PEG-c-DOMG |
|---|---|---|---|---|
| Mole Percent | 50.0 | 10.0 | 37-38.5 | 1.5-3 |
| (mol %) | | | | |

[1246] Two types of PEG lipid, 1,2-Dimyristoyl-sn-glycerol, methoxypolyethylene Glycol (PEG-DMG, NOF Cat #SUNBRIGHT● GM-020) and 1,2-Distearoyl-sn-glycerol, methoxypolyethylene Glycol (PEG-DSG, NOF Cat #SUNBRIGHT● GS-020), were tested at 1.5 or 3.0 mol %. After the formation of the LNPs and the encapsulation of the modified G-CSF mRNA, the LNP formulations were characterized by particle size, zeta potential and encapsulation percentage and the results are shown in Table 54.

TABLE 54
Characterization of LNP Formulations

| | Formulation No. | | | |
|---|---|---|---|---|
| | NPA-071-1 | NPA-072-1 | NPA-073-1 | NPA-074-1 |
| Lipid | PEG-DMG | PEG-DMG | PEG-DSA | PEG-DSA |
| | 1.5% | 3% | 1.5% | 3% |
| Mean Size | 95 nm | 85 nm | 95 nm | 75 nm |
| | PDI: 0.01 | PDI: 0.06 | PDI: 0.08 | PDI: 0.08 |
| Zeta at pH 7.4 | −1.1 mV | −2.6 mV | 1.7 mV | 0.7 mV |
| Encapsulation | 88% | 89% | 98% | 95% |
| (RiboGreen) | | | | |

### B. In Vivo Screening of PEG LNP

[1247] Formulations of the PEG LNPs described in Table 55 were administered to mice (n=5) intravenously at a dose of 0.5 mg/kg. Serum was collected from the mice at 2 hours, 8 hours, 24 hours, 48 hours, 72 hours and 8 days after administration of the formulation. The serum was analyzed by ELISA to determine the protein expression of G-CSF and the expression levels are shown in Table 55. LNP formulations using PEG-DMG gave substantially higher levels of protein expression than LNP formulations with PEG-DMG

TABLE 55
Protein Expression

| | | | | Protein |
|---|---|---|---|---|
| | Formulation | | | Expression |
| Lipid | No. | Time | | (pg/ml) |
| PEG-DMG, | NPA-071-1 | 2 | hours | 114,102 |
| 1.5% | | 8 | hours | 357,944 |
| | | 24 | hours | 104,832 |
| | | 48 | hours | 6,697 |
| | | 72 | hours | 980 |
| | | 8 | days | 0 |
| PEG-DMG, | NPA-072-1 | 2 | hours | 154,079 |
| 3% | | 8 | hours | 354,994 |
| | | 24 | hours | 164,311 |
| | | 48 | hours | 13,048 |
| | | 72 | hours | 1,182 |
| | | 8 | days | 13 |
| PEG-DSA, | NPA-073-1 | 2 | hours | 3,193 |
| 1.5% | | 8 | hours | 6,162 |
| | | 24 | hours | 446 |
| | | 48 | hours | 197 |
| | | 72 | hours | 124 |
| | | 8 | days | 5 |
| PEG-DSA, | NPA-074-1 | 2 | hours | 259 |
| 3% | | 8 | hours | 567 |
| | | 24 | hours | 258 |
| | | 48 | hours | 160 |
| | | 72 | hours | 328 |
| | | 8 | days | 33 |

### Example 28. Cationic Lipid Formulation Studies

### A. Formulation and Characterization of Cationic Lipid Nanoparticles

[1248] Lipid nanoparticles (LNPs) were formulated using the syringe pump method. The LNPs were formulated at a 20:1 weight ratio of total lipid to modified mRNA. The final lipid molar ratio ranges of cationic lipid, DSPC, cholesterol and PEG-c-DOMG are outlined in Table 56.

TABLE 56
Molar Ratios

| | Cationic Lipid | DSPC | Cholesterol | PEG-c-DOMG |
|---|---|---|---|---|
| Mole Percent | 50.0 | 10.0 | 38.5 | 1.5 |
| (mol %) | | | | |

[1249] A 25 mM lipid solution in ethanol and modified RNA in 50 mM citrate at a pH of 3 were mixed to create spontaneous vesicle formation. The vesicles were stabilized in ethanol before the ethanol was removed and there was a buffer exchange by dialysis. The LNPs were then characterized by particle size, zeta potential, and encapsulation percentage. Table 57 describes the characterization of LNPs encapsulating EPO modified mRNA (mRNA sequence shown in SEQ ID NO: 16105 polyA tail of approximately 160 nucleotides not shown in sequence; 5′cap, Cap1; fully modified with 5-methylcytosine and pseudouridine) or G-CSF modified mRNA (mRNA sequence shown in SEQ ID NO: 16102; polyA tail of approximately 160 nucleotides not shown in sequence; 5′cap, Cap1; fully modified with 5-methylcytosine and pseudouridine) using DLin-MC3-DMA, DLin-DMA or C12-200 as the cationic lipid.

TABLE 57
Characterization of Cationic Lipid Formulations

| Formulation No. | NPA-071-1 | | NPA-072-1 | | NPA-073-1 | | NPA-074-1 | | NPA-075-1 | | NPA-076-1 | |
|---|---|---|---|---|---|---|---|---|---|---|---|---|
| Lipid | DLin-MC3- | | DLin-MC3- | | DLin-DMA | | DLin-DMA | | C12-200 | | C12-200 | |
| | DMA | | DMA | | | | | | | | | |
| Modified | EPO | | G-CSF | | EPO | | G-CSF | | EPO | | G-CSF | |
| RNA | | | | | | | | | | | | |
| Mean Size | 89 | nm | 96 | nm | 70 | nm | 73 | nm | 97 | nm | 103 | nm |
| | PDI: 0.07 | | PDI: 0.08 | | PDI: 0.04 | | PDI: 0.06 | | PDI: 0.05 | | PDI: 0.09 | |
| Zeta at pH 7.4 | −1.1 | mV | −1.4 | mV | −1.6 | mV | −0.4 | mV | 1.4 | mV | 0.9 | mV |

| | | | | | | |
|---|---|---|---|---|---|---|
| Encapsulation | 100% | 100% | 99% | 100% | 88% | 98% |
| (RiboGreen) | | | | | | |

### B. In Vivo Screening of Cationic LNP Formulations

[1250] Formulations of the cationic lipid formulations described in Table 57 were administered to mice (n=5) intravenously at a dose of 0.5 mg/kg. Serum was collected from the mice at 2 hours, 24 hours, 72 hours and/or 7 days after administration of the formulation. The serum was analyzed by ELISA to determine the protein expression of EPO-) or G-CSF and the expression levels are shown in Table 58

TABLE 58
Protein Expression

| | | | Protein |
|---|---|---|---|
| Modified | Formulation | | Expression |
| mRNA | No. | Time | (pg/ml) |
| EPO | NPA-071-1 | 2 hours | 304,190.0 |
| | | 24 hours | 166,811.5 |
| | | 72 hours | 1,356.1 |
| | | 7 days | 20.3 |
| EPO | NPA-073-1 | 2 hours | 73,852.0 |
| | | 24 hours | 75,559.7 |
| | | 72 hours | 130.8 |
| EPO | NPA-075-1 | 2 hours | 413,010.2 |
| | | 24 hours | 56,463.8 |
| G-CSF | NPA-072-1 | 2 hours | 62,113.1 |
| | | 24 hours | 53,206.6 |
| G-CSF | NPA-074-1 | 24 hours | 25,059.3 |
| G-CSF | NPA-076-1 | 2 hours | 219,198.1 |
| | | 24 hours | 8,470.0 |

[1251] Toxicity was seen in the mice administered the LNPs formulations with the cationic lipid C12-200 (NPA-075-1 and NPA-076-1) and they were sacrificed at 24 hours because they showed symptoms such as scrubby fur, cowering behavior and weight loss of greater than 10%. C12-200 was expected to be more toxic but also had a high level of expression over a short period. The cationic lipid DLin-DMA (NPA-073-1 and NPA-074-1) had the lowest expression out of the three cationic lipids tested. DLin-MC3-DMA (NPA-071-1 and NPA-072-1) showed good expression up to day three and was above the background sample out to day 7 for EPO formulations.

### Example 29. Method of Screening for Protein Expression

### A. Electrospray Ionization

[1252] A biological sample which may contain proteins encoded by modified RNA administered to the subject is prepared and analyzed according to the manufacturer protocol for electrospray ionization (ESI) using 1, 2, 3 or 4 mass analyzers. A biologic sample may also be analyzed using a tandem ESI mass spectrometry system. Patterns of protein fragments, or whole proteins, are compared to known controls for a given protein and identity is determined by comparison.

### B. Matrix-Assisted Laser Desorption/Ionization

[1253] A biological sample which may contain proteins encoded by modified RNA administered to the subject is prepared and analyzed according to the manufacturer protocol for matrix-assisted laser desorption/ionization (MALDI).

[1254] Patterns of protein fragments, or whole proteins, are compared to known controls for a given protein and identity is determined by comparison.

### C. Liquid Chromatography-Mass Spectrometry-Mass Spectrometry

[1255] A biological sample, which may contain proteins encoded by modified RNA, may be treated with a trypsin enzyme to digest the proteins contained within. The resulting peptides are analyzed by liquid chromatography-mass spectrometry-mass spectrometry (LC/MS/MS). The peptides are fragmented in the mass spectrometer to yield diagnostic patterns that can be matched to protein sequence databases via computer algorithms. The digested sample may be diluted to achieve 1 ng or less starting material for a given protein. Biological samples containing a simple buffer background (e.g. water or volatile salts) are amenable to direct in-solution digest; more complex backgrounds (e.g. detergent, non-volatile salts, glycerol) require an additional clean-up step to facilitate the sample analysis.

[1256] Patterns of protein fragments, or whole proteins, are compared to known controls for a given protein and identity is determined by comparison.

### Example 30. Lipid Nanoparticle In Vivo Studies

[1257] mCherry mRNA (mRNA sequence shown in SEQ ID NO: 161 10; polyA tail of approximately 160 nucleotides not shown in sequence; 5′cap, Cap1; fully modified with 5-methylcytosine and pseudouridine) was formulated as a lipid nanoparticle (LNP) using the syringe pump method. The LNP was formulated at a 20:1 weight ratio of total lipid to modified mRNA with a final lipid molar ratio of 50:10:38.5:1.5 (D-Lin-KC2-DMA:DSPC:Cholesterol:PEG-c-DOMG). The mCherry formulation, listed in Table 59, was characterized by particle size, zeta potential, and encapsulation.

TABLE 59
mCherry Formulation

| Formulation # | NPA-003-5 | |
|---|---|---|
| Modified mRNA | mCherry | |
| Mean size | 105 | nm |
| | PDI: 0.09 | |
| Zeta at pH 7.4 | 1.8 | mV |

| | |
|---|---|
| Encaps. | 100% |
| (RiboGr) | |

[1258] The LNP formulation was administered to mice (n=5) intravenously at a modified mRNA dose of 100 ug. Mice were sacrificed at 24 hrs after dosing. The liver and spleen from the mice administered with mCherry modified mRNA formulations were analyzed by immunohistochemistry (IHC), western blot, or fluorescence-activated cell sorting (FACS).

[1259] Histology of the liver showed uniform mCherry expression throughout the section, while untreated animals did not express mCherry. Western blots were also used to confirm mCherry expression in the treated animals, whereas mCherry was not detected in the untreated animals. Tubulin was used as a control marker and was detected in both treated and untreated mice, indicating that normal protein expression in hepatocytes was unaffected.

[1260] FACS and IHC were also performed on the spleens of mCherry and untreated mice. All leukocyte cell populations were negative for mCherry expression by FACS analysis. By IHC, there were also no observable differences in the spleen in the spleen between mCherry treated and untreated mice.

### Example 31. Syringe Pump In Vivo Studies

[1261] mCherry modified mRNA (mRNA sequence shown in SEQ ID NO: 16103; polyA tail of approximately 160 nucleotides not shown in sequence; 5′cap, Cap1) is formulated as a lipid nanoparticle (LNP) using the syringe pump method. The LNP is formulated at a 20:1 weight ratio of total lipid to modified mRNA with a final lipid molar ratio of 50:10:38.5:1.5 (DLin-KC2-DMA:DSPC:Cholesterol:PEG-c-DOMG). The mCherry formulation is characterized by particle size, zeta potential, and encapsulation.

[1262] The LNP formulation is administered to mice (n=5) intravenously at a modified mRNA dose of 10 or 100 ug. Mice are sacrificed at 24 hrs after dosing. The liver and spleen from the mice administered with mCherry modified mRNA formulations are analyzed by immunohistochemistry (IHC), western blot, and/or fluorescence-activated cell sorting (FACS).

### Example 32. In Vitro and In Vivo Expression

### A. In Vitro Expression in Human Cells Using Lipidoid Formulations

[1263] The ratio of mmRNA to lipidoid used to test for in vitro transfection is tested empirically at different lipidoid:mmRNA ratios. Previous work using siRNA and lipidoids have utilized 2.5:1, 5:1, 10:1, and 15:1 lipidoid:siRNA wt:wt ratios. Given the longer length of mmRNA relative to siRNA, a lower wt:wt ratio of lipidoid to mmRNA may be effective. In addition, for comparison mmRNA were also formulated using RNAIMAX™ (Invitrogen, Carlsbad, CA) or TRANSIT-mRNA (Mirus Bio, Madison, WI) cationic lipid delivery vehicles.

[1264] The ability of lipidoid-formulated Luciferase (IVT cDNA sequence as shown in SEQ ID NO: 16111; mRNA sequence shown in SEQ ID NO: 16112, polyA tail of approximately 160 nucleotides not shown in sequence, 5′cap, Cap1, fully modified with 5-methylcytosine at each cytosine and pseudouridine replacement at each uridine site), green fluorescent protein (GFP) (IVT cDNA sequence as shown in SEQ ID NO: 161 13; mRNA sequence shown in SEQ ID NO: 16114, polyA tail of approximately 160 nucleotides not shown in sequence, 5′cap, Cap1, fully modified with 5-methylcytosine at each cytosine and pseudouridine replacement at each uridine site), G-CSF mRNA (mRNA sequence shown in SEQ ID NO: 16103; polyA tail of approximately 160 nucleotides not shown in sequence; 5′cap, Cap1), and EPO mRNA (mRNA sequence shown in SEQ ID NO: 16105; polyA tail of approximately 160 nucleotides not shown in sequence; 5′cap, Cap1) to express the desired protein product can be confirmed by luminescence for luciferase expression, flow cytometry for GFP expression, and by ELISA for G-CSF and Erythropoietin (EPO) secretion.

### B. In Vivo Expression Following Intravenous Injection

[1265] Systemic intravenous administration of the formulations are created using various different lipidoids including, but not limited to, 98N12-5, C12-200, and MD1. Lipidoid formulations containing mmRNA are injected intravenously into animals. The expression of the modified mRNA (mmRNA)-encoded proteins are assessed in blood and/or other organs samples such as, but not limited to, the liver and spleen collected from the animal. Conducting single dose intravenous studies will also allow an assessment of the magnitude, dose responsiveness, and longevity of expression of the desired product.

[1266] In one embodiment, lipidoid based formulations of 98N12-5, C12-200, MD1 and other lipidoids, are used to deliver luciferase, green fluorescent protein (GFP), mCherry fluorescent protein, secreted alkaline phosphatase (sAP), human G-CSF, human Factor IX, or human Erythropoietin (EPO) mmRNA into the animal. After formulating mRNA with a lipid, as described previously, animals are divided into groups to receive either a saline formulation, or a lipidoid-formulation which contains one of a different mmRNA selected from luciferase, GFP, mCherry, sAP, human G-CSF, human Factor IX, and human EPO. Prior to injection into the animal, mmRNA-containing lipidoid formulations are diluted in PBS. Animals are then administered a single dose of formulated mmRNA ranging from a dose of 10 mg/kg to doses as low as 1 ng/kg, with a preferred range to be 10 mg/kg to 100 ng/kg, where the dose of mmRNA depends on the animal body weight such as a 20 gram mouse receiving a maximum formulation of 0.2 ml (dosing is based no mmRNA per kg body weight). After the administration of the mmRNA-lipidoid formulation, serum, tissues, and/or tissue lysates are obtained and the level of the mmRNA-encoded product is determined at a single and/or a range of time intervals. The ability of lipidoid-formulated Luciferase, GFP, mCherry, sAP, G-CSF, Factor IX, and EPO mmRNA to express the desired protein product is confirmed by luminescence for the expression of Luciferase, flow cytometry for the expression of GFP and mCherry expression, by enzymatic activity for sAP, or by ELISA for the section of G-CSF, Factor IX and/or EPO.

[1267] Further studies for a multi-dose regimen are also performed to determine the maximal expression of mmRNA, to evaluate the saturability of the mmRNA-driven expression (by giving a control and active mmRNA formulation in parallel or in sequence), and to determine the feasibility of repeat drug administration (by giving mmRNA in doses separated by weeks or months and then determining whether expression level is affected by factors such as immunogenicity). An assessment of the physiological function of proteins such as G-CSF and EPO are also determined through analyzing samples from the animal tested and detecting increases in granulocyte and red blood cell counts, respectively. Activity of an expressed protein product such as Factor IX, in animals can also be assessed through analysis of Factor IX enzymatic activity (such as an activated partial thromboplastin time assay) and effect of clotting times.

C. In Vitro Expression Following Intramuscular and/or Subcutaneous Injection

[1268] The use of lipidoid formulations to deliver oligonucleotides, including mRNA, via an intramuscular route or a subcutaneous route of injection needs to be evaluated as it has not been previously reported. Intramuscular and/or subcutaneous injection of mmRNA are evaluated to determine if mmRNA-containing lipidoid formulations are capable to produce both localized and systemic expression of a desired portions.

[1269] Lipidoid formulations of 98N12-5, C12-200, and MD1 containing mmRNA selected from luciferase, green fluorescent protein (GFP), mCherry fluorescent protein, secreted alkaline phosphatase (sAP), human G-CSF, human factor IX, or human Erythropoietin (EPO) mmRNA are injected intramuscularly and/or subcutaneously into animals. The expression of mmRNA-encoded proteins are assessed both within the muscle or subcutaneous tissue and systemically in blood and other organs such as the liver and spleen. Single dose studies allow an assessment of the magnitude, dose responsiveness, and longevity of expression of the desired product.

[1270] Animals are divided into groups to receive either a saline formulation or a formulation containing modified mRNA. Prior to injection mmRNA-containing lipidoid formulations are diluted in PBS. Animals are administered a single intramuscular dose of formulated mmRNA ranging from 50 mg/kg to doses as low as 1 ng/kg with a preferred range to be 10 mg/kg to 100 ng/kg. A maximum dose for intramuscular administration, for a mouse, is roughly 1 mg mmRNA or as low as 0.02 ng mmRNA for an intramuscular injection into the hind limb of the mouse. For subcutaneous administration, the animals are administered a single subcutaneous dose of formulated mmRNA ranging from 400 mg/kg to doses as low as 1 ng/kg with a preferred range to be 80 mg/kg to 100 ng/kg. A maximum dose for subcutaneous administration, for a mouse, is roughly 8 mg mmRNA or as low as 0.02 ng mmRNA.

[1271] For a 20 gram mouse the volume of a single intramuscular injection is maximally 0.025 ml and a single subcutaneous injection is maximally 0.2 mL The optimal dose of mmRNA administered is calculated from the body weight of the animal. At various points in time points following the administration of the mmRNA-lipidoid, serum, tissues, and tissue lysates is obtained and the level of the mmRNA-encoded product is determined. The ability of lipidoid-formulated luciferase, green fluorescent protein (GFP), mCherry fluorescent protein, secreted alkaline phosphatase (sAP), human G-CSF, human factor IX, or human Erythropoietin (EPO) mmRNA to express the desired protein product is confirmed by luminescence for luciferase expression, flow cytometry for GFP and mCherry expression, by enzymatic activity for sAP, and by ELISA for G-CSF, Factor IX and Erythropoietin (EPO) secretion.

[1272] Additional studies for a multi-dose regimen are also performed to determine the maximal expression using mmRNA, to evaluate the saturability of the mmRNA-driven expression (achieved by giving a control and active mmRNA formulation in parallel or in sequence), and to determine the feasibility of repeat drug administration (by giving mmRNA in doses separated by weeks or months and then determining whether expression level is affected by factors such as immunogenicity). Studies utilizing multiple subcutaneous or intramuscular injection sites at one time point, are also utilized to further increase mmRNA drug exposure and improve protein production. An assessment of the physiological function of proteins, such as GFP, mCherry, sAP, human G-CSF, human factor IX, and human EPO, are determined through analyzing samples from the tested animals and detecting a change in granulocyte and/or red blood cell counts. Activity of an expressed protein product such as Factor IX, in animals can also be assessed through analysis of Factor IX enzymatic activity (such as an activated partial thromboplastin time assay) and effect of clotting times.

### Example 33. Bifunctional mmRNA

[1273] Using the teachings and synthesis methods described herein, modified RNAs are designed and synthesized to be bifunctional, thereby encoding one or more cytotoxic protein molecules as well as be synthesized using cytotoxic nucleosides.

[1274] Administration of the bifunctional modified mRNAs is effected using either saline or a lipid carrier. Once administered, the bifunctional modified mRNA is translated to produce the encoded cytotoxic peptide. Upon degradation of the delivered modified mRNA, the cytotoxic nucleosides are released which also effect therapeutic benefit to the subject.

### Example 34. Modified mRNA Transfection

### A. Reverse Transfection

[1275] For experiments performed in a 24-well collagen-coated tissue culture plate, Keratinocytes are seeded at a cell density of 1×10⁵. For experiments performed in a 96-well collagen-coated tissue culture plate, Keratinocytes are seeded at a cell density of 0.5×10⁵. For each modified mRNA (mmRNA) to be transfected, modified mRNA: RNAIMAX™ is prepared as described and mixed with the cells in the multi-well plate within a period of time, e.g., 6 hours, of cell seeding before cells had adhered to the tissue culture plate.

### B. Forward Transfection

[1276] In a 24-well collagen-coated tissue culture plate, Keratinocytes are seeded at a cell density of 0.7×10⁵. For experiments performed in a 96-well collagen-coated tissue culture plate, Keratinocytes are seeded at a cell density of 0.3×10⁵. Keratinocytes are grown to a confluency of >70% for over 24 hours. For each modified mRNA (mmRNA) to be transfected, modified mRNA: RNAIMAX™ is prepared as described and transfected onto the cells in the multi-well plate over 24 hours after cell seeding and adherence to the tissue culture plate.

C. Modified mRNA Translation Screen: G-CSF ELISA

[1277] Keratinocytes are grown in EPILIFE medium with Supplement S7 from Invitrogen (Carlsbad, CA) at a confluence of >70%. One set of keratinocytes were reverse transfected with 300 ng of the chemically modified mRNA (mmRNA) complexed with RNAIMAX™ from Invitrogen. Another set of keratinocytes are forward transfected with 300 ng modified mRNA complexed with RNAIMAX™ from Invitrogen. The modified mRNA: RNAIMAX™ complex is formed by first incubating the RNA with Supplement-free EPILIFE● media in a 5× volumetric dilution for 10 minutes at room temperature.

[1278] In a second vial, RNAIMAX™ reagent was incubated with Supplement-free EPILIFE● Media in 10× volumetric dilution for 10 minutes at room temperature. The RNA vial was then mixed with the RNAIMAX™ vial and incubated for 20-30 minutes at room temperature before being added to the cells in a drop-wise fashion. Secreted human Granulocyte-Colony Stimulating Factor (G-CSF) concentration in the culture medium is measured at 18 hours post-transfection for each of the chemically modified mRNA in triplicate.

[1279] Secretion of Human G-CSF from transfected human keratinocytes is quantified using an EILISA kit from Invitrogen or R&D Systems (Minneapolis, MN) following the manufacturers recommended instructions.

D. Modified mRNA Dose and Duration: G-CSF EILISA

[1280] Keratinocytes are grown in EPILIFE medium with Supplement S7 from Invitrogen at a confluence of >70%. Keratinocytes are reverse transfected with either 0 ng, 46.875 ng, 93.75 ng, 187.5 ng, 375 ng, 750 ng, or 1500 ng modified mRNA complexed with the RNAIMAX™ from Invitrogen (Carlsbad, CA). The modified mRNA:RNAIMAX™ complex is formed as described. Secreted human G-CSF concentration in the culture medium is measured at 0, 6, 12, 24, and 48 hours post-transfection for each concentration of each modified mRNA in triplicate. Secretion of human G-CSF from transfected human keratinocytes is quantified using an ELISA kit from Invitrogen or R&D Systems following the manufacturers recommended instructions.

### Example 35. Split Dose Studies

[1281] Studies utilizing multiple subcutaneous or intramuscular injection sites at one time point were designed and performed to investigate ways to increase mmRNA drug exposure and improve protein production. In addition to detection of the expressed protein product, an assessment of the physiological function of proteins was also determined through analyzing samples from the animal tested.

[1282] Surprisingly, it has been determined that split dosing of mmRNA produces greater protein production and phenotypic responses than those produced by single unit dosing or multi-dosing schemes.

[1283] The design of a single unit dose, multi-dose and split dose experiment involved using human erythropoietin (EPO) mmRNA (mRNA shown in SEQ ID NO: 16105; polyA tail of approximately 160 nucleotides not shown in sequence; 5′cap, Cap1) administered in buffer alone. The dosing vehicle (F. buffer) consisted of 150 mM NaCl, 2 mM CaCl₂, 2 mM Na⁺-phosphate (1.4 mM monobasic sodium phosphate; 0.6 mM dibasic sodium phosphate), and 0.5 mM EDTA, pH 6.5. The pH was adjusted using sodium hydroxide and the final solution was filter sterilized. The mmRNA was modified with 5meC at each cytosine and pseudouridine replacement at each uridine site.

[1284] Aminals (n=5) were injected IM (intramuscular) for the single unit dose of 100 ug. For multi-dosing, two schedules were used, 3 doses of 100 μg and 6 doses of 100 ug. For the split dosing scheme, two schedules were used, 3 doses at 33.3 ug and 6 doses of 16.5 ug mmRNA. Control dosing involved use of buffer only at 6 doses. Control mmRNA involved the use of luciferase mmRNA (IVT cDNA sequence shown in SEQ ID NO: 16111; mRNA sequence shown in SEQ ID NO: 16112, polyA tail of approximately 160 nucleotides not shown in sequence, 5′cap, Cap1, fully modified with 5-methylcytosine at each cytosine and pseudouridine replacement at each uridine site) dosed 6 times at 100 ug. Blood and muscle tissue were evaluated 13 hrs post injection.

[1285] Human EPO protein was measured in mouse serum 13 h post I.M. single, multi- or split dosing of the EPO mmRNA in buffer. Seven groups of mice (n=5 mice per group) were treated and evaluated. The results are shown in Table 60.

TABLE 60
Split dose study

| | | | | Avg. | Polypeptide | |
|---|---|---|---|---|---|---|
| | | | | pmol/mL | per unit | Dose |
| | | Dose of | Total | human | drug | Splitting |
| Group | Treatment | mmRNA | Dose | EPO | (pmol/ug) | Factor |
| 1 | Human EPO mmRNA | 1 × 100 ug | 100 ug | 14.3 | .14 | 1 |
| 2 | Human EPO mmRNA | 3 × 100 ug | 300 ug | 82.5 | .28 | 2 |
| 3 | Human EPO mmRNA | 6 × 100 ug | 600 ug | 273.0 | .46 | 3.3 |
| 4 | Human EPO mmRNA | 3 × 33.3 ug | 100 ug | 104.7 | 1.1 | 7.9 |
| 5 | Human EPO mmRNA | 6 × 16.5 ug | 100 ug | 127.9 | 1.3 | 9.3 |
| 6 | Luciferase mmRNA | 6 × 100 ug | 600 ug | 0 | — | — |
| 7 | Buffer Alone | — | — | 0 | — | — |

[1286] The splitting factor is defined as the product per unit drug divided by the single dose product per unit drug (PUD). For example for treatment group 2 the value 0.28 or product (EPO) per unit drug (mmRNA) is divided by the single dose product per unit drug of 0.14. The result is 2. Likewise, for treatment group 4, the value 1 0.1 or product (EPO) per unit drug (mmRNA) is divided by the single dose product per unit drug of 0.14. The result is 7.9. Consequently, the dose splitting factor (DSF) may be used as an indicator of the efficacy of a split dose regimen. For any single administration of a total daily dose, the DSF should be equal to 1. Therefore any DSF greater than this value in a split dose regimen is an indication of increased efficacy.

[1287] To determine the dose response trends, impact of injection site and impact of injection timing, studies are performed. In these studies, varied doses of 1 ug, 5 ug, 10 ug, 25 ug, 50 ug, and values in between are used to determine dose response outcomes. Split dosing for a 100 ug total dose includes three or six doses of 1.6 ug, 4.2 ug, 8.3 ug, 16.6 ug, or values and total doses equal to administration of the total dose selected.

[1288] Injection sites are chosen from the limbs or any body surface presenting enough area suitable for injection. This may also include a selection of injection depth to target the dermis (Intradermal), epidermis (Epidermal), subcutaneous tissue (SC) or muscle (IM). Injection angle will vary based on targeted delivery site with injections targeting the intradermal site to be 10-15 degree angles from the plane of the surface of the skin, between 20-45 degrees from the plane of the surface of the skin for subcutaneous injections and angles of between 60-90 degrees for injections substantially into the muscle.

### Example 36. Quantification in Exosomes

[1289] The quantity and localization of the mmRNA of the present invention can be determined by measuring the amounts (initial, timecourse, or residual basis) in isolated exosomes. In this study, since the mmRNA are typically codon-optimized and distinct in sequence from endogenous mRNA, the levels of mmRNA are quantitated as compared to endogenous levels of native or wild type mRNA by using the methods of Gibbings, PCT/IB2009/005878, the contents of which are incorporated herein by reference in their entirety.

[1290] In these studies, the method is performed by first isolating exosomes or vesicles preferably from a bodily fluid of a patient previously treated with a polynucleotide, primary construct or mmRNA of the invention, then measuring, in said exosomes, the polynucleotide, primary construct or mmRNA levels by one of mRNA microarray, qRT-PCR, or other means for measuring RNA in the art including by suitable antibody or immunohistochemical methods.

### Example 37. Effect of Modified mRNA on Cellular Viability Cytotoxicity and Apoptosis

[1291] This experiment demonstrates cellular viability, cytotoxicity and apoptosis for distinct modified mRNA in-vitro transfected Human Keratinocyte cells. Keratinocytes are grown in EPILIFE● medium with Human Keratinocyte Growth Supplement in the absence of hydrocortisone from Invitrogen (Carlsbad, CA) at a confluence of >70%. Keratinocytes are reverse transfected with Ong, 46.875 ng, 93.75 ng, 187.5 ng, 375 ng, 750 ng, 1500 ng, 3000 ng, or 6000 ng of modified mRNA complexed with RNAIMAX™ from Invitrogen. The modified mRNA:RNAIMAX™ complex is formed. Secreted human G-CSF concentration in the culture medium is measured at 0, 6, 12, 24, and 48 hours post-transfection for each concentration of each modified mRNA in triplicate. Secretion of human G-CSF from transfected human keratinocytes is quantified using an ELISA kit from Invitrogen or R&D Systems following the manufacturers recommended instructions.

[1292] Cellular viability, cytotoxicity and apoptosis is measured at 0, 12, 48, 96, and 192 hours post-transfection using the APOTOX-GLO™ kit from Promega (Madison, WI) according to manufacturer instructions.

### Example 38. Detection of a Cellular Innate Immune Response to Modified mRNA Using an ELISA Assay

[1293] An enzyme-linked immunosorbent assay (ELISA) for Human Tumor Necrosis Factor-α (TNF-α), Human Interferon-β (IFN-β) and Human Granulocyte-Colony Stimulating Factor (G-CSF) secreted from in vitro-transfected Human Keratinocyte cells is tested for the detection of a cellular innate immune response. Keratinocytes are grown in EPILIFE● medium with Human Keratinocyte Growth Supplement in the absence of hydrocortisone from Invitrogen (Carlsbad, CA) at a confluence of >70%. Secreted TNF-α keratinocytes are reverse transfected with Ong, 93.75 ng, 187.5 ng, 375 ng, 750 ng, 1500 ng or 3000 ng of the chemically modified mRNA (mmRNA) complexed with RNAIMAX™ from Invitrogen as described in triplicate. Secreted TNF-α in the culture medium is measured 24 hours post-transfection for each of the chemically modified mRNA using an ELISA kit from Invitrogen according to the manufacturer protocols.

[1294] Secreted IFN-β in the same culture medium is measured 24 hours post-transfection for each of the chemically modified mRNA using an ELISA kit from Invitrogen according to the manufacturer protocols. Secreted human G-CSF concentration in the same culture medium is measured at 24 hours post-transfection for each of the chemically modified mRNA. Secretion of human G-CSF from transfected human keratinocytes is quantified using an ELISA kit from Invitrogen or R&D Systems (Minneapolis, MN) following the manufacturers recommended instructions. These data indicate which modified mRNA (mmRNA) are capable eliciting a reduced cellular innate immune response in comparison to natural and other chemically modified polynucleotides or reference compounds by measuring exemplary type I cytokines TNF-α at and IFN-β.

### Example 39. Human Granulocyte —Colony Stimulating Factor (G-CSF) Modified mRNA-Induced Cell Proliferation Assay

[1295] Human keratinocytes are grown in EPILIFE● medium with Supplement S7 from Invitrogen at a confluence of >70% in a 24-well collagen-coated TRANSWELL● (Corning, Lowell, MA) co-culture tissue culture plate. Keratinocytes are reverse transfected with 750 ng of the indicated chemically modified mRNA (mmRNA) complexed with RNAIMAX from Invitrogen as described in triplicate. The modified mRNA:RNAIMAX complex is formed as described. Keratinocyte media is exchanged 6-8 hours post-transfection. 42-hours post-transfection, the 24-well TRANSWELL● plate insert with a 0.4 um-pore semi-permeable polyester membrane is placed into the human G-CSF modified mRNA-transfected keratinocyte containing culture plate

[1296] Human myeloblast cells, Kasumi-1 cells or KG-1 (0.2×10⁵ cells), are seeded into the insert well and cell proliferation is quantified 42 hours post-co-culture initiation using the CyQuant Direct Cell Proliferation Assay (Invitrogen, Carlsbad, CA) in a 100-120 μl volume in a 96-well plate. Modified mRNA-encoding human G-CSF-induced myeloblast cell proliferation is expressed as a percent cell proliferation normalized to untransfected keratinocyte/myeloblast co-culture control wells. Secreted human G-CSF concentration in both the keratinocyte and myeloblast insert co-culture wells is measured at 42 hours post-co-culture initiation for each modified mRNA in duplicate. Secretion of human G-CSF is quantified using an E LISA kit from Invitrogen following the manufacturer recommended instructions.

[1297] Transfected human G-CSF modified mRNA in human keratinocyte feeder cells and untransfected human myeloblast cells are detected by RT-PCR. Total RNA from sample cells is extracted and lysed using RNEASY● kit (Qiagen, Valencia, CA) according to the manufacturer instructions. Extracted total RNA is submitted to RT-PCR for specific amplification of modified mRNA-G-CSF using PROTOSCRIPT● M-MuLV Taq RT-PCR kit (New England BioLabs, Ipswich, MA) according to the manufacturer instructions with human G-CSF-specific primers. RT-PCR products are visualized by 1.2% agarose gel electrophoresis.

### Example 40: Co-Culture Assay

[1298] Modified mRNA comprised of chemically-distinct modified nucleotides encoding human Granulocyte-Colony Stimulating Factor (G-CSF) may stimulate the cellular proliferation of a transfection incompetent cell in a co-culture environment. The co-culture includes a highly transfectable cell type such as a human keratinocyte and a transfection incompetent cell type such as a white blood cell (WBC). The modified mRNA encoding G-CSF are transfected into the highly transfectable cell allowing for the production and secretion of G-CSF protein into the extracellular environment where G-CSF acts in a paracrine-like manner to stimulate the white blood cell expressing the G-CSF receptor to proliferate. The expanded WBC population may be used to treat immune-compromised patients or partially reconstitute the WBC population of an immunosuppressed patient and thus reduce the risk of opportunistic infections.

[1299] In another example, a highly transfectable cell such as a fibroblast are transfected with certain growth factors support and simulate the growth, maintenance, or differentiation of poorly transfectable embryonic stem cells or induced pluripotent stem cells.

### Example 41: Detection Assays of Human IgG Antibodies

### A. ELISA Detection of Human IgG Antibodies

[1300] This example describes an ELISA for Human IgG from Chinese Hamster Ovary's (CHO) and Human Embryonic Kidney (HEK, HER-2 Negative) 293 cells transfected with human IgG modified mRNA (mmRNA). The Human Embryonic Embryonic Kidney (HEK) 293 are grown in CD 293 Medium with Supplement of L-Glutamine from Invitrogen until they reach a confluence of 80-90%. The CHO cells are grown in CD CHO Medium with Supplement of L-Glutamine, Hypoxanthine and Thymidine. In one aspect, 2×10⁶ cells are transfected with 24 pg modified mRNA complexed with RNAIMAX™ from Invitrogen in a 75 cm2 culture flask from Corning in 7 ml of medium. In another aspect, 80,000 cells are transfected with 1 μg modified mRNA complexed with RNAIMAX™ from Invitrogen in a 24-well plate. The modified mRNA:RNAIMAX™ complex is formed by incubating in a vial the mmRNA with either the CD 293 or CD CHO medium in a 5× volumetric dilution for 10 minutes at room temperature. In a second vial, RNAIMAX™ reagent is incubated with CD 293 medium or CD CHI medium in a 10× volumetric dilution for 10 minutes at room temperature. The mmRNA vial is then mixed with the RNAIMAX™ vial and incubated for 20-30 minutes at room temperature before it is added to the CHO or HEK cells in a drop-wise fashion. The culture supernatants are stored at 4 degrees celsius. The concentration of the secreted human IgG in the culture medium in the 24 μg mmRNA transfections is measured at 12, 24, 36 hours post-transfection and the 1 μg mmRNA transfection is measured at 36 hours. Secretion of Trastuzumab from transfected HER 293 cells is quantified using an ELISA kit from Abcam (Cambridge, MA) following the manufacturers recommended instructions. The data shows that a Humanized IgG antibody (such as Trastuzumnab) mmRNA is capable of being translated in HEK Cells and that Trastuzumab is secreted out of the cells and released into the extracellular environment. Furthermore, the data demonstrate that transfection of cells with mmRNA encoding Trastuzumab for the production of secreted protein can be scaled up to a bioreactor or large cell culture conditions.

B. Western Detection of Modified mRNA Produced Human IgG Antibody

[1301] A Western Blot of CHO-K1 cells is co-transfected with 1 μg each of Heavy and Light Chain of Trastuzumab modified mRNA (mmRNA). CHO cells are grown using standard protocols in 24-well plates. The cell supernatants or cell lysates are collected 24 hours post-transfection, separated on a 12% SDS-Page gel and transferred onto a nitrocellulose membrane using the IBOT● by Invitrogen (Carlsbad, CA). The cells are incubated with a first conjugation of a rabbit polyclonal antibody to Human IgG conjugated to DYLIGHT594 (ab96904, abcam, Cambridge, MA) and a second conjugation of a goat polyclonal antibody to Rb IgG which is conjugated to alkaline phosphatase. After incubation, the antibody is detected using Novex alkaline phosphatase chromogenic substrate by Invitrogen (Carlsbad, CA).

C. Cell Immuno Staining of Modified mRNA Produced Trastuzumab and Rituximab

[1302] CHO-K1 cells are co-transfected with 500 ng each of Heavy and Light Chain of either Trastuzumab or Rituximab. Cells are grown in F-12K Medium from GIBCO● (Grand Island, NY) and 10% FBS. Cells are fixed with 4% paraformaldehyde in PBS, permeabilized with 0.1% Triton X-100 in PBS for 5-10 minutes at room temperature and cells are washed 3 times with room temperature PBS. Trastuzumab and Rituximab staining is performed using rabbit polyclonal antibody to Human IgG conjugated to DYLIGHT●594 (ab96904, abcam, Cambridge, MA) according to the manufacture's recommended dilutions. Nuclear DNA staining is performed with DAPI dye from Invitrogen (Carlsbad, CA). The protein for Trastuzumab and Rituximab is translated and localized to the cytoplasm upon modified mRNA transfections. Pictures are taken 13 hours post-transfection.

D. Binding Immunoblot Assay for Modified mRNA Produced Trastuzumab and Rituximab

[1303] Trastuzumab and Rituximab are detected using a binding immunoblot detection assay. Varying concentrations (10 ng/ul to 0 ng/ul) of the ErB2 peptide (ab40048, abeam, Cambridge, MA), antigen for Trastuzumab and the CD20 peptide (ab97360, abeam, Cambridge, MA), antigen for Rituximab are run on a 12% SDS-Page gel and transferred onto a membrane using the iBlot from Invitrogen. The membranes are incubated for 1 hour with their respective cell supernatants from CHO-K1 cells which are co-transfected with 500 ng each of Heavy and Light Chain of either Trastuzumab or Rituximab. The membranes are blocked with 1% BSA and a secondary anti-human IgG antibody conjugated to alkaline phosphatase (abcamn, Cambridge, MA) is added. Antibody detection is conducted using the NOVEX alkaline phosphatase chromogenic substrate by Invitrogen (Carlsbad, CA). The data shows that a humanized IgG antibodies generated from modified mRNA is capable of recognizing and binding to their respective antigens.

### E. Cell Proliferation Assay

[1304] The SK-BR-3 cell line, an adherent cell line derived from a human breast adenocarcinoma, which overexpresses the HER2/neu receptor can be used to compare the anti-proliferative properties of modified mRNA (mmRNA) generated Trastuzumab. Varying concentrations of purified Trastuzumab generated from modified mRNA and trastuzumab are be added to cell cultures, and their effects on cell growth are be assessed in triplicate cytotoxicity and viability assays.

### Example 42: Bulk Transfection of Modified mRNA into Cell Culture

### A. Cationic Lipid Delivery Vehicles

[1305] RNA transfections are carried out using RNAIMAX™ (Invitrogen, Carlsbad, CA) or TRANSIT-mRNA (Mirus Bio, Madison, WI) cationic lipid delivery vehicles. RNA and reagent are first diluted in Opti-MEM basal media (Invitrogen, Carlsbad, CA). 100 ng/uL RNA is diluted 5× and 5 μL of RMAIMax per g of RNA is diluted 10×. The diluted components are pooled and incubated 15 minutes at room temperature before they are dispensed to culture media. For TRANSIT-mRNA transfections, 100 ng/uL RNA is diluted 10× in Opti-MEM and BOOST reagent is added (at a concentration of 2 μL per μg of RNA), TRANSIT-mRNA is added (at a concentration of 2 μL per μg of RNA), and then the RNA-lipid complexes are delivered to the culture media after a 2-minute incubation at room temperature. RNA transfections are performed in Nutristem xenofree hES media (Stemngent, Cambridge, MA) for RiPS derivations, Dermal Cell Basal Medium plus Keratinocyte Growth Kit (ATCC) for keratinocyte experiments, and Opti-MEM plus 2% FBS for all other experiments. Successful introduction of a modified mRNA (mmRNA) into host cells can be monitored using various known methods, such as a fluorescent marker, such as Green Fluorescent Protein (GFP). Successful transfection of a modified mRNA can also be determined by measuring the protein expression level of the target polypeptide by e.g., Western Blotting or immunocytochemistry. Similar methods may be followed for large volume scale-up to multi-liter (5-10,000 L) culture format following similar RNA-lipid complex ratios.

B. Electroporation Delivery of Exogenous Synthetic mRNA Transcripts

[1306] Electroporation parameters are optimized by transfecting MRC-5 fibroblasts with in vitro synthetic modified mRNA (mmRNA) transcripts and measuring transfection efficiency by quantitative RT-PCR with primers designed to specifically detect the exogenous transcripts. Discharging a 150 uF capacitor charged to F into 2.5×10⁶ cells suspended in 50 μl of Opti-MEM (Invitrogen, Carlsbad, CA) in a standard electroporation cuvette with a 2 mm gap is sufficient for repeated delivery in excess of 10,000 copies of modified mRNA transcripts per cell, as determined using the standard curve method, while maintaining high viability (>70%). Further experiments may reveal that the voltage required to efficiently transfect cells with mmRNA transcripts can depend on the cell density during electroporation. Cell density may vary from 1×10⁶ cell/50 0 to a density of 2.5×10⁶ cells/50 μl and require from 110V to 145V to transfect cells with similar efficiencies measured in transcript copies per cell. Large multi-liter (5-10,000 L) electroporation may be performed similar to large volume flow electroporation strategies similar to methods described with the above described constraints (Li et al., 2002; Geng et al., 2010).

### Example 43: In Vivo Delivery Using Lipoplexes

### A. Human EPO Modified RNA Lipoplex

[1307] A formulation containing 100 μg of modified human erythropoietin mRNA(mRNA shown in SEQ ID NO: 16105; polyA tail of approximately 160 nucleotides not shown in sequence; 5′cap, Cap1) (EPO; fully modified 5-methylcytosine; N1-methyl-pseudouridine) was lipoplexed with 30% by volume of RNAIMAX™ (Lipoplex-h-Epo-46; Generation 2 or Gen2) in 50-70 uL delivered intramuscularly to four C57/BL6 mice. Other groups consisted of mice receiving an injection of the lipoplexed modified luciferase mRNA (Lipoplex-luc) (IVT cDNA sequence shown in SEQ ID NO: 16111; mRNA sequence shown in SEQ ID NO: 16112, polyA tail of approximately 160 nucleotides not shown in sequence. 5′cap, Cap1, fully modified with 5-methylcytosine at each cytosine and pseudouridine replacement at each uridine site) which served as a control containing 100 μg of modified luciferase mRNA was lipoplexed with 30% by volume of RNAiMAX™ or mice receiving an injection of the formulation buffer as negative control at a dose volume of 65 μl. 13 hours after the intramuscular injection, serum was collected from each mouse to measure the amount of human EPO protein in the mouse serum by human EPO ELISA and the results are shown in Table 61.

TABLE 61
Human EPO Production (IM Injection Route)

| Formualtion | Mouse #1 | Mouse #2 | Mouse #3 | Mouse #4 | Average |
|---|---|---|---|---|---|
| Lipoplex-h- | 189.8 | 92.55 | 409.5 | 315.95 | 251.95 |
| Epo-46 | | | | | |
| Lipoplex-Luc | 0 | 0 | 0 | 0 | 0 |
| Formulation | 0 | 0 | 0 | 0 | 0 |
| Buffer | | | | | |

### B. Human G-CSF Modified RNA Lipoplex

[1308] A formulation containing 100 μg of one of two versions of modified human G-CSF mRNA(mRNA sequence shown in SEQ ID NO: 16102; polyA tail of approximately 160 nucleotides not shown in sequence; 5′cap, Cap1) (G-CSF fully modified with 5-methylcytosine and pseudouridine (G-CSF) or G-CSF fully modified with 5-methylcytosine and N1-methyl-pseudouridine ((Gi-CSF—N1) lipoplexed with 30% by volume of RNAIMAX and delivered in 150 uL intramuscularly (I.M), in 150 uL subcutaneously (S.C) and in 225 uL intravenously (I.V) to C57/BL6 mice.

[1309] Three control groups were administered either 100 μg of modified luciferase mRNA (IVT cDNA sequence shown in SEQ ID NO: 16111; mRNA sequence shown in SEQ ID NO: 16112, polyA tail of approximately 160 nucleotides not shown in sequence, 5′cap, Cap1, fully modified with 5-methylcytosine at each cytosine and pseudouridine replacement at each uridine site) intramuscularly (Luc-unsp I.M.) or 150 μg of modified luciferase mRNA intravenously (Luc-unsp I.V.) or 150 μL of the formulation buffer intramuscularly (Buffer I.M.). 6 hours after administration of a formulation, serum was collected from each mouse to measure the amount of human G-CSF protein in the mouse serum by human G-CSF ELISA and the results are shown in Table 62.

[1310] These results demonstrate that both 5-methylcytosine/pseudouridine and 5-methylcytosine/N1-methyl-pseudouridine modified human G-CSF mRNA can result in specific human G-CSF protein expression in serum when delivered via I.V. or I.M. route of administration in a lipoplex formulation.

TABLE 62
Human G-CSF in Serum (I.M., I.V., S.C. Injection Route)

| Formulation | Route | G-CSF (pg/ml) |
|---|---|---|
| G-CSF | I.M. | 85.6 |
| G-CSF N1 | I.M. | 40.1 |
| G-CSF | S.C. | 3.9 |
| G-CSF N1 | S.C. | 0.0 |
| G-CSF | I.V. | 31.0 |
| G-CSF N1 | I.V. | 6.1 |
| Luc-unsp | I.M. | 0.0 |
| Luc-unsp | I.V. | 0.0 |
| Buffer | I.M. | 0.0 |

### C. Human G-CSF Modified RNA Lipoplex Comparison

[1311] A formulation containing 100 μg of either modified human G-CSF mRNA lipoplexed with 30% by volume of RNAIMAX™ with a 5-methylcytosine (5me) and a pseudouridine (ψ) modification (G-CSF-Gen1-Lipoplex), modified human G-CSF mRNA with a 5mc and ψ modification in saline (G-CSF-Gen1-Saline), modified human G-CSF mRNA with a N1-5-methylcytosine (N1-5mc) and a ψ modification lipoplexed with 30% by volume of RNAIMAX™ (G-CSF-Gen2-Lipoplex), modified human G-CSF mRNA with a N1-5mc and W modification in saline (G-CSF-Gen2-Saline), modified luciferase with a 5mc and V modification lipoplexed with 30% by volume of RNAIMAX™ (Luc-Lipoplex), or modified luciferase mRNA with a a 5me and V modification in saline (Luc-Saline) was delivered intramuscularly (I.M.) or subcutaneously (S.C.) and a control group for each method of administration was giving a dose of 80 uL of the formulation buffer (F. Buffer) to C57/BL6 mice. 13 hours post injection serum and tissue from the site of injection were collected from each mouse and analyzed by G-CSF ELISA to compare human G-CSF protein levels. The results of the human G-CSF protein in mouse serum from the intramuscular administration, and the subcutaneous administration results are shown in Table 63.

[1312] These results demonstrate that 5-methylcytosine/pseudouridine and 5-methylcytosine/N1-methyl-pseudouridine modified human G-CSF mRNA can result in specific human G-CSF protein expression in serum when delivered via I.M. or S.C. route of administration whether in a saline formulation or in a lipoplex formulation. As shown in Table 63, 5-methylcytosine/N1-methyl-pseudouridine modified human G-CSF mRNA generally demonstrates increased human G-CSF protein production relative to 5-methylcytosine/pseudouridine modified human G-CSF mRNA.

TABLE 63
Human G-CSF Protein in Mouse Serum

| | G-CSF (pg/ml) | |
|---|---|---|
| Formulation | I.M. Injection Route | S.C. Injenction Route |
| G-CSF-Gen1-Lipoplex | 13.988 | 42.855 |
| GCSF-Gen1-saline | 9.375 | 4.614 |
| GCSF-Gen2-lipoplex | 75.572 | 32.107 |
| GCSF-Gen2-saline | 20.190 | 45.024 |
| Luc lipoplex | 0 | 3.754 |
| Luc saline | 0.0748 | 0 |
| F. Buffer | 4.977 | 2.156 |

D. mCherry Modified RNA Lipoplex Comparison

### Intramuscular and Subcutaneous Administration

[1313] A formulation containing 100 μg of either modified mCherry mRNA (mRNA sequence shown in SEQ ID NO: 16103; polyA tail of approximately 160 nucleotides not shown in sequence; 5′cap, Cap1) lipoplexed with 30% by volume of RNAIMAX™ or modified mCherry mRNA in saline is delivered intramuscularly and subcutaneously to mice. A formulation buffer is also administered to a control group of mice either intramuscularly or subcutaneously. The site of injection on the mice may be collected 17 hours post injection for sectioning to determine the cell type(s) responsible for producing protein.

### Intravitreal Administration

[1314] A formulation containing 10 μg of either modified mCherry mRNA lipoplexed with RNAIMAX™ modified mCherry mRNA in a formulation buffer, modified luciferase mRNA lipoplexed with RNAIMAX™, modified luciferase mRNA in a formulation buffer can be administered by intravitreal injection (IVT) in rats in a dose volume of 5 I/eye. A formulation buffer is also administered by IVT to a control group of rats in a dose volume of 5 μl/eye. Eyes from treated rats can be collected after 18 hours post injection for sectioning and lysating to determine whether mmRNA can be effectively delivered in vivo to the eye and result in protein production and to also determine the cell type(s) responsible for producing protein in vivo.

### Intranasal Administration

[1315] A formulation containing 100 μg of either modified mCherry mRNA lipoplexed with 30% by volume of RNAIMAX™, modified mCherry mRNA in saline, modified luciferase mRNA lipoplexed with 30% by volume of RNAIMAX™ or modified luciferase mRNA in saline is delivered intranasally. A formulation buffer is also administered to a control group intranasally. Lungs may be collected about 13 hours post instillation for sectioning (for those receiving mCherry mRNA) or homogenization (for those receiving luciferase mRNA). These samples will be used to determine whether mmRNA can be effectively delivered in vivo to the lungs and result in protein production, and to also determine the cell type(s) responsible for producing protein in vivo.

### Example 44: In Vivo Delivery Using Varying Lipid Ratios

[1316] Modified mRNA was delivered to C57/BL6 mice to evaluate varying lipid ratios and the resulting protein expression. Formulations of 100 pg modified human EPO mRNA (mRNA shown in SEQ ID NO: 16105; polyA tail of approximately 160 nucleotides not shown in sequence; 5′cap, Cap1; fully modified with 5-methylcytosine and pseudouridine) lipoplexed with 10%, 30% or 50% RNAIMAX™. 100 pg modified luciferase mRNA (IVT cDNA sequence shown in SEQ ID NO: 16111; mRNA sequence shown in SEQ ID NO: 16112, polyA tail of approximately 160 nucleotides not shown in sequence, 5′cap, (Cap1, fully modified with 5-methylcytosine at each cytosine and pseudouridine replacement at each uridine site) lipoplexed with 10%, 30% or 50% RNAIMAX™ or a formulation buffer were administered intramuscularly to mice in a single 70 μl dose. Serum was collected 13 hours post injection to undergo a human EPO ELISA to determine the human EPO protein level in each mouse. The results of the human EPO ELISA, shown in Table 64, show that modified human EPO) expressed in the muscle is secreted into the serum for each of the different percentage of RNAIMAX™

TABLE 64
Human EPO Protein in Mouse Serum (IM Injection Route)

| Formulation | EPO (pg/ml) |
|---|---|
| Epo + 10% RNAiMAX | 11.4 |
| Luc + 10% RNAiMAX | 0 |
| Epo + 30% RNAiMAX | 27.1 |
| Luc + 30% RNAiMAX | 0 |
| Epo + 50% RNAiMAX | 19.7 |
| Luc + 50% RNAiMAX | 0 |
| F. Buffer | 0 |

### Example 45: Intramuscular and Subcutaneous In View Deliver in Mammals

[1317] Modified human EPO mRNA (mRNA sequence shown in SEQ ID NO: 16105; polyA tail of approximately 160 nucleotides not shown in sequence; 5′cap, Cap1; fully modified with 5-methylcytosine and pseudouridine) formulated in formulation buffer was delivered to either C57/BL6 mice or Sprague-Dawley rats to evaluate the dose dependency on human EPO production. Rats were intramuscularly injected with 50 μl of the modified human EPO mRNA (h-EPO), modified luciferase mRNA (Luc) (IVT cDNA sequence shown in SEQ ID NO: 16111; mRNA sequence shown in SEQ ID NO: 16112, polyA tail of approximately 160 nucleotides not shown in sequence, 5′cap, Cap 1, fully modified with 5-methylcytosine at each cytosine and pseudouridine replacement at each uridine site) or the formulation buffer (F.Buffer) as described in the dosing chart Table 65.

[1318] Mice were intramuscularly or subcutaneously injected with 50 μl of the modified human EPO mRNA (h-EPO), modified luciferase mRNA (Luc) or the formulation buffer (F.Buffer) as described in the dosing chart Table 66. 13 hours post injection blood was collected and serum was analyzed to determine the amount human E POI) for each mouse or rat. The average and geometric mean in pg/ml for the rat study are also shown in Table 65.

TABLE 65
Rat Study

| | | | | Geometric- |
|---|---|---|---|---|
| | Group | Dose (ug) | Avg. pg/ml | mean pg/ml |
| h-EPO | G#1 | 150 | 67.7 | 67.1 |
| h-EPO | G#2 | 100 | 79.4 | 66.9 |
| h-EPO | G#3 | 50 | 101.5 | 85.4 |
| h-EPO | G#4 | 10 | 46.3 | 31.2 |
| h-EPO | G#5 | 1 | 28.7 | 25.4 |
| Luc | G#6 | 100 | 24.5 | 22.4 |
| F. Buffer | G#7 | — | 18.7 | 18.5 |

TABLE 66
Mouse Study

| | | | | | Average Level |
|---|---|---|---|---|---|
| Route | Treatment | Group | Dose | | in serum pg/ml |
| IM | h-EPO | 1 | 100 | μg | 96.2 |
| IM | h-EPO | 2 | 50 | μg | 63.5 |
| IM | h-EPO | 3 | 25 | μg | 18.7 |
| IM | h-EPO | 4 | 10 | μg | 25.9 |
| IM | h-EPO | 5 | 1 | μg | 2.6 |
| IM | Luc | 6 | 100 | μg | 0 |
| IM | F. Buffer | 7 | — | | 1.0 |
| SC | h-EPO | 1 | 100 | μg | 72.0 |
| SC | Luc | 2 | 100 | μg | 26.7 |

| | | | | |
|---|---|---|---|---|
| SC | F. Buffer | 3 | — | 17.4 |

### Example 46: Duration of Activity after Intramuscular In Vivo Delivery

[1319] Modified human EPO mRNA (mRNA sequence shown in SEQ ID NO: 16105; polyA tail of approximately 160 nucleotides not shown in sequence; 5′cap, Cap1; fully modified with 5-methylcytosine and pseudouridine) formulated in formulation buffer was delivered to Sprague-Dawley rats to determine the duration of the dose response. Rats were intramuscularly injected with 50 μl of the modified human EPO mRNA (h-EPO), modified luciferase mRNA(IVT cDNA sequence shown in SEQ ID NO: 16111; mRNA sequence shown in SEQ ID NO: 16112, polyA tail of approximately 160 nucleotides not shown in sequence, 5′cap, Cap1, fully modified with 5-methylcytosine at each cytosine and pseudouridine replacement at each uridine site) (Luc) or the formulation buffer (F.Buffer) as described in the dosing chart Table 67. The rats were bled 2, 6, 12, 24, 48 and 72 hours after the intramuscular injection to determine the concentration of human EPO in serum at a given time. The average and geometric mean in pg/ml for this study are also shown in Table 67.

TABLE 67
Dosing Chart

| | | Dose | Avg. | Geometric- |
|---|---|---|---|---|
| | Group | (μg) | pg/ml | mean pg/ml |
| h-EPO | 2 hour | 100 | 59.6 | 58.2 |
| h-EPO | 6 hour | 100 | 68.6 | 55.8 |
| h-EPO | 12 hour | 100 | 87.4 | 84.5 |
| h-EPO | 24 hour | 100 | 108.6 | 95.3 |
| h-EPO | 48 hour | 100 | 77.9 | 77.0 |
| h-EPO | 72 hour | 100 | 80.1 | 75.8 |
| Luc | 24, 48 | 100 | 37.2 | 29.2 |
| | and 72 | | | |
| | hour | | | |
| F. Buffer | 24, 48 | — | 48.9 | 10.4 |
| | and 72 | | | |
| | hour | | | |

### Example 47: Routes of Administration

[1320] Further studies were performed to investigate dosing using different routes of administration. Following the protocol outlined in Example 35, 4 mice per group were dosed intramuscularly (I.M.), intravenously (IV) or subcutaneously (S.C.) by the dosing chart outlined in Table 68. Serum was collected 13 hours post injection from all mice, tissue was collected from the site of injection from the intramuscular and subcutaneous group and the spleen, liver and kidneys were collected from the intravenous group. The results from the intramuscular group and the subcutaneous group results are shown in Table 69.

TABLE 68
Dosing Chart

| | | | | Total | | Dosing |
|---|---|---|---|---|---|---|
| Group | Treatment | Route | Dose of mmRNA | Dose | | Vehicle |
| 1 | Lipoplex-human EPO mmRNA | I.M. | 4 × 100 ug + 30% | 4 × 70 | ul | Lipoplex |
| | | | Lipoplex | | | |
| 2 | Lipoplex-human EPO mmRNA | I.M. | 4 × 100 ug | 4 × 70 | ul | Buffer |
| 3 | Lipoplex-human EPO mmRNA | S.C. | 4 × 100 ug + 30% | 4 × 70 | ul | Lipoplex |
| | | | Lipoplex | | | |
| 4 | Lipoplex-human EPO mmRNA | S.C. | 4 × 100 ug | 4 × 70 | ul | Buffer |
| 5 | Lipoplex-human EPO mmRNA | I.V. | 200 ug + 30% Lipoplex | 140 | ul | Lipoplex |
| 6 | Lipoplexed-Luciferase mmRNA | I.M. | 100 ug + 30% Lipoplex | 4 × 70 | ul | Lipoplex |
| 7 | Lipoplexed-Luciferase mmRNA | I.M. | 100 ug | 4 × 70 | ul | Buffer |
| 8 | Lipoplexed-Luciferase mmRNA | S.C. | 100 ug + 30% Lipoplex | 4 × 70 | ul | Lipoplex |
| 9 | Lipoplexed-Luciferase mmRNA | S.C. | 100 ug | 4 × 70 | ul | Buffer |
| 10 | Lipoplexed-human EPO mmRNA | I.V. | 200 ug + 30% Lipoplex | 140 | ul | Lipoplex |
| 11 | Formulation Buffer | I.M. | 4× multi dosing | 4 × 70 | ul | Buffer |

TABLE 69
Human EPO Protein in Mouse Serum (I.M. Injection Route)

EPO (pg/ml)

| Formulation | I.M. Injection Route | S.C. Injection Route |
|---|---|---|
| Epo-Lipoplex | 67.115 | 2.154 |
| Luc-Lipoplex | 0 | 0 |
| Epo-Saline | 100.891 | 11.37 |
| Luc-Saline | 0 | 0 |
| Formulation Buffer | 0 | 0 |

### Example 48. Rapidly Eliminated Lipid Nanoparticle (reLNP) Studies

A. Formulation of Modified RNA reLNPs

[1321] Solutions of synthesized lipid, 1,2-distearoyl-3-phosphatidylcholine (DSPC) (Avanti Polar Lipids, Alabaster, AL), cholesterol (Sigma-Aldrich, Taufkirchen, Germany), and α-[3′-(1,2-dimyristoyl-3-propanoxy)-carboxamide-propyl]-ω-methoxy-polyoxyethylene (PEG-c-DOMG) (NOF, Bouwelven, Belgium) are prepared and stored at −20° C. The synthesized lipid is selected from DLin-DMA with an internal ester, DLin-DMA with a terminal ester, DLin-MC3-DMA-internal ester, and DLin-MC3-DMA with a terminal ester. The reLNPs are combined to yield a molar ratio of 50:10:38.5:1.5 (reLNP:DSPC:Cholesterol:PEG-c-DOMG). Formulations of the reLNPs and modified mRNA are prepared by combining the lipid solution with the modified mRNA solution at total lipid to modified mRNA weight ratio of 10:1, 15:1, 20:1 and 30:1.

### B. Characterization of Formulations

[1322] A Zetasizer Nano ZS (Malvern Instruments Ltd, Malvern, Worcestershire, UK) is used to determine the particle size, the polydispersity index (PDI) and the zeta potential of the modified mRNA nanoparticles in 1×PBS in determining particle size and 15 mM PBS in determining zeta potential.

[1323] Ultraviolet-visible spectroscopy is used to determine the concentration of modified mRNA nanoparticle formulation. After mixing, the absorbance spectrum of the solution is recorded between 230 nm and 330 nm on a DU 800 spectrophotometer (Beckman Coulter, Beckman Coulter, Inc., Brea, CA). The modified RNA concentration in the nanoparticle formulation is calculated based on the extinction coefficient of the modified RNA used in the formulation and on the difference between the absorbance at a wavelength of 260 nm and the baseline value at a wavelength of 330 nm.

[1324] QUANT-IT™ RIBOGREEN● RNA assay (Invitrogen Corporation Carlsbad, CA) is used to evaluate the encapsulation of modified RNA by the nanoparticle. The samples are diluted, transferred to a polystyrene 96 well plate, then either a TE buffer or a 2% Triton X-100 solution is added. The plate is incubated and the RIBOGREEN● reagent is diluted in TE buffer, and of this solution is added to each well. The fluorescence intensity is measured using a fluorescence plate reader (Wallac Victor 1420 Multilabel Counter; Perkin Elmer, Waltham, MA) The fluorescence values of the reagent blank are subtracted from each of the samples and the percentage of free modified RNA is determined by dividing the fluorescence intensity of the intact sample by the fluorescence value of the disrupted sample.

### C. In Vitro Incubation

[1325] Human embryonic kidney epithelial (HEK293) and hepatocellular carcinoma epithelial (HepG2) cells (LGC standards GmbH, Wesel, Germany) are seeded on 96-well plates (Greiner Bio-one GmbH-, Frickenhausen, Germany) and plates for HEK293 cells are precoated with collagen type1. HEK293 are seeded at a density of about 30,000 and HepG2 are seeded at a density of about 35,000 cells per well in 100 μl cell culture medium. Formulations containing mCherry mRNA (mRNA sequence shown in SEQ ID NO: 16103; polyA tail of approximately 160 nucleotides not shown in sequence; 5′cap, Cap1) are added directly after seeding the cells and incubated. The mCherry CDNA with the T7 promoter, 5′untranslated region (UTR) and 3′ UTR used in in vitro transcription (IVT) is given in SEQ ID NO: 16104.

[1326] Cells are harvested by transferring the culture media supernatants to a 96-well Pro-Bind U-bottom plate (Beckton Dickinson GmbH, Heidelberg, Germany). Cells are trypsinized with % volume Trypsin/EDTA (Biochrom AG, Berlin, Germany), pooled with respective supernatants and fixed by adding one volume PBS/2% FCS (both Biochrom AG, Berlin, Germany)/0.5% formaldehyde (Merck, Darmstadt, Germany). Samples are then submitted to a flow cytometer measurement with an excitation laser and a filter for PE-Texas Red in a LSRII cytometer (Beckton Dickinson GmbH, Heidelberg, Germany). The mean fluorescence intensity (MFI) of all events and the standard deviation of four independent wells are presented in for samples analyzed.

### D. In Vivo Formulation Studies

[1327] Mice are administered intravenously a single dose of a formulation containing a modified mRNA and a reLNP. The modified mRNA administered to the mice is selected from G-CSF (mRNA sequence shown in SEQ ID NO: 16102; polyA tail of approximately 160 nucleotides not shown in sequence; 5′cap, Cap1), Factor IX (mRNA shown in SEQ ID NO: 16106; polyA tail of approximately 160 nucleotides not shown in sequence; 5′cap, Cap1) or mCherry (mRNA sequence shown in SEQ ID NO:16103; polyA tail of approximately 160 nucleotides not shown in sequence; 5′cap, Cap1).

[1328] The mice are injected with 100 ug, 10 μg or 1 μg of the formulated modified mRNA and are sacrificed 8 hours after they are administered the formulation. Serum from the mice administered formulations containing human G-CSF modified mRNA are measured by specific G-CSF ELISA and serum from mice administered human Factor IX modified RNA is analyzed by specific factor IX ELISA or chromogenic assay. The liver and spleen from the mice administered with mCherry modified mRNA are analyzed by immunohistochemistry (IHC) or fluorescence-activated cell sorting (FACS). As a control, a group of mice are not injected with any formulation and their serum and tissue are collected analyzed by ELISA, FACS and/or IHC.

### Example 49. In Vitro Transfection of VEGF-A

[1329] Human vascular endothelial growth factor-isoform A (VEGF-A) modified mRNA (mRNA sequence shown in SEQ ID NO: 16115; polyA tail of approximately 160 nucleotides not shown in sequence; 5′cap, Cap1) was transfected via reverse transfection in Human Keratinocyte cells in 24 multi-well plates. Human Keratinocytes cells were grown in EPILIFE● medium with Supplement S7 from Invitrogen (Carlsbad, CA) until they reached a confluence of 50-70%. The cells were transfected with 0, 46.875, 93.75, 187.5, 375, 750, and 1500 ng of modified mRNA (mmRNA) encoding VEGF-A which had been complexed with RNAINMAX™ from Invitrogen (Carlsbad, CA). The RNA:RNAIMAX™ complex was formed by first incubating the RNA with Supplement-free EPILIFE● media in a 5× volumetric dilution for 10 minutes at room temperature. In a second vial, RNAIMAX™ reagent was incubated with Supplement-free EPILIFE● Media in a 10× volumetric dilution for 10 minutes at room temperature. The RNA vial was then mixed with the RNAIMAX™ vial and incubated for 20-30 minutes at room temperature before being added to the cells in a drop-wise fashion.

[1330] The fully optimized mRNA encoding VEGF-A (mRNA sequence shown in SEQ ID NO: 16115; polyA tail of approximately 160 nucleotides not shown in sequence; 5′cap, Cap1) transfected with the Human Keratinocyte cells included modifications during translation such as natural nucleoside triphosphates (NTP), pseudouridine at each uridine site and 5-methylcytosine at each cytosine site (pseudo-U/5 mC), and N1-methyl-pseudouridine at each uridine site and 5-methylcytosine at each cytosine site (N1-methyl-Pseudo-U/5 mC). Cells were transfected with the mmRNA encoding VEGF-A and secreted VEGF-A concentration (ρg/ml) in the culture medium was measured at 6, 12, 24, and 48 hours post-transfection for each of the concentrations using an ELISA kit from Invitrogen (Carlsbad, CA) following the manufacturers recommended instructions. These data, shown in Table 70 and FIGS. 6A, 6B and 6C, show that modified mRNA encoding VEGF-A is capable of being translated in Human Keratinocyte cells and that VEGF-A is transported out of the cells and released into the extracellular environment.

TABLE 70
VEGF-A Dosing and Protein Secretion

| | | | | |
|---|---|---|---|---|
| | 6 hours | 12 hours | 24 hours | 48 hours |
| Dose (ng) | (pg/ml) | (pg/ml) | (pg/ml) | (pg/ml) |

VEGF-A Dose Containing Natural NTPs

| | | | | |
|---|---|---|---|---|
| 46.875 | 10.37 | 18.07 | 33.90 | 67.02 |
| 93.75 | 9.79 | 20.54 | 41.95 | 65.75 |
| 187.5 | 14.07 | 24.56 | 45.25 | 64.39 |
| 375 | 19.16 | 37.53 | 53.61 | 88.28 |
| 750 | 21.51 | 38.90 | 51.44 | 61.79 |
| 1500 | 36.11 | 61.90 | 76.70 | 86.54 |

VEGF-A Dose Containing Pseudo-U/5mC

| | | | | |
|---|---|---|---|---|
| 46.875 | 10.13 | 16.67 | 33.99 | 72.88 |
| 93.75 | 11.00 | 20.00 | 46.47 | 145.61 |
| 187.5 | 16.04 | 34.07 | 83.00 | 120.77 |
| 375 | 69.15 | 188.10 | 448.50 | 392.44 |
| 750 | 133.95 | 304.30 | 524.02 | 526.58 |
| 1500 | 198.96 | 345.65 | 426.97 | 505.41 |

VEGF-A Dose Containing N1-methyl-Pseudo-U/5mC

| | | | | |
|---|---|---|---|---|
| 46.875 | 0.03 | 6.02 | 27.65 | 100.42 |
| 93.75 | 12.37 | 46.38 | 121.23 | 167.56 |
| 187.5 | 104.55 | 365.71 | 1025.41 | 1056.91 |
| 375 | 605.89 | 1201.23 | 1653.63 | 1889.23 |
| 750 | 445.41 | 1036.45 | 1522.86 | 1954.81 |
| 1500 | 261.61 | 714.68 | 1053.12 | 1513.39 |

### Example 50. In Vivo Studies of Factor IX

[1331] Human Factor IX mmRNA (Gen1; fully modified 5-methylcytosine and pseudouridine) formulated in formulation buffer was delivered to mice via intramuscular injection. The results demonstrate that Factor IX protein was elevated in serum as measured 13 hours after administration.

[1332] In this study, mice (N=5 for Factor IX, N=3 for Luciferase or Buffer controls) were intramuscularly injected with 50 μl of the Factor IX mmRNA (mRNA sequence shown in SEQ ID NO: 16106; polyA tail of approximately 160 nucleotides not shown in sequence; 5′cap, Cap1), Luciferase (IVT cDNA sequence shown in SEQ ID NO: 16111: mRNA sequence shown in SEQ ID NO: 16112, polyA tail of approximately 160 nucleotides not shown in sequence, 5′cap, Cap1 fully modified with 5-methylcytosine at each cytosine and pseudouridine replacement at each uridine site) or the formulation buffer (F.Buffer) at 2×100 ug/Mouse. The mice were bled at 13 hours after the intramuscular injection to determine the concentration of human the polypeptide in serum in pg/mL. The results revealed that administration of Factor IX mmRNA resulted in levels of 1600 μg/mL at 13 hours as compared to less than 100 μg/mL of Factor IX for either Luciferase or buffer control administration.

### Example 51. Multi-Site Administration: Intramuscular and Subcutaneous

[1333] Human G-CSF modified mRNA (mRNA sequence shown in SEQ ID NO: 16102; polyA, tail of approximately 160 nucleotides not shown in sequence; 5′cap, Cap1) modified as either Gen1 or Gen2 (5-methylcytosine (5mc) and a pseudouridine (ψ) modification, G-CSF-Gen1; or N1-5-methylcytosine (N1-5mc) and a ψ modification, G-CSF-Gen2) and formulated in formulation buffer were delivered to mice via intramuscular (IM) or subcutaneous (SC) injection. Injection of four doses or 2× 50 ug (two sites) daily for three days (24 hrs interval) was performed. The fourth dose was administered 6 hrs before blood collection and CBC analysis. Controls included Luciferase (IVT cDNA sequence shown in SEQ ID NO: 16111; mRNA sequence shown in SEQ ID NO: 16112, polyA tail of approximately 160 nucleotides not shown in sequence, 5′cap, Cap1, fully modified with 5-methylcytosine at each cytosine and pseudouridine replacement at each uridine site) or the formulation buffer (F.Buffer). The mice were bled at 72 hours after the first mRNA injection (6 hours after the last modified mRNA dose) to determine the effect of mRNA-encoded human G-CSF on the neutrophil count. The dosing regimen is shown in Table 71 as are the resulting neutrophil counts (thousands/uL). In Table 71, an asterisk(*) indicates statistical significance at p<0.05.

[1334] For intramuscular administration, the data reveal a four fold increase in neutrophil count above control at day 3 for the Gen1 G-CSF mRNA and a two fold increase for the Gen2 G-CSF mmRNA. For subcutaneous administration, the data reveal a two fold increase in neutrophil count above control at day 3 for the Gen2 G-CSF mRNA.

[1335] These data demonstrate that both 5-methylcytidine/pseudouridine and 5-methylcytidine/N1-methyl-pseudouridine-modified mRNA can be biologically active, as evidenced by specific increases in blood neutrophil counts.

TABLE 71
Dosing Regimen

| | | | | | Dose | | |
|---|---|---|---|---|---|---|---|
| | | | | | Vol. | | |
| | | | | Dose | (μl/ | Dosing | Neutrophil |
| Gr. | Treatment | Route | N= | (μg/mouse) | mouse) | Vehicle | Thous/uL |
| 1 | G-CSF | I.M | 5 | 2 × 50 ug | 50 | F. buffer | 840* |
| | (Gen1) | | | (four doses) | | | |
| 2 | G-CSF | S.C | 5 | 2 × 50 ug | 50 | F. buffer | 430 |
| | (Gen1) | | | (four doses) | | | |
| 3 | G-CSF | I.M | 5 | 2 × 50 ug | 50 | F. buffer | 746* |
| | (Gen2) | | | (four doses) | | | |
| 4 | G-CSF | S.C | 5 | 2 × 50 ug | 50 | F. buffer | 683 |
| | (Gen2) | | | (four doses) | | | |
| 5 | Luc | I.M. | 5 | 2 × 50 ug | 50 | F. buffer | 201 |
| | (Gen1) | | | (four doses) | | | |
| 6 | Luc | S.C. | 5 | 2 × 50 ug | 50 | F. buffer | 307 |
| | (Gen1) | | | (four doses) | | | |
| 7 | Luc | I.M | 5 | 2 × 50 ug | 50 | F. buffer | 336 |
| | (Gen2) | | | (four doses) | | | |
| 8 | Luc | S.C | 5 | 2 × 50 ug | 50 | F. buffer | 357 |
| | (Gen2) | | | (four doses) | | | |
| 9 | F. Buffer | I.M | 4 | 0 | 50 | F. buffer | 245 |
| | | | | (four doses) | | | |
| 10 | F. Buffer | S.C. | 4 | 0 | 50 | F. buffer | 509 |
| | | | | (four doses) | | | |
| 11 | Untreated | — | 4 | | | — | 312 |

### Example 52. Intravenous Administration

[1336] Human G-CSF modified mRNA (mRNA sequence shown in SEQ ID NO: 16102; polyA tail of approximately 160 nucleotides not shown in sequence; 5′cap, Cap1) modified with 5-methylcytosine (5mc) and a pseudouridine (ψ) modification (Gen 1); or having no modifications and formulated in 10% lipoplex (RNAiMax) were delivered to mice at a dose of 50 ug RNA and in a volume of 100 ul via intravenous (IV) injection at days 0, 2 and 4. Neutrophils were measured at days 1, 5 and 8. Controls included non-specific mammalian RNA or the formulation buffer alone (F.Buffer). The mice were bled at days 1, 5 and 8 to determine the effect of modified m N-A-encoded human G-CSF to increase neutrophil count. The dosing regimen is shown in Table 72 as are the resulting neutrophil counts (thousands/uL; K/uL).

[1337] For intravenous administration, the data reveal a four to five fold increase in neutrophil count above control at day 5 with G-CSF modified mRNA but not with unmodified G-CSF mRNA or non-specific controls. Blood count returned to baseline four days after the final injection. No other changes in leukocyte populations were observed.

[1338] In Table 72, an asterisk(*) indicates statistical significance at p<0.001 compared to buffer.

[1339] These data demonstrate that lipoplex-formulated 5-methylcytidine/pseudouridine-modified mRNA can be biologically active, when delivered through an I.V. route of administration as evidenced by specific increases in blood neutrophil counts. No other cell subsets were significantly altered. Unmodified G-CSF mRNA similarly administered showed no pharmacologic effect on neutrophil counts.

TABLE 72
Dosing Regimen

| | | | | Dose Vol. | Dosing | Neutrophil |
|---|---|---|---|---|---|---|
| Gr. | Day | Treatment | N= | (μl/mouse) | Vehicle | K/uL |
| 1 | 1 | G-CSF (Gen1) | 5 | 100 | 10% lipoplex | 2.91 |
| 2 | 5 | G-CSF (Gen1) | 5 | 100 | 10% lipoplex | 5.32* |
| 3 | 8 | G-CSF (Gen1) | 5 | 100 | 10% lipoplex | 2.06 |
| 4 | 1 | G-CSF (no | 5 | 100 | 10% lipoplex | 1.88 |
| | | modification) | | | | |
| 5 | 5 | G-CSF (no | 5 | 100 | 10% lipoplex | 1.95 |
| | | modification) | | | | |
| 6 | 8 | G-CSF (no | 5 | 100 | 10% lipoplex | 2.09 |
| | | modification) | | | | |
| 7 | 1 | RNA control | 5 | 100 | 10% lipoplex | 2.90 |
| 8 | 5 | RNA control | 5 | 100 | 10% lipoplex | 1.68 |
| 9 | 8 | RNA control | 4 | 100 | 10% lipoplex | 1.72 |
| 10 | 1 | F. Buffer | 4 | 100 | 10% lipoplex | 2.51 |
| 11 | 5 | F. Buffer | 4 | 100 | 10% lipoplex | 1.31 |
| 12 | 8 | F. Buffer | 4 | 100 | 10% lipoplex | 1.92 |

### Example 53. Saline Formulation: Intramuscular Administration

### A. Protein Expression

[1340] Human G-CSF modified mRNA (mRNA sequence shown in SEQ ID NO: 16102; polyA tail of approximately 160 nucleotides not shown in sequence; 5′cap, Cap1) and human EPO mmRNA (mRNA sequence shown in SEQ ID NO: 16105; poly A tail of approximately 160 nucleotides not shown in sequence; 5′cap, Cap 1); G-CSF modified mRNA (modified with 5-methylcytosine (5mc) and pseudouridine (y)) and EPO modified mRNA (modified with N1-5-methylcytosine (N1-5mc) and ψ modification), were formulated in formulation buffer (150 mM sodium chloride, 2 mM calcium chloride, 2 mM phosphate, 0.5 mM EDTA at a pH of 6.5) and delivered to mice via intramuscular (IM) injection at a dose of 100 ug.

[1341] Controls included Luciferase (IVT cDNA sequence shown in SEQ ID NO: 16111; mRNA sequence shown in SEQ ID NO: 16112, polyA tail of approximately 160 nucleotides not shown in sequence, 5′cap, Cap1, fully modified with 5-methylcytosine at each cytosine and pseudouridine replacement at each uridine site) or the formulation buffer (F.Buffer). The mice were bled at 13 hours after the injection to determine the concentration of the human polypeptide in serum in pg/mL (G-CSF groups measured human G-CSF in mouse serum and EPO groups measured human EPO in mouse serum). The data are shown in Table 73.

TABLE 73
Dosing Regimen

| | | | Dose | | Average |
|---|---|---|---|---|---|
| | | | Vol. | Dosing | Protein Product |
| Group | Treatment | N= | (μl/mouse) | Vehicle | pg/mL, serum |
| G-CSF | G-CSF | 5 | 50 | Saline | 19.8 |
| G-CSF | Luciferase | 5 | 50 | Saline | 0.5 |
| G-CSF | F. buffer | 5 | 50 | F. buffer | 0.5 |
| EPO | EPO | 5 | 50 | Saline | 191.5 |
| EPO | Luciferase | 5 | 50 | Saline | 15.0 |
| EPO | F. buffer | | | F. buffer | 4.8 |

### B. Dose Response

[1342] Human EPO modified mRNA (mRNA sequence shown in SEQ ID NO: 16105; polyA tail of approximately 160 nucleotides not shown in sequence; 5′cap, Cap1; fully modified with 5-methylcytosine and pseudouridine) were formulated in formulation buffer and delivered to mice via intramuscular (IM) injection.

[1343] Controls included Luciferase (mRNA sequence shown in SEQ ID NO: 16112, polyA tail of approximately 160 nucleotides not shown in sequence, 5′cap, Cap1, fully modified with 5-methylcytosine and pseudouridine) or the formulation buffer (F.Buffer), The mice were bled at 13 hours after the injection to determine the concentration of the human polypeptide in serum in pg/mL. The dose and expression are shown in Table 74.

TABLE 74
Dosing Regimen and Expression

| | | Average |
|---|---|---|
| | Dose Vol. | Protein Product |
| Treatment | (μl/mouse) | pg/mL, serum |
| EPO | 100 | 96.2 |
| EPO | 50 | 63.5 |
| EPO | 25 | 18.7 |
| EPO | 10 | 25.9 |
| EPO | 1 | 2.6 |
| Luciferase | 100 | 0.0 |
| F. buffer | 100 | 1.0 |

### Example 54. EPO Multi-Dose/Multi-Administration

[1344] Studies utilizing multiple intramuscular injection sites at one time point were designed and performed.

[1345] The design of a single multi-dose experiment involved using human erythropoietin (EPO) mmRNA (mRNA sequence shown in SEQ ID NO: 16105; polyA tail of approximately 160 nucleotides not shown in sequence; 5′cap, Cap1) or G-CSF mmRNA (mRNA sequence shown in SEQ ID NO: 16102; polyA tail of approximately 160 nucleotides not shown in sequence; 5′cap, (Cap1) administered in formulation buffer. The dosing vehicle (F.buffer) was used as a control. The EPO and G-CSF modified mRNA were modified with 5-methylcytosine at each cytosine and pseudouridine replacement at each uridine site.

[1346] Animals (n=5), Sprague-Dawley rats, were injected IM (intramuscular) for the single unit dose of 100 ug (delivered to one thigh). For multi-dosing 6 doses of 100 ug (delivered to two thighs) were used for both EPO and G-CSF mmRNA. Control dosing involved use of buffer at a single dose. Human EPO blood levels were evaluated 13 hrs post injection.

[1347] Human EPO protein was measured in rat serum 13 hrs post intramuscular injection. Five groups of rats were treated and evaluated. The results are shown in Table 75.

TABLE 75
Multi-dose study

| | | | | Avg. Pg/mL |
|---|---|---|---|---|
| | | Dose of | Total | human EPO, |
| Group | Treatment | mmRNA | Dose | serum |
| 1 | Human EPO | 1 × 100 ug | 100 ug | 143 |
| | mmRNA | | | |
| 2 | Human EPO | 6 × 100 ug | 600 ug | 256 |
| | mmRNA | | | |
| 3 | G-CSF mmRNA | 1 × 100 ug | 100 ug | 43 |
| 4 | G-CSF mmRNA | 6 × 100 ug | 600 ug | 58 |
| 5 | Buffer Alone | — | — | 20 |

### Example 55. Signal Sequence Exchange Study

[1348] Several variants of mmRNAs encoding human Granulocyte colony stimulating factor (G-CSF) (mRNA, sequence shown in SEQ ID NO: 16102; polyA tail of approximately 160 nucleotides not shown in sequence; 5′cap, Cap1) were synthesized using modified nucleotides pseudouridine and 5-methylcytosine (pseudo-U/5 mC). These variants included the G-CSF constructs encoding either the wild-type N terminal secretory signal peptide sequence (MAGPATQSPMKLMALQLLLWHSALWTVQEA; SEQ ID NO: 95), no secretory signal peptide sequence, or secretory signal peptide sequences taken from other mRNAs. These included sequences where the wild type G-CSF signal peptide sequence was replaced with the signal peptide sequence of either: human α-1-anti trypsin (AAT) (MMPSSVSWGILLLAGLCCLVPVSLA; SEQ ID NO: 94), human Factor IX (FIX) (MQRVNMIMAESPSLITICLLGYLLSAECTVFLDHENANKILNRPKR; SEQ ID NO: 96), human Prolactin (Prolac) (MKGSLLLLLVSNLLLCQSVAP; SEQ ID NO: 97), or human Albumin (Alb) (MKWVTFISLLFLFSSAYSRGVFRR; SEQ ID NO: 98).

[1349] 250 ng of modified mRNA encoding each G-CSF variant was transfected into HEK293A (293A in the table), mouse myoblast (MM in the table) (C2C12, CRL-1772, ATCC) and rat myoblast (RM in the table) (L6 line, CRL-1458, ATCC) cell lines in a 24 well plate using 1 ul of Lipofectamine 2000 (Life Technologies), each well containing 300,000 cells. The supernatants were harvested after 24 hrs and the secreted G-CSF protein was analyzed by ELISA using the Human G-CSF ELISA kit (Life Technologies). The data shown in Table 76 reveal that cells transfected with G-CSF mmRNA encoding the Albumin signal peptide secrete at least 12 fold more G-CSF protein than its wild type counterpart.

TABLE 76
Signal Peptide Exchange

| | 293A | MM | RM |
|---|---|---|---|
| Signal peptides | (pg/ml) | (pg/ml) | (pg/ml) |
| G-CSF Natural | 9650 | 3450 | 6050 |
| α-1-anti trypsin | 9950 | 5000 | 8475 |
| Factor IX | 11675 | 6175 | 11675 |
| Prolactin | 7875 | 1525 | 9800 |
| Albumin | 122050 | 81050 | 173300 |
| No Signal peptide | 0 | 0 | 0 |

### Example 56. Cytokine Study: PBMC

### A. PBMC Isolation and Culture

[1350] 50 mL of human blood from two donors was received from Research Blood Components (lots KP30928 and KP30931) in sodium heparin tubes. For each donor, the blood was pooled and diluted to 70 mL with DPBS (SAFC Bioscience 59331C, lot 071M8408) and split evenly between two 50 mL conical tubes. 10 mL of Ficoll Paque (GE Healthcare 17-5442-03, lot 10074400) was gently dispensed below the blood layer. The tubes were centrifuged at 2000 rpm for 30 minutes with low acceleration and braking. The tubes were removed and the buffy coat PBMC layers were gently transferred to a fresh 50 mL conical and washed with DPBS. The tubes were centrifuged at 1450 rpm for 10 minutes.

[1351] The supernatant was aspirated and the PBMC pellets were resuspended and washed in 50 mL of DPBS. The tubes were centrifuged at 1250 rpm for 10 minutes. This wash step was repeated, and the PBMC pellets were resuspended in 19 mL of Optimem 1 (Gibco 11058, lot 1072088) and counted. The cell suspensions were adjusted to a concentration of 3.0×10\hat{ }6 cells/mL live cells.

[1352] These cells were then plated on five 96 well tissue culture treated round bottom plates (Costar 3799) per donor at 50 uL per well. Within 30 minutes, transfection mixtures were added to each well at a volume of 50 uL per well. After 4 hours post transfection, the media was supplemented with 10 μL of Fetal Bovine Serum (Gibco 10082, lot 1012368)

### B. Transfection Preparation

[1353] mmRNA encoding human G-CSF (mRNA sequence shown in SEQ ID NO: 16102; polyA tail of approximately 160 nucleotides not shown in sequence; 5′cap, Cap1) (containing either (1) natural NTPs, (2) 100% substitution with 5-methyl cytidine and pseudouridine, or (3) 100% substitution with 5-methyl cytidine and N1-methyl-pseudouridine; mmRNA encoding luciferase (IVT cDNA sequence shown in SEQ ID NO: 16111; mRNA sequence shown in SEQ ID NO: 16112, polyA tail of approximately 160 nucleotides not shown in sequence. 5′cap, Cap1, fully modified with 5-methylcytosine at each cytosine and pseudouridine replacement at each uridine site) (containing either (1) natural NTPs or (2) 100% substitution with 5-methyl cytidine and pseudouridine) and TLR agonist R848 (Invivogen tlrl-r848) were diluted to 38.4 ng/uL in a final volume of 2500 uL Optimem 1.

[1354] Separately, 432 μL of Lipofectamine 2000 (Invitrogen 11668-027, lot 1070962) was diluted with 13.1 mL Optimem 1. In a 96 well plate nine aliquots of 135 μL of each mmRNA, positive control (R-848) or negative control (Optimem I) was added to 135 μL of the diluted Lipofectamine 2000. The plate containing the material to be transfected was incubated for 20 minutes. The transfection mixtures were then transferred to each of the human PBMC plates at 50 uL per well. The plates were then incubated at 37 C. At 2, 4, 8, 20, and 44 hours each plate was removed from the incubator, and the supernatants were frozen.

[1355] After the last plate was removed, the supernatants were assayed using a human G-CSF ELISA kit (Invitrogen KHC2032) and human IFN-alpha ELISA kit (Thermo Scientific 41105-2). Each condition was done in duplicate.

### C. Results

[1356] The ability of unmodified and modified mRNA (mmRNAs) to produce the encoded protein was assessed (G-CSF production) over time as was the ability of the mRNA to trigger innate immune recognition as measured by interferon-alpha production. Use of in vitro PBMC cultures is an accepted way to measure the immunostimulatory potential of oligonucleotides (Robbins et al., Oligonucleotides 2009 19:89-102; herein incorporated by reference in its entirety).

[1357] Results were interpolated against the standard curve of each ELISA plate using a four parameter logistic curve fit. Shown in Tables 77 and 78 are the average from 2 separate PBMC donors of the G-CSF and IFN-alpha production over time as measured by specific ELISA.

[1358] In the G-CSF ELISA, background signal from the Lipofectamine 2000 untreated condition was subtracted at each timepoint. The data demonstrated specific production of human G-CSF protein by human peripheral blood mononuclear is seen with G-CSF mRNA containing natural NTPs, 100% substitution with 5-methyl cytidine and pseudouridine, or 100% substitution with 5-methyl cytidine and N1-methyl-pseudouridine. Production of G-CSF was significantly increased through the use of modified mRNA relative to unmodified mRNA, with the 5-methyl cytidine and N1-methyl-pseudouridine containing G-CSF mmRNA showing the highest level of G-CSF production. With regards to innate immune recognition, unmodified mRNA resulted in substantial IFN-alpha production, while the modified mRNA largely prevented interferon-alpha production. G-CSF mRNA fully modified with 5-methyl cytidine and N1-methyl-pseudouridine did not significantly increase cytokines whereas G-CSF mRNA fully modified with 5-methyl cytidine and pseudouridine induced IFN-alpha, TNF-alpha and IP10. Many other cytokines were not affected by either modification.

TABLE 77
G-CSF Signal
G-CSF signal - 2 Donor Average

| pg/mL | 2 Hr | 4 Hr | 8 Hr | 20 Hr | 44 Hr |
|---|---|---|---|---|---|
| G-CSF (5mC/pseudouridine) | 120.3 | 136.8 | 421.0 | 346.1 | 431.8 |
| G-CSF (5mC/N1-methyl- | 256.3 | 273.7 | 919.3 | 1603.3 | 1843.3 |
| pseudouridine) | | | | | |
| GCSF(Natural-no modification) | 63.5 | 92.6 | 129.6 | 258.3 | 242.4 |
| Luciferase (5mC/pseudouridine) | 4.5 | 153.7 | 33.0 | 186.5 | 58.0 |

TABLE 78
IFN-alpha signal
IFN-alpha signal - 2 donor average

| pg/mL | 2 Hr | 4 Hr | 8 Hr | 20 Hr | 44 Hr |
|---|---|---|---|---|---|
| G-CSF (5mC/pseudouridine) | 21.1 | 2.9 | 3.7 | 22.7 | 4.3 |
| G-CSF (5mC/N1-methyl- | 0.5 | 0.4 | 3.0 | 2.3 | 2.1 |
| pseudouridine) | | | | | |
| G-CSF(Natural) | 0.0 | 2.1 | 23.3 | 74.9 | 119.7 |
| Luciferase (5mC/pseudouridine) | 0.4 | 0.4 | 4.7 | 1.0 | 2.4 |
| R-848 | 39.1 | 151.3 | 278.4 | 362.2 | 208.1 |
| Lpf. 2000 control | 0.8 | 17.2 | 16.5 | 0.7 | 3.1 |

### Example 57. Chemical Modification Ranges of Modified mRNA

[1359] Modified nucleotides such as, but not limited to, the chemical modifications 5-methylcytosine and pseudouridine have been shown to lower the innate immune response and increase expression of RNA in mammalian cells. Surprisingly, and not previously known, the effects manifested by the chemical modifications can be titrated when the amount of chemical modification is less than 100%. Previously, it was believed that full modification was necessary and sufficient to elicit the beneficial effects of the chemical modifications and that less than 100% modification of an mRNA had little effect. However, it has now been shown that the benefits of chemical modification can be derived using less than complete modification and that the effects are target, concentration and modification dependent.

A. Modified RNA transfected in PBMC

[1360] 960 ng of G-CSF mRNA modified with 5-methylcytosine (5 mC) and pseudouridine (pseudoU) or unmodified G-CSF mRNA was transfected with 0.8 uL of Lipofectamine 2000 into peripheral blood mononuclear cells (PBMC) from three normal blood donors (D1, D2, D3). The G-CSF mRNA (mRNA sequence shown in SEQ ID NO: 16102; polyA tail of approximately 160 nucleotides not shown in sequence; 5′cap, Cap1) was completely modified with 5 mC and pseudoU (100% modification), not modified with 5 mC and pseudoU (0% modification) or was partially modified with 5 mC and pseudoU so the mRNA would contain 50% modification, 25% modification, 10% modification, %5 modification, 1% modification or 0.1% modification, A control sample of Luciferase (mRNA sequence shown in SEQ ID NO: 16112; polyA tail of approximately 160 nucleotides not shown in sequence; 5′cap, Cap1; fully modified 5meC and pseudoU) was also analyzed for G1-CSF expression. For TNF-alpha and IFN-alpha control samples of Lipofectamine2000, LPS, R-848, Luciferase (mRNA sequence shown in SEQ ID NO: 16112; polyA tail of approximately 160 nucleotides not shown in sequence; 5′cap, Cap 1; fully modified 5 mC and pseudo), and P(I)P(C) were also analyzed. The supernatant was harvested and run by ELISA 22 hours after transfection to determine the protein expression. The expression of G-CSF is shown in Table 79 and the expression of IFN-alpha and TNF-alpha is shown in Table 80. The expression of IFN-alpha and TNF-alpha may be a secondary effect from the transfection of the G-CSF mRNA. Tables 79 and 80 show that the amount of chemical modification of G-CSF, IFN-alpha and TNF-alpha is titratable when the mRNA is not fully modified and the titratable trend is not the same for each target.

TABLE 79
G-CSF Expression

| | G-CSF Expression | | |
|---|---|---|---|
| | (pg/ml) | | |
| | D1 | D2 | D3 |
| 100% modification | 270.3 | 151.6 | 162.2 |
| 50% modification | 45.6 | 19.8 | 26.3 |
| 25% modification | 23.6 | 10.8 | 8.9 |
| 10% modification | 39.4 | 12.9 | 12.9 |
| 5% modification | 70.9 | 26.8 | 26.3 |
| 1% modification | 70.3 | 26.9 | 66.9 |
| 0.1% modification | 67.5 | 25.2 | 28.7 |
| Luciferase | 14.5 | 3.1 | 10.0 |

TABLE 80
IFN-alpha and TNF-alpha Expression

| | IFN-alpha Expression | | | TNF-alpha Expression | | |
|---|---|---|---|---|---|---|
| | (pg/ml) | | | (pg/ml) | | |
| | D1 | D2 | D3 | D1 | D2 | D3 |
| 100% modification | 76.8 | 6.8 | 15.1 | 5.6 | 1.4 | 21.4 |
| 50% modification | 22.0 | 5.5 | 257.3 | 4.7 | 1.7 | 12.1 |
| 25% modification | 64.1 | 14.9 | 549.7 | 3.9 | 0.7 | 10.1 |
| 10% modification | 150.2 | 18.8 | 787.8 | 6.6 | 0.9 | 13.4 |
| 5% modification | 143.9 | 41.3 | 1009.6 | 2.5 | 1.8 | 12.0 |
| 1% modification | 189.1 | 40.5 | 375.2 | 9.1 | 1.2 | 25.7 |
| 0.1% modification | 261.2 | 37.8 | 392.8 | 9.0 | 2. | 13.7 |
| 0% modification | 230.3 | 45.1 | 558.3 | 10.9 | 1.4 | 10.9 |
| LF 200 | 0 | 0 | 1.5 | 45.8 | 2.8 | 53.6 |
| LPS | 0 | 0 | 1.0 | 114.5 | 70.0 | 227.0 |
| R-848 | 39.5 | 11.9 | 183.5 | 389.3 | 256.6 | 410.6 |
| Luciferase | 9.1 | 0 | 3.9 | 4.5 | 2.7 | 13.6 |
| P(I)P(C) | 1498.1 | 216.8 | 238.8 | 61.2 | 4.4 | 69.1 |

### B. Modified RNA Transfected in HEK293

[1361] Human embryonic kidney epithelial (HEK293) cells were seeded on 96-well plates at a density of 30,000 cells per well in 100 ul cell culture medium. 250 ng of modified G-CSF mRNA (mRNA sequence shown in SEQ ID NO: 16102; polyA tail of approximately 160 nucleotides not shown, in sequence; 5′cap, Cap1) formulated with RNAiMAX (Invitrogen, Carlsbad, CA) was added to a well. The G-CSF was completely modified with 5 mC and pseudoU (100% modification), not modified with 5 mC and pseudoU (0% modification) or was partially modified with 5 mC and pseudoU so the mRNA would contain 75% modification, 50% modification or 25% modification. Control samples (AK 5/2, mCherry mRNA (mRNA sequence shown in SEQ ID NO: 16103; polyA tail of approximately 160 nucleotides not shown in sequence; 5′cap, Cap1; fully modified 5 mC and pseudoU) and untreated) were also analyzed. The half-life of G-CSF mRNA fully modified with 5-methylcytosine and pseudouridine is approximately 8-10 hours. The supernatants were harvested after 16 hours and the secreted G-CSF protein was analyzed by ELISA. Table 81 shows that the amount of chemical modification of G-CSF is titratable when the mRNA is not fully modified.

TABLE 81
G-CSF Expression

| | G-CSF Expression |
|---|---|
| | (ng/ml) |
| 100% modification | 118.4 |
| 75% modification | 101.9 |
| 50% modification | 105.7 |
| 25% modification | 231.1 |
| 0% modification | 270.9 |
| AK 5/2 | 166.8 |
| mCherry | 0 |
| Untreated | 0 |

### Example 58: In Vivo Delivery of Modified mRNA (mmRNA)

[1362] Modified RNA was delivered to C57/BL6 mice intramuscularly, subcutaneously, or intravenously to evaluate the bio-distribution of modified RNA using luciferase. A formulation buffer used with all delivery methods contained 150 mM sodium chloride, 2 mM calcium chloride, 2 mM Na+-phosphate which included 1.4 mM monobasic sodium phosphate and 0.6 mM of dibasic sodium phosphate, and 0.5 mM ethylenediaminetetraacetic acid (EDTA) was adjusted using sodium hydroxide to reach a final pH of 6.5 before being filtered and sterilized. A 1× concentration was used as the delivery buffer. To create the lipoplexed solution delivered to the mice, in one vial 50 μg of RNA was equilibrated for 10 minutes at room temperature in the delivery buffer and in a second vial 10 μl RNAiMAX™ was equilibrated for 10 minutes at room temperature in the delivery buffer. After equilibrium, the vials were combined and delivery buffer was added to reach a final volume of 100 μL which was then incubated for 20 minutes at room temperature. Luciferin was administered by intraperitoneal injection (IP) at 150 mg/kg to each mouse prior to imaging during the plateau phase of the luciferin exposure curve which was between 15 and 30 minutes. To create luciferin, 1 g of D-luciferin potassium or sodium salt was dissolved in 66.6 ml of distilled phosphate buffer solution (DPBS), not containing Mg2+ or Ca2+, to make a 15 mg/ml solution. The solution was gently mixed and passed through a 0.2 μm syringe filter, before being purged with nitrogen, aliquoted and frozen at −80° C. while being protected from light as much as possible. The solution was thawed using a waterbath if luciferin was not dissolved, gently mixed and kept on ice on the day of dosing.

[1363] Whole body images were taken of each mouse 2, 8 and 24 hours after dosing. Tissue images and serum was collected from each mouse 24 hours after dosing. Mice administered doses intravenously had their liver, spleen, kidneys, lungs, heart, peri-renal adipose tissue and thymus imaged. Mice administered doses intramuscularly or subcutaneously had their liver, spleen, kidneys, lungs, peri-renal adipose tissue, and muscle at the injection site. From the whole body images the bioluminescence was measured in photon per second for each route of administration and dosing regimen.

### A. Intramuscular Administration

[1364] Mice were intramuscularly (I.M.) administered either modified luciferase mRNA fully modified with 5-methylcytosine and pseudouridine (Naked-Luc), lipoplexed modified luciferase mRNA fully modified with 5-methylcytosine and pseudouridine (Lipoplex-luc) (IVT cDNA sequence shown in SEQ ID NO: 16111; mRNA sequence shown in SEQ ID NO: 16112, polyA tail of approximately 160 nucleotides not shown in sequence, 5′cap, Cap1, fully modified with 5-methylcytosine at each cytosine and pseudouridine replacement at each uridine site), lipoplexed modified granulocyte colony-stimulating factor (G-CSF) mRNA (mRNA sequence shown in SEQ ID NO: 16102; polyA tail of approximately 160 nucleotides not shown in sequence; 5′cap, Cap1; fully modified with 5-methylcytosine and pseudouridine) (Lipoplex-Cytokine) or the formation buffer at a single dose of 50 μg of modified RNA in an injection volume of 50 μl for each formulation in the right hind limb and a single dose of 5 μg of modified RNA in an injection volume of 50 μl in the left hind limb. The bioluminescence average for the luciferase expression signals for each group at 2, 8 and 24 hours after dosing are shown in Table 82. The bioluminescence showed a positive signal at the injection site of the 5 μg and 50 μg modified RNA formulations containing and not containing lipoplex.

TABLE 82
In vivo Biophotoic Imaging (I.M. Injection Route)

| | Dose | Bioluminescence (photon/sec) | | |
|---|---|---|---|---|
| Formulation | (ug) | 2 hours | 8 hours | 24 hours |
| Naked-Luc | 5 | 224,000 | 683,000 | 927,000 |
| Lipolplex-Luc | 5 | 579,000 | 639,000 | 186,000 |
| Lipoplex-G-CSF | 5 | 64,600 | 85,600 | 75,100 |
| Formulation Buffer | 5 | 102,000 | 86,000 | 90,700 |
| Naked-Luc | 50 | 446,000 | 766,000 | 509,000 |
| Lipolplex-Luc | 50 | 374,000 | 501,000 | 332,000 |
| Lipoplex-G-CSF | 50 | 49,400 | 74,800 | 74,200 |
| Formulation Buffer | 50 | 59,300 | 69,200 | 63,600 |

### B. Subcutaneous Administration

[1365] Mice were subcutaneously (S.C.) administered either modified luciferase mRNA (Naked-Luc), lipoplexed modified luciferase mRNA (Lipoplex-luc), lipoplexed modified G-CSF mRNA (Lipoplex-G-CSF) or the formation buffer at a single dose of 50 μg of modified mRNA in an injection volume of 100 ul for each formulation. The bioluminescence average for the luciferase expression signals for each group at 2, 8 and 24 hours after dosing are shown in Table 83. The bioluminescence showed a positive signal at the injection site of the 50 μg modified mRNA formulations containing and not containing lipoplex.

TABLE 83
In vivo Biophotoic Imaging (S.C. Injection Route)

| | Bioluminescence (photon/sec) | | |
|---|---|---|---|
| Formulation | 2 hours | 8 hours | 24 hours |
| Naked-Luc | 3,700,000 | 8,060,000 | 2,080,000 |
| Lipolplex-Luc | 3,960,000 | 1,700,000 | 1,290,000 |
| Lipoplex-G-CSF | 123,000 | 121,000 | 117,000 |
| Formulation Buffer | 116,000 | 127,000 | 123,000 |

### C. Intravenous Administration

[1366] Mice were intravenously (I.V.) administered either modified luciferase mRNA (Naked-Luc), lipoplexed modified luciferase mRNA (Lipoplex-luc), lipoplexed modified G-CSF mRNA (Lipoplex-G-CSF) or the formation buffer at a single dose of 50 μg of modified mRNA in an injection volume of 100 ul for each formulation. The bioluminescence average for the luciferase expression signal in the spleen from each group at 2 hours after dosing is shown in Table 84, The bioluminescence showed a positive signal in the spleen of the 50 ug modified mRNA formulations containing lipoplex.

TABLE 84
In vivo Biophotoic Imaging (I.V. Injection Route)

| | Bioluminescence |
|---|---|
| | (photon/sec) |
| Formulation | of the Spleen |
| Naked-Luc | 58,400 |
| Lipolplex-Luc | 65,000 |
| Lipoplex-G-CSF | 57,100 |
| Formulation Buffer | 58,300 |

### Example 59. Buffer Formulation Studies

[1367] G-CSF modified mRNA. (mRNA sequence shown in SEQ ID NO: 16102; polyA tail of approximately 160 nucleotides not shown in sequence; 5′cap, Cap1; fully modified with N1-pseudouridine and 5-methylcytosine) or Factor IX modified mRNA (mRNA sequence shown in SEQ ID NO: 16106; polyA tail of approximately 160 nucleotides not shown in sequence; 5′cap, Cap1; fully modified with N1-pseudouridine and 5-methylcytosine) in a buffer solution is administered intramuscularly to rats in an injection volume of 50 μl (n=5) at a modified mRNA dose of 200 μg per rat as described in Table 85. The modified mRNA is lyophilized in water for 1-2 days. It is then reconstituted in the buffers listed below to a target concentration of 6 mg/ml. Concentration is determined by OD 260. Samples are diluted to 4 mg/mll in the appropriate buffer before dosing.

[1368] To precipitate the modified mRNA, 3M sodium acetate, pH 5.5 and pure ethanol are added at 1/10^{th} the total volume and 4 times the total volume of modified mRNA, respectively. The material is placed at −80 C for a minimum of 1 hour. The material is then centrifuged for 30 minutes at 4000 rpm, 4 C. The supernatant is removed and the pellet is centrifuged and washed 3× with 75% ethanol. Finally, the pellet is reconstituted with buffer to a target concentration of 6 mg/ml. Concentration is determined by OD 260. Samples are diluted to 4 mg/ml in the appropriate buffer before dosing. All samples are prepared by lyophilization unless noted below.

TABLE 85
Buffer Dosing Groups

| Group | Treatment | Buffer | Dose (ug/rat) |
|---|---|---|---|
| 1 | G-CSF | 0.9% Saline | 200 |
| | Factor IX | 0.9% Saline | 200 |
| 2 | G-CSF | 0.9% Saline + 2 mM Calcium | 200 |
| | Factor IX | 0.9% Saline + 2 mM Calcium | 200 |
| 3 | G-CSF | Lactated Ringer's | 200 |
| | Factor IX | Lactated Ringer's | 200 |
| 4 | G-CSF | 5% Sucrose | 200 |
| | Factor IX | 5% Sucrose | 200 |
| 5 | G-CSF | 5% Sucrose + 2 mM Calcium | 200 |
| | Factor IX | 5% Sucrose + 2 mM Calcium | 200 |
| 6 | G-CSF | 5% Mannitol | 200 |
| | Factor IX | 5% Mannitol | 200 |
| 7 | G-CSF | 5% Mannitol + 2 mM Calcium | 200 |
| | Factor IX | 5% Mannitol + 2 mM Calcium | 200 |
| 8 | G-CSF | 0.9% saline (precipitation) | 200 |
| | Factor IX | 0.9% saline (precipitation) | 200 |

[1369] Serum samples are collected from the rats at various time intervals and analyzed for G-CSF or Factor IX protein expression using G-CSF or Factor IX ELISA.

### Example 60. Multi-Dose Study

[1370] Sprague-Dawley rats (n=8) are injected intravenously eight times (twice a week) over 28 days. The rats are injected with 0.5 mg/kg, 0.05 mg/kg, 0.005 mg/kg or 0.0005 mg/kg of human G-CSF modified mRNA of luciferase modified mRNA formulated in a lipid nanoparticle, 0.5 mg/kg of human G-CSF modified mRNA in saline, 0.2 mg/kg of the human G-CSF protein Neupogen or non-translatable human G-CSF modified mRNA formulated in a lipid nanoparticle. Serum is collected during pre-determined time intervals to evaluate G-CSF protein expression (8, 24 and 72 hours after the first dose of the week), complete blood count and white blood count (24 and 72 hours after the first dose of the week) and clinical chemistry (24 and 72 hours after the first dose of the week). The rats are sacrificed at day 29, 4 days after the final dosing, to determine the complete blood count, white blood count, clinical chemistry, protein expression and to evaluate the effect on the major organs by histopathology and necropsy. Further, an antibody assay is performed on the rats on day 29.

### Example 61. LNP In Vivo Study

[1371] Luciferase modified mRNA (mRNA sequence shown in SEQ ID NO: 16112; polyA tail of approximately 160 nucleotides not shown in sequence, 5′ cap, Cap1; fully modified with 5-methylcytosine and pseudouridine was formulated as a lipid nanoparticle (LNP) using the syringe pump method. The LNP was formulated at a 20:1 weight ratio of total lipid to modified mRNA with a final lipid molar ratio of 50:10:38.5:1.5 (DLin-KC2-DM4A: DSPC: Cholesterol: PEG-DMG). As shown in Table 86, the luciferase LNP formulation was characterized by particle size, zeta potential, and encapsulation.

TABLE 86
Luciferase Formulation

| | |
|---|---|
| Formulation | NPA-098-1 |
| Modified mRNA | Luciferase |
| Mean size | 135 nm |
| | PDI: 0.08 |
| Zeta at pH 7.4 | −0.6 mV |
| Encaps. | 91% |
| (RiboGr) | |

[1372] As outlined in Table 87, the luciferase LNP formulation was administered to Balb-C mice (n=3) intramuscularly, intravenously and subcutaneously and a luciferase modified RNA formulated in PBS was administered to mice intravenously.

TABLE 87
Luciferase Formulations

| | | | | | Amount | |
|---|---|---|---|---|---|---|
| | | | | | of | |
| | | | Concen- | Injection | modified | |
| | | | tration | Volume | RNA | Dose |
| Formulation | Vehicle | Route | (mg/ml) | (ul) | (ug) | (mg/kg) |
| Luc-LNP | PBS | IV | 0.20 | 50 | 10 | 0.50 |
| Luc-LNP | PBS | IM | 0.20 | 50 | 10 | 0.50 |
| Luc-LNP | PBS | SC | 0.20 | 50 | 10 | 0.50 |
| Luc-PBS | PBS | IV | 0.20 | 50 | 10 | 0.50 |

[1373] The mice administered the luciferase LNP formulation intravenously and intramuscularly were imaged at 2, 8, 24, 48, 120 and 192 hours and the mice administered the luciferase LNP formulation subcutaneously were imaged at 2, 8, 24, 48 and 120 hours to determine the luciferase expression as shown in Table 88. In Table 88, “NT” means not tested. Twenty minutes prior to imaging, mice were injected intraperitoneally with a D-luciferin solution at 150 mg/kg. Animals were then anesthetized and images were acquired with an IVIS Lumina II imaging system (Perkin Elmer). Bioluminescence was measured as total flux (photons/second) of the entire mouse.

TABLE 88
Luciferase Expression

| | | Average Expression (photon/second) | | | | | |
|---|---|---|---|---|---|---|---|
| Formulation | Route | 2 hours | 8 hours | 24 hours | 48 hours | 120 hours | 192 hours |
| Luc-LNP | IV | 1.62E+08 | 3.00E+09 | 7.77E+08 | 4.98E+08 | 1.89E+08 | 6.08E+07 |
| Luc-LNP | IM | 4.85E+07 | 4.92E+08 | 9.02E+07 | 3.17E+07 | 1.22E+07 | 2.38E+06 |
| Luc-LNP | SC | 1.85E+07 | 9.79E+08 | 3.09E+08 | 4.94E+07 | 1.98E+06 | NT |
| Luc-PBS | IV | 3.61E+05 | 5.64E+05 | 3.19E+05 | NT | NT | NT |

[1374] One mouse administered the LNP formulation intravenously was sacrificed at 8 hours to determine the luciferase expression in the liver and spleen. Also, one mouse administered the LNP formulation intramuscular was sacrificed at 8 hours to determine the luciferase expression of the muscle around the injection site and in the liver and spleen. As shown in Table 89, expression was seen in the both the liver and spleen after intravenous and intramuscular administration and in the muscle around the intramuscular injection site.

TABLE 89
Luciferase Expression in Tissue

| | Expression |
|---|---|
| | (photon/second) |
| Luciferase LNP: IV | |
| Administration | |
| Liver | 7.984E+08 |
| Spleen | 3.951E+08 |
| Luciferase LNP: IM | |
| Administration | |
| Muscle around the | 3.688E+07 |
| injection site | |
| Liver | 1.507E+08 |
| Spleen | 1.096E+07 |

### Example 62. Cytokine Study: PBMC

A. PBMC isolation and Culture

[1375] 50 mL of human blood from two donors was received from Research Blood Components (lots KP30928 and KP30931) in sodium heparin tubes. For each donor, the blood was pooled and diluted to 70 mL with DPBS (SAFC Bioscience 59331C, lot 071M8408) and split evenly between two 50 mL conical tubes. 10 mL of Ficoll Paque (GE Healthcare 17-5442-03, lot 10074400) was gently dispensed below the blood layer. The tubes were centrifuged at 2000 rpm for 30 minutes with low acceleration and braking. The tubes were removed and the huffy coat PBMC, layers were gently transferred to a fresh 50 mL conical and washed with DPBS. The tubes were centrifuged at 1450 rpm for 10 minutes.

[1376] The supernatant was aspirated and the PBMC pellets were resuspended and washed in 50 mL of DPBS. The tubes were centrifuged at 1250 rpm for 10 minutes. This wash step was repeated, and the PBMC pellets were resuspended in 19 mL of Optimem 1 (Gibco 11058, lot 1072088) and counted. The cell suspensions were adjusted to a concentration of 3.0×10\hat{ }6 cells/mL live cells.

[1377] These cells were then plated on five 96 well tissue culture treated round bottom plates (Costar 3799) per donor at 50 uL per well. Within 30 minutes, transfection mixtures were added to each well at a volume of 50 uL per well. After 4 hours post transfection, the media was supplemented with 10 μL of Fetal Bovine Serum (Gibco 10082, lot 1012368).

### B. Transfection Preparation

[1378] Modified mRNA encoding human G-CSF (mRNA sequence shown in SEQ ID NO: 16102; polyA tail of approximately 160 nucleotides not shown in sequence; 5′cap, Cap1) (containing either (1) natural NT's, (2) 100% substitution with 5-methyl cytidine and pseudouridine, or (3) 100% substitution with 5-methyl cytidine and N1-methyl-pseudouridine; mRNA encoding luciferase (IVT cDNA sequence shown in SEQ ID NO: 16111; mRNA sequence shown in SEQ ID NO: 16112, polyA tail of approximately 160 nucleotides not shown in sequence, 5′cap, Cap1, fully modified with 5-methylcytosine at each cytosine and pseudouridine replacement at each uridine site) (containing either (1) natural NTPs or (2) 100% substitution with 5-methyl cytidine and pseudouridine) and TLR agonist R848 (Invivogen tlrl-r848) were diluted to 38.4 ng/uL in a final volume of 2500 uL Optimem 1.

[1379] Separately, 110 μL of Lipofectamine 2000 (Invitrogen 11668-027, lot 1070962) was diluted with 6.76 mL Optimem I. In a 96 well plate nine aliquots of 135 uL, of each mRNA, positive control (R-848) or negative control (Optimem I) was added to 135 μL of the diluted Lipofectamine 2000. The plate containing the material to be transfected was incubated for 20 minutes. The transfection mixtures were then transferred to each of the human PBMC plates at 50 uL per well. The plates were then incubated at 37° C. At 2, 4, 8, 20, and 44 hours each plate was removed from the incubator, and the supernatants were frozen.

[1380] After the last plate was removed, the supernatants were assayed using a human G-CSF ELISA kit (Invitrogen KHC2032) and human IFN-alpha ELISA kit (Thermo Scientific 41105-2). Each condition was done in duplicate.

### C. Protein and Innate Immune Response Analysis

[1381] The ability of unmodified and modified mRNA to produce the encoded protein was assessed (G-CSF production) over time as was the ability of the mRNA to trigger innate immune recognition as measured by interferon-alpha production. Use of in vitro PBMC cultures is an accepted way to measure the immunostimulatory potential of oligonucleotides (Robbins et al., Oligonucleotides 2009 19:89-102).

[1382] Results were interpolated against the standard curve of each ELISA plate using a four parameter logistic curve fit. Shown in Tables 90 and 91 are the average from 3 separate PBMC donors of the G-CSF, interferon-alpha (IFN-alpha) and tumor necrosis factor alpha (TNF-alpha) production over time as measured by specific ELISA.

[1383] In the G-CSF ELISA, background signal from the Lipofectamine 2000 (LF2000) untreated condition was subtracted at each time point. The data demonstrated specific production of human G-CSF protein by human peripheral blood mononuclear is seen with G-CSF mRNA containing natural NTPs, 100% substitution with 5-methyl cytidine and pseudouridine, or 100% substitution with 5-methyl cytidine and N1-methyl-pseudouridine. Production of G-CSF was significantly increased through the use of 5-methyl cytidine and N1-methyl-pseudouridine modified mRNA relative to 5-methyl cytidine and pseudouridine modified mRNA.

[1384] With regards to innate immune recognition, while both modified mRNA chemistries largely prevented IFN-alpha and TNF-alpha production relative to positive controls (R848, p(I)p(C)), significant differences did exist between the chemistries. 5-methyl cytidine and pseudouridine modified mRNA resulted in low but detectable levels of IFN-alpha and TNF-alpha production, while 5-methyl cytidine and N1-methyl-pseudouridine modified mRNA resulted in no detectable IFN-alpha and TNF-alpha production.

[1385] Consequently, it has been determined that, in addition to the need to review more than one cytokine marker of the activation of the innate immune response, it has surprisingly been found that combinations of modifications provide differing levels of cellular response (protein production and immune activation). The modification, N1-methyl-pseudouridine, in this study has been shown to convey added protection over the standard combination of 5-methylcytidine/pseudouridine explored by others resulting in twice as much protein and almost 150 fold reduction in immune activation (TNF-alpha).

[1386] Given that PBMC contain a large array of innate immune RNA recognition sensors and are also capable of protein translation, it offers a useful system to test the interdependency of these two pathways. It is known that mRNA translation can be negatively affected by activation of such innate immune pathways (Kariko et al. Immunity (2005) 23:165-175; Warren et al. Cell Stem Cell (2010) 7:618-630). Using PBMC as an in vitro assay system it is possible to establish a correlation between translation (in this case G-CSF protein production) and cytokine production (in this case exemplified by IFN-alpha and TNF-alpha protein production). Better protein production is correlated with lower induction of innate immune activation pathway, and new chemistries can be judged favorably based on this ratio (Table 92).

[1387] In this study, the PC Ratio for the two chemical modifications, pseudouridine and N1-methyl-pseudouridine, both with 5-methy cytosine was 4742/141=34 as compared to 9944/1=9944 for the cytokine IFN-alpha. For the cytokine, TNF-alpha, the two chemistries had PC Ratios of 153 and 1243, respectively suggesting that for either cytokine, the N1-methyl-pseudouridine is the superior modification. In Tables 90 and 91, “NT” means not tested.

TABLE 90
G-CSF
G-CSF: 3 Donor Average (pg/ml)

| | |
|---|---|
| G-CSF | 4742 |
| 5-methylcytosine/ | |
| pseudouridine | |
| G-CSF | 9944 |
| 5-methylcytosine/ | |
| N1-methylpseudouridine | |
| Luciferase | 18 |
| LF2000 | 16 |

TABLE 91
IFN-alpha and TNF-alpha

| | IFN-alpha: 3 | TNF-alpha: 3 |
|---|---|---|
| | Donor Aver- | Donor Aver- |
| | age (pg/ml) | age (pg/ml) |
| G-CSF | 141 | 31 |
| 5-methyl cytosine/ | | |
| pseudouridine | | |
| G-CSF | 1 | 8 |
| 5-methylcytosine/ | | |
| N1-methylpseudouridine | | |
| P(I)P(C) | 1104 | NT |
| R-848 | NT | 1477 |
| LF2000 | 17 | 25 |

TABLE 92
G-CSF to Cytokine Ratios

| | G-CSF/IFN-alpha (ratio) | | G-CSF/TNF-alpha (ratio) | |
|---|---|---|---|---|
| | 5-methyl | 5-methylcytosine/ | 5-methyl | 5-methylcytosine/ |
| | cytosine/ | N1-methyl- | cytosine/ | N1-methyl- |
| | pseudo- | pseudo- | pseudo- | pseudo- |
| | uridine | uridine | uridine | uridine |
| PC Ratio | 34 | 9944 | 153 | 1243 |

### Example 63. In Vitro PBMC Studies: Percent Modification

[1388] 480 ng of G-CSF mRNA modified with 5-methylcytosine (5 mC) and pseudouridine (pseudoU) or unmodified G-SF mRNA was transfected with 0.4 uL of Lipofectamine 2000 into peripheral blood mononuclear cells (PBMC) from three normal blood donors (D1, D2, and D3). The G-CSF mRNA (mRNA sequence shown in SEQ ID NO: 16102; polyA tail of approximately 160 nucleotides not shown in sequence; 5′cap, Cap1) was completely modified with 5 mC and pseudoU (100% modification), not modified with 5 mC and pseudoU (0% modification) or was partially modified with 5 mC and pseudoU so the mRNA would contain 75% modification, 50% modification or 25% modification. A control sample of Luciferase (mRNA sequence shown in SEQ ID NO: 16112; polyA tail of approximately 160 nucleotides not shown in sequence; 5′cap, Cap1; fully modified 5meC and pseudoU) was also analyzed for G-CSF expression. For TNF-alpha and IFN-alpha control samples of Lipofectamine2000, LPS, R-848, Luciferase (mRNA sequence shown in SEQ ID NO: 16112; polyA tail of approximately 160 nucleotides not shown in sequence; 5′cap, Cap1; fully modified 5 mC and pseudo), and P(I)P(C) were also analyzed. The supernatant was harvested and run by ELISA 22 hours after transfection to determine the protein expression. The expression of G-CSF is shown in Table 93 and the expression of IFN-alpha and TNF-alpha is shown in Table 94. The expression of IFN-alpha and TNF-alpha may be a secondary effect from the transfection of the G-CSF mRNA. Tables 93 and 94 show that the amount of chemical modification of G-CSF, interferon alpha (IFN-alpha) and tumor necrosis factor-alpha (TNF-alpha) is titratable when the mRNA is not fully modified and the titratable trend is not the same for each target.

[1389] By using PBMC as an in vitro assay system it is possible to establish a correlation between translation (in this case G-CSF protein production) and cytokine production (in this case exemplified by IFN-alpha protein production). Better protein production is correlated with lower induction of innate immune activation pathway, and the percentage modification of a chemistry can be judged favorably based on this ratio (Table 95). As calculated from Tables 93 and 94 and shown in Table 95, full modification with 5-methylcytidine and pseudouridine shows a much better ratio of protein/cytokine production than without any modification (natural G-CSF mRNA) (100-fold for IFN-alpha and 27-fold for TNF-alpha). Partial modification shows a linear relationship with increasingly less modification resulting in a lower protein/cytokine ratio.

TABLE 93
G-CSF Expression

| | G-CSF Expression (pg/ml) | | |
|---|---|---|---|
| | D1 | D2 | D3 |
| 100% modification | 1968.9 | 2595.6 | 2835.7 |
| 75% modification | 566.7 | 631.4 | 659.5 |
| 50% modification | 188.9 | 187.2 | 191.9 |
| 25% modification | 139.3 | 126.9 | 102.0 |
| 0% modification | 194.8 | 182.0 | 183.3 |
| Luciferase | 90.2 | 0.0 | 22.1 |

TABLE 94
IFN-alpha and TNF-alpha Expression

| | IFN-alpha | | | TNF-alpha | | |
|---|---|---|---|---|---|---|
| | Expression | | | Expression | | |
| | (pg/ml) | | | (pg/ml) | | |
| | D1 | D2 | D3 | D1 | D2 | D3 |
| 100% modification | 336.5 | 78.0 | 46.4 | 115.0 | 15.0 | 11.1 |
| 75% modification | 339.6 | 107.6 | 160.9 | 107.4 | 21.7 | 11.8 |
| 50% modification | 478.9 | 261.1 | 389.7 | 49.6 | 24.1 | 10.4 |
| 25% modification | 564.3 | 400.4 | 670.7 | 85.6 | 26.6 | 19.8 |
| 0% modification | 1421.6 | 810.5 | 1260.5 | 154.6 | 96.8 | 45.9 |
| LPS | 0.0 | 0.6 | 0.0 | 0.0 | 12.6 | 4.3 |
| R-848 | 0.5 | 3.0 | 14.1 | 655.2 | 989.9 | 420.4 |
| P(I)P(C) | 130.8 | 297.1 | 585.2 | 765.8 | 2362.7 | 1874.4 |
| Lipid only | 1952.2 | 866.6 | 855.8 | 248.5 | 82.0 | 60.7 |

TABLE 95
PC Ratio and Effect of Percentage of Modification

| | Average | Average | Average | G-CSF/IFN- | G-CSF/TNF- |
|---|---|---|---|---|---|
| | G-CSF | IFN-a | TNF-a | alpha | alpha |
| % Modification | (pg/ml) | (pg/ml) | (pg/ml) | (PC ratio) | (PC ratio) |
| 100 | 2466 | 153 | 47 | 16 | 52 |
| 75 | 619 | 202 | 47 | 3.1 | 13 |
| 50 | 189 | 376 | 28 | 0.5 | 6.8 |
| 25 | 122 | 545 | 44 | 0.2 | 2.8 |
| 0 | 186 | 1164 | 99 | 0.16 | 1.9 |

### Example 64. Modified RNA Transfected in PBMC

[1390] 500 ng of G-CSF mRNA modified with 5-methylcytosine (5 mC) and pseudouridine (pseudoU) or unmodified G-CSF mRNA was transfected with 0.4 uL of Lipofectamine 2000 into peripheral blood mononuclear cells (PBMC) from three normal blood donors (D1, D2, and D3). The G-CSF mRNA (mRNA sequence shown in SEQ ID NO: 16102; polyA tail of approximately 160 nucleotides not shown in sequence; 5′cap, Cap1) was completely modified with 5 mC and pseudoU (100% modification), not modified with 5 mC and pseudoU (0% modification) or was partially modified with 5 mC and pseudoU so the mRNA would contain 50% modification, 25% modification, 10% modification, %5 modification, 1% modification or 0.1% modification. A control sample of mCherry (mRNA sequence shown in SEQ ID NO: 16103; polyA tail of approximately 160 nucleotides not shown in sequence; 5′cap, Cap1; fully modified 5meC and pseudouridine), G-CSF fully modified with 5-methylcytosine and pseudouridine (Control G-CSF) and an untreated control was also analyzed for expression of G-CSF, tumor necrosis factor-alpha (TNF-alpha) and interferon-alpha (IFN-alpha). The supernatant was harvested 6 hours and 18 hours after transfection and run by ELISA to determine the protein expression. The expression of G-CSF, IFN-alpha, and TNF-alpha for Donor 1 is shown in Table 96, Donor 2 is shown in Table 97 and Donor 3 is shown in Table 98.

[1391] Full 100% modification with 5-methylcytidine and pseudouridine resulted in the most protein translation (G-CSF) and the least amount of cytokine produced across all three human PBMC donors. Decreasing amounts of modification results in more cytokine production (IFN-alpha and TNF-alpha), thus further highlighting the importance of fully modification to reduce cytokines and to improve protein translation (as evidenced here by G-CSF production).

TABLE 96
Donor 1

| | G-CSF | | IFN-alpha | | TNF-alpha | |
|---|---|---|---|---|---|---|
| | (pg/mL) | | (pg/mL) | | (pg/mL) | |
| | 6 | 18 | 6 | 18 | 6 | 18 |
| | hours | hours | hours | hours | hours | hours |
| 100% Mod | 1815 | 2224 | 1 | 13 | 0 | 0 |
| 75% Mod | 591 | 614 | 0 | 89 | 0 | 0 |
| 50% Mod | 172 | 147 | 0 | 193 | 0 | 0 |
| 25% Mod | 111 | 92 | 2 | 219 | 0 | 0 |
| 10% Mod | 138 | 138 | 7 | 536 | 18 | 0 |
| 1% Mod | 199 | 214 | 9 | 660 | 18 | 3 |
| 0.1% Mod | 222 | 208 | 10 | 597 | 0 | 6 |
| 0% Mod | 273 | 299 | 10 | 501 | 10 | 0 |
| Control G-CSF | 957 | 1274 | 3 | 123 | 18633 | 1620 |
| mCherry | 0 | 0 | 0 | 10 | 0 | 0 |
| Untreated | N/A | N/A | 0 | 0 | 1 | 1 |

TABLE 97
Donor 2

| | G-CSF | | IFN-alpha | | TNF-alpha | |
|---|---|---|---|---|---|---|
| | (pg/mL) | | (pg/mL) | | (pg/mL) | |
| | 6 | 18 | 6 | 18 | 6 | 18 |
| | hours | hours | hours | hours | hours | hours |
| 100% Mod | 2184 | 2432 | 0 | 7 | 0 | 11 |
| 75% Mod | 935 | 958 | 3 | 130 | 0 | 0 |
| 50% Mod | 192 | 253 | 2 | 625 | 7 | 23 |
| 25% Mod | 153 | 158 | 7 | 464 | 6 | 6 |
| 10% Mod | 203 | 223 | 25 | 700 | 22 | 39 |
| 1% Mod | 288 | 275 | 27 | 962 | 51 | 66 |
| 0.1% Mod | 318 | 288 | 33 | 635 | 28 | 5 |
| 0% Mod | 389 | 413 | 26 | 748 | 1 | 253 |
| Control G-CSF | 1461 | 1634 | 1 | 59 | 481 | 814 |
| mCherry | 0 | 7 | 0 | 1 | 0 | 0 |
| Untreated | N/A | N/A | 1 | 0 | 0 | 0 |

TABLE 98
Donor 3

| | G-CSF | | IFN-alpha | | TNF-alpha | |
|---|---|---|---|---|---|---|
| | (pg/mL) | | (pg/mL) | | (pg/mL) | |
| | 6 | 18 | 6 | 18 | 6 | 18 |
| | hours | hours | hours | hours | hours | hours |
| 100% Mod | 6086 | 7549 | 7 | 658 | 11 | 11 |
| 75% Mod | 2479 | 2378 | 23 | 752 | 4 | 35 |
| 50% Mod | 667 | 774 | 24 | 896 | 22 | 18 |
| 25% Mod | 480 | 541 | 57 | 1557 | 43 | 115 |
| 10% Mod | 838 | 956 | 159 | 2755 | 144 | 123 |
| 1% Mod | 1108 | 1197 | 235 | 3415 | 88 | 270 |
| 0.1% Mod | 1338 | 1177 | 191 | 2873 | 37 | 363 |
| 0% Mod | 1463 | 1666 | 215 | 3793 | 74 | 429 |
| Control G-CSF | 3272 | 3603 | 16 | 1557 | 731 | 9066 |
| mCherry | 0 | 0 | 2 | 645 | 0 | 0 |
| Untreated | N/A | N/A | 1 | 1 | 0 | 8 |

### Example 65. Innate Immune Response Stud in BJ Fibroblasts

### A. Single Transfection

[1392] Human primary foreskin fibroblasts (BJ fibroblasts) were obtained from American Type Culture Collection (ATCC) (catalog #CRL-2522) and grown in Eagle's Minimum Essential Medium (ATCC, catalog #30-2003) supplemented with 10% fetal bovine serum at 37° C., under 5% CO₂. BJ fibroblasts were seeded on a 24-well plate at a density of 300,000 cells per well in 0.5 ml of culture medium. 250 ng of modified G-CSF mRNA (mRNA sequence shown in SEQ ID NO: 16102; polyA tail of approximately 140 nucleotides not shown in sequence; 5′cap, Cap1) fully modified with 5-methylcytosine and pseudouridine (Gen1) or fully modified with 5-methylcytosine and N1-methyl-pseudouridine (Gen2) having Cap0, Cap1 or no cap was transfected using Lipofectamine 2000 (Invitrogen, catalog #11668-019), following manufacturer's protocol. Control samples of poly I:C (PIC), Lipofectamine 2000 (Lipo), natural luciferase mRNA (mRNA sequence shown in SEQ ID NO: 16112; polyA tail of approximately 160 nucleotides not shown in sequence; 5′cap, Cap1) and natural G-CSF mRNA were also transfected. The cells were harvested after 18 hours, the total RNA was isolated and DNASE● treated using the RNeasy micro kit (catalog #74004) following the manufacturer's protocol. 100 ng of total RNA was used for cDNA synthesis using High Capacity cDNA Reverse Transcription kit (catalog #4368814) following the manufacturer's protocol. The cDNA was then analyzed for the expression of innate immune response genes by quantitative real time PCR using SybrGreen in a Biorad CFX 384 instrument following manufacturer's protocol. Table 99 shows the expression level of innate immune response transcripts relative to house-keeping gene HPRT (hypoxanthine phosphoribosyltransferase) and is expressed as fold-induction relative to HPRT. In the table, the panel of standard metrics includes: RIG-I is retinoic acid inducible gene 1, IL6 is interleukin-6, OAS-1 is oligoadenylate synthetase 1, IFNb is interferon-beta, AIM2 is absent in melanoma-2, IFIT-1 is interferon-induced protein with tetratricopeptide repeats 1, PKR is protein kinase R, INFa is tumor necrosis factor alpha and IFNa is interferon alpha.

TABLE 99
Innate Immune Response Transcript Levels

| Formulation | RIG-I | IL6 | OAS-1 | IFNb | AIM2 | IFIT-1 | PKR | TNFa | IFNa |
|---|---|---|---|---|---|---|---|---|---|
| Natural | 71.5 | 20.6 | 20.778 | 11.404 | 0.251 | 151.218 | 16.001 | 0.526 | 0.067 |
| Luciferase | | | | | | | | | |
| Natural G-CSF | 73.3 | 47.1 | 19.359 | 13.615 | 0.264 | 142.011 | 11.667 | 1.185 | 0.153 |
| PIC | 30.0 | 2.8 | 8.628 | 1.523 | 0.100 | 71.914 | 10.326 | 0.264 | 0.063 |
| G-CSF | 0.81 | 0.22 | 0.080 | 0.009 | 0.008 | 2.220 | 1.592 | 0.090 | 0.027 |
| Gen1-UC | | | | | | | | | |
| G-CSF | 0.54 | 0.26 | 0.042 | 0.005 | 0.008 | 1.314 | 1.568 | 0.088 | 0.038 |
| Gen1-Cap0 | | | | | | | | | |
| G-CSF | 0.58 | 0.30 | 0.035 | 0.007 | 0.006 | 1.510 | 1.371 | 0.090 | 0.040 |
| Gen1-Cap1 | | | | | | | | | |
| G-CSF | 0.21 | 0.20 | 0.002 | 0.007 | 0.007 | 0.603 | 0.969 | 0.129 | 0.005 |
| Gen2-UC | | | | | | | | | |
| G-CSF | 0.23 | 0.21 | 0.002 | 0.0014 | 0.007 | 0.648 | 1.547 | 0.121 | 0.035 |
| Gen2-Cap0 | | | | | | | | | |
| G-CSF | 0.27 | 0.26 | 0.011 | 0.004 | 0.005 | 0.678 | 1.557 | 0.099 | 0.037 |
| Gen2-Cap1 | | | | | | | | | |
| Lipo | 0.27 | 0.53 | 0.001 | 0 | 0.007 | 0.954 | 1.536 | 0.158 | 0.064 |

### B. Repeat Transfection

[1393] Human primary foreskin fibroblasts (BJ fibroblasts) were obtained from American Type Culture Collection (ATCC) (catalog #CRL-2522) and grown in Eagle's Minimum Essential Medium (ATCC, catalog #30-2003) supplemented with 10% fetal bovine serum at 37° C., under 5% CO₂. BJ fibroblasts were seeded on a 24-well plate at a density of 300,000 cells per well in 0.5 ml of culture medium. 250 ng of modified G-CSF mRNA (mRNA sequence shown in SEQ ID NO: 16102; polyA tail of approximately 140 nucleotides not shown in sequence; 5′cap, Cap1) unmodified, fully modified with 5-methylcytosine and pseudouridine (Gen1) or fully modified with 5-methylcytosine and N1-methyl-pseudouridine (Gen2) was transfected daily for 5 days following manufacturer's protocol. Control samples of Lipofectamine 2000 (L2000) and mCherry mRNA (mRNA sequence shown in SEQ ID NO: 16103; polyA tail of approximately 1 60 nucleotides not shown in sequence; 5′cap, Cap1; fully modified with 5-methylcytidine and pseudouridine) were also transfected daily for 5 days. The results are shown in Table 100.

[1394] Unmodified mRNA4 showed a cytokine response in interferon-beta (IFN-beta) and interleukin-6 (IL-6) after one day. mRNA modified with at least pseudouridine, showed a cytokine response after 2-3 days whereas mRNA modified with 5-methylcytosine and N1-methyl-pseudouridine showed a reduced response after 3-5 days.

TABLE 100
Cytokine Response

| Formulation | Transfection | IFN-beta (pg/ml) | IL-6 (pg/ml) |
|---|---|---|---|
| G-CSF unmodified | 6 hours | 0 | 3596 |
| | Day 1 | 1363 | 15207 |
| | Day 2 | 238 | 12415 |
| | Day 3 | 225 | 5017 |
| | Day 4 | 363 | 4267 |
| | Day 5 | 225 | 3094 |
| G-CSF Gen 1 | 6 hours | 0 | 3396 |
| | Day 1 | 38 | 3870 |
| | Day 2 | 1125 | 16341 |
| | Day 3 | 100 | 25983 |
| | Day 4 | 75 | 18922 |
| | Day 5 | 213 | 15928 |
| G-CSF Gen 2 | 6 hours | 0 | 3337 |
| | Day 1 | 0 | 3733 |
| | Day 2 | 150 | 974 |
| | Day 3 | 213 | 4972 |
| | Day 4 | 1400 | 4122 |
| | Day 5 | 350 | 2906 |
| mCherry | 6 hours | 0 | 3278 |
| | Day 1 | 238 | 3893 |
| | Day 2 | 113 | 1833 |
| | Day 3 | 413 | 25539 |
| | Day 4 | 413 | 29233 |
| | Day 5 | 213 | 20178 |
| L2000 | 6 hours | 0 | 3270 |
| | Day 1 | 13 | 3933 |
| | Day 2 | 388 | 567 |
| | Day 3 | 338 | 1517 |
| | Day 4 | 475 | 1594 |
| | Day 5 | 263 | 1561 |

### Example 66. In Vivo Detection of Innate Immune Response

[1395] In an effort to distinguish the importance of different chemical modification of mRNA on in vivo protein production and cytokine response in vivo, female BALB/C mice (n=5) are injected intramuscularly with G-CSF mRNA (G-CSF mRNA unmod) (mRNA sequence shown in SEQ ID NO: 16102; polyA tail of approximately 160 nucleotides not shown in sequence;) with a 5′cap of Cap1, G-CSF mRNA fully modified with 5-methylcytosine and pseudouridine (G-CSF mRNA 5mc/pU), G-CSF mRNA fully modified with 5-methylcytosine and N1-methyl-pseudouridine with (G-CSF mRNA 5mc/N1pU) or without a 5′ cap (G-CSF mRNA 5mc/N1 pU no cap) or a control of either R848 or 5% sucrose as described in Table 101.

TABLE 101
Dosing Chart

| Formulation | Route | Dose (ug/mouse) | Dose (ul) |
|---|---|---|---|
| G-CSF mRNA | I.M. | 200 | 50 |
| unmod | | | |
| G-CSF mRNA | I.M. | 200 | 50 |
| 5mc/pU | | | |
| G-CSF mRNA | I.M. | 200 | 50 |
| 5mc/N1pU | | | |
| G-CSF mRNA | I.M. | 200 | 50 |
| 5mc/N1pU no cap | | | |
| R848 | I.M. | 75 | 50 |
| 5% sucrose | I.M. | — | 50 |
| Untreated | I.M. | — | — |

[1396] Blood is collected at 8 hours after dosing. Using ELISA the protein levels of G-CSF, TNF-alpha and IFN-alpha is determined by ELISA. 8 hours after dosing, muscle is collected from the injection site and quantitative real time polymerase chain reaction (QPCR) is used to determine the mRNA levels of RIG-I, PKR, AIM-2, IFIT-1, OAS-2, MDA-5, IFN-beta, INF-alpha, IL-6, G-CSF, CD45 in the muscle.

### Example 67. In Vivo Detection of Innate Immune Response Study

[1397] Female BALB/C mice (n=5) were injected intramuscularly with G-CSF mRNA (G-CSF mRNA unmod) (mRNA sequence shown in SEQ ID NO: 16102; polyA tail of approximately 160 nucleotides not shown in sequence;) with a 5′cap of Cap1, G-CSF mRNA fully modified with 5-methylcytosine and pseudouridine (G-CSF mRNA 5mc/pU), G-CSF mRNA fully modified with 5-methylcytosine and N1-methyl-pseudouridine with (G-CSF mRNA 5mc/N1pU) or without a 5′ cap (G-CSF mRNA 5mc/N1 pU no cap) or a control of either R848 or 5% sucrose as described in Table 102. Blood is collected at 8 hours after dosing and using ELISA the protein levels of G-CSF and interferon-alpha (IFN-alpha) is determined by ELISA and are shown in Table 102.

[1398] As shown in Table 102, unmodified, 5mc/pU, and 5mc/N1pU modified G-CSF mRNA resulted in human G-CSF expression in mouse serum. The uncapped 5 mC/N1pU modified G-CSF mRNA showed no human G-CSF expression in serum, highlighting the importance of having a 5′ cap structure for protein translation.

[1399] As expected, no human G-CSF protein was expressed in the R848, 5% sucrose only, and untreated groups. Importantly, significant differences were seen in cytokine production as measured by mouse IFN-alpha in the serum. As expected, unmodified G-CSF mRNA demonstrated a robust cytokine response in vivo (greater than the R848 positive control). The 5Me/pU modified G-CSF mRNA did show a low but detectable cytokine response in vivo, while the 5mc/N1pU modified mRNA showed no detectable IFN-alpha in the serum (and same as vehicle or untreated animals).

[1400] Also, the response of 5mc/N1pU modified mRNA was the same regardless of whether it was capped or not. These in vivo results reinforce the conclusion that 1) that unmodified mRNA produce a robust innate immune response, 2) that this is reduced, but not abolished, through 100% incorporation of 5mc/pU modification, and 3) that incorporation of 5me/N1pU modifications results in no detectable cytokine response.

[1401] Lastly, given that these injections are in 5% sucrose (which has no effect by itself), these result should accurately reflect the immunostimulatory potential of these modifications.

[1402] From the data it is evident that N1pU modified molecules produce more protein while concomitantly having little or no effect on IFN-alpha expression. It is also evident that capping is required for protein production for this chemical modification. The Protein: Cytokine Ratio of 748 as compared to the PC Ratio for the unmodified mRNA (PC=9) means that this chemical modification is far superior as related to the effects or biological implications associated with IFN-alpha.

TABLE 102
Human G-CSF and Mouse IFN-alpha in serum

| | | | | G-CSF | IFN-alpha | |
|---|---|---|---|---|---|---|
| | | Dose | Dose | protein | expression | PC |
| Formulation | Route | (ug/mouse) | (ul) | (pg/ml) | (pg/ml) | Ratio |
| G-CSF mRNA unmod | I.M. | 200 | 50 | 605.6 | 67.01 | 9 |
| G-CSF mRNA 5 mc/pU | I.M. | 200 | 50 | 356.5 | 8.87 | 40 |
| G-CSF mRNA 5 mc/N1pU | I.M. | 200 | 50 | 748.1 | 0 | 748 |
| G-CSF mRNA 5 mc/N1pU | I.M. | 200 | 50 | 6.5 | 0 | 6.5 |
| no cap | | | | | | |
| R848 | I.M. | 75 | 50 | 3.4 | 40.97 | .08 |
| 5% sucrose | I.M. | — | 50 | 0 | 1.49 | 0 |
| Untreated | I.M. | — | — | 0 | 0 | 0 |

### Example 68: In Vivo Delivery of Modified RNA

[1403] Protein production of modified mRNA was evaluated by delivering modified G-CSF mRNA or modified Factor IX mRNA to female Sprague Dawley rats (n=6). Rats were injected with 400 μg in 100 ul of G-CSF mRNA (mRNA sequence shown in SEQ ID NO: 16102; polyA tail of approximately 160 nucleotides not shown in sequence; 5′cap, Cap1) fully modified with 5-methylcytosine and pseudouridine (G-CSF Gen1), G-C(SF mRNA fully modified with 5-methylcytosine and N1-methyl-pseudouridine (G-CSF Gen2) or Factor IX mRNA (mRNA sequence shown in SEQ ID NO: 16106; polyA tail of approximately 160 nucleotides not shown in sequence; 5′cap, Cap1) fully modified with 5-methylcytosine and pseudouridine (Factor IX Gen1) reconstituted from the lyophilized form in 5% sucrose. Blood was collected 8 hours after injection and the G-CSF protein level in serum was measured by E L1SA. Table 103 shows the G-CSF protein levels in serum after 8 hours.

[1404] These results demonstrate that both G-CSF Gen 1 and G-CSF Gen 2 modified mRNA can produce human G-CSF protein in a rat following a single intramuscular injection, and that human G-CSF protein production is improved when using Gen 2 chemistry over Gen 1 chemistry.

TABLE 103
G-CSF Protein in Rat Serum (I.M. Injection Route)

| Formulation | G-CSF protein (pg/ml) |
|---|---|
| G-CSF Gen1 | 19.37 |
| G-CSF Gen2 | 64.72 |
| Factor IX Gen 1 | 2.25 |

### Example 69. Chemical Modification: In Vitro Studies

### A. In Vitro Screening in PBMC

[1405] 500 ng of G-CSF (mRNA sequence shown in SEQ ID NO: 16102; polyA tail of approximately 160 nucleotides not shown in sequence; 5′cap, Cap1) mRNA fully modified with the chemical modification outlined Tables 104 and 105 was transfected with 0.4 uL Lipofectamine 2000 into peripheral blood mononuclear cells (PBMC) from three normal blood donors. Control samples of LPS, R848, P(T)P(C) and mCherry (mRNA sequence shown in SEQ ID NO: 16103; polyA tail of approximately 160 nucleotides not shown in sequence, 5′cap, Cap1; fully modified with 5-methylcytosine and pseudouridine) were also analyzed. The supernatant was harvested and stored frozen until analyzed by ELISA to determine the G-CSF protein expression, and the induction of the cytokines interferon-alpha (IFN-α) and tumor necrosis factor alpha (TNF-α). The protein expression of G-CSF is shown in Table 104, the expression of IFN-α and TNF-α is shown in Table 105.

[1406] The data in Table 104 demonstrates that many, but not all, chemical modifications can be used to productively produce human G-CSF in PBMC. Of note, 100% N1-methyl-pseudouridine substitution demonstrates the highest level of human G-CSF production (almost 10-fold higher than pseudouridine itself). When N1-methyl-pseudouridine is used in combination with 5-methylcytidine a high level of human G-CSF protein is also produced (this is also higher than when pseudouridine is used in combination with 5 methylcytidine).

[1407] Given the inverse relationship between protein production and cytokine production in PBMC, a similar trend is also seen in Table 105, where 100% substitution with N1-methyl-pseudouridine results no cytokine induction (similar to transfection only controls) and pseudouridine shows detectable cytokine induction which is above background.

[1408] Other modifications such as N6-methyladenosine and alpha-thiocytidine appear to increase cytokine stimulation.

TABLE 104
Chemical Modifications and G-CSF Protein Expression

| | G-CSF Protein Expression (pg/ml) | | |
|---|---|---|---|
| | Donor | Donor | Donor |
| Chemical Modifications | 1 | 2 | 3 |
| Pseudouridine | 2477 | 1,909 | 1,498 |
| 5-methyluridine | 318 | 359 | 345 |
| N1-methyl-pseudouridine | 21,495 | 16,550 | 12,441 |
| 2-thiouridine | 932 | 1,000 | 600 |
| 4-thiouridine | 5 | 391 | 218 |
| 5-methoxyuridine | 2,964 | 1,832 | 1,800 |
| 5-methylcytosine and | 2,632 | 1,955 | 1,373 |
| pseudouridine (1^{st} set) | | | |
| 5-methylcytosine and N1-methyl- | 10,232 | 7,245 | 6,214 |
| pseudouridine (1^{st} set) | | | |
| 2′Fluoroguanosine | 59 | 186 | 177 |
| 2′Fluorouridine | 118 | 209 | 191 |
| 5-methylcytosine and | 1,682 | 1,382 | 1,036 |
| pseudouridine (2^{nd} set) | | | |
| 5-methylcytosine and N1-methyl- | 9,564 | 8,509 | 7,141 |
| pseudouridine (2^{nd} set) | | | |
| 5-bromouridine | 314 | 482 | 291 |
| 5-(2-carbomethoxyvinyl)uridine | 77 | 286 | 177 |
| 5-[3(1-E-propenylamino)uridine | 541 | 491 | 550 |
| α-thiocytidine | 105 | 264 | 245 |
| 5-methylcytosine and | 1,595 | 1,432 | 955 |
| pseudouridine (3^{rd} set) | | | |
| N1-methyladenosine | 182 | 177 | 191 |
| N6-methyladenosine | 100 | 168 | 200 |
| 5-methylcytidine | 291 | 277 | 359 |
| N4-acetylcytidine | 50 | 136 | 36 |
| 5-formylcytidine | 18 | 205 | 23 |
| 5-methylcytosine and | 264 | 350 | 182 |
| pseudouridine (4^{th} set) | | | |
| 5-methylcytosine and N1-methyl- | 9,505 | 6,927 | 5,405 |
| pseudouridine (4^{th} set) | | | |
| LPS | 1,209 | 786 | 636 |
| mCherry | 5 | 168 | 164 |
| R848 | 709 | 732 | 636 |
| P(I)P(C) | 5 | 186 | 182 |

TABLE 105
Chemical Modifications and Cytokine Expression

| Chemical | IFN-α Expression (pg/ml) | | | TNF-α Expression (pg/ml) | | |
|---|---|---|---|---|---|---|
| Modifications | Donor 1 | Donor 2 | Donor 3 | Donor 1 | Donor 2 | Donor 3 |
| Pseudouridine | 120 | 77 | 171 | 36 | 81 | 126 |
| 5-methyluridine | 245 | 135 | 334 | 94 | 100 | 157 |
| N1-methyl- | 26 | 75 | 138 | 101 | 106 | 134 |
| pseudouridine | | | | | | |
| 2-thiouridine | 100 | 108 | 154 | 133 | 133 | 141 |
| 4-thiouridine | 463 | 258 | 659 | 169 | 126 | 254 |
| 5-methoxyuridine | 0 | 64 | 133 | 39 | 74 | 111 |
| 5-methylcytosine and | 88 | 94 | 148 | 64 | 89 | 121 |
| pseudouridine (1^{st} set) | | | | | | |
| 5-methylcytosine and | 0 | 60 | 136 | 54 | 79 | 126 |
| N1-methyl- | | | | | | |
| pseudouridine (1^{st} set) | | | | | | |
| 2′Fluoroguanosine | 107 | 97 | 194 | 91 | 94 | 141 |
| 2′Fluorouridine | 158 | 103 | 178 | 164 | 121 | 156 |
| 5-methylcytosine and | 133 | 92 | 167 | 99 | 111 | 150 |
| pseudouridine (2^{nd} set) | | | | | | |
| 5-methylcytosine and | 0 | 66 | 140 | 54 | 97 | 149 |
| N1-methyl- | | | | | | |
| pseudouridine (2^{nd} set) | | | | | | |
| 5-bromouridine | 95 | 86 | 181 | 87 | 106 | 157 |
| 5-(2- | 0 | 61 | 130 | 40 | 81 | 116 |
| carbomethoxyvinyl)uridine | | | | | | |
| 5-[3(1-E- | 0 | 58 | 132 | 71 | 90 | 119 |
| propenylamino)uridine | | | | | | |
| α-thiocytidine | 1,138 | 565 | 695 | 300 | 273 | 277 |
| 5-methylcytosine and | 88 | 75 | 150 | 84 | 89 | 130 |
| pseudouridine (3^{rd} set) | | | | | | |
| N1-methyladenosine | 322 | 255 | 377 | 256 | 157 | 294 |
| N6-methyladenosine | 1,935 | 1,065 | 1,492 | 1,080 | 630 | 857 |
| 5-methylcytidine | 643 | 359 | 529 | 176 | 136 | 193 |
| N4-acetylcytidine | 789 | 593 | 431 | 263 | 67 | 207 |
| 5-formylcytidine | 180 | 93 | 88 | 136 | 30 | 40 |
| 5-methylcytosine and | 131 | 28 | 18 | 53 | 24 | 29 |
| pseudouridine (4^{th} set) | | | | | | |
| 5-methylcytosine and | 0 | 0 | 0 | 36 | 14 | 13 |
| N1-methyl- | | | | | | |
| pseudouridine (4^{th} set) | | | | | | |
| LPS | 0 | 67 | 146 | 7,004 | 3,974 | 4,020 |
| mCherry | 100 | 75 | 143 | 67 | 100 | 133 |
| R848 | 674 | 619 | 562 | 11,179 | 8,546 | 9,907 |
| P(I)P(C) | 470 | 117 | 362 | 249 | 177 | 197 |

B3. In vitro Screening in HeLa Cells

[1409] The day before transfection, 20,000 HeLa cells (ATCC no. CCL-2; Manassas, VA) were harvested by treatment with Trypsin-EDTA solution (LifeTechnologies, Grand Island, NY) and seeded in a total volume of 100 ul EMEM medium (supplemented with 10% FCS and 1× Glutamax) per well in a 96-well cell culture plate (Corning, Manassas, VA). The cells were grown at 37° G in 5% CO₂ atmosphere overnight. Next day, 83 mg of Luciferase modified RNA (mRNA sequence shown in SEQ ID NO: 16112; polyA tail of approximately 160 nucleotides not shown in sequence; 5′cap, Cap1) with the chemical modification described in Table 106, were diluted in 10 ul final volume of OPTI-MEM (LifeTechnologies, Grand Island, NY).

[1410] Lipofectamine 2000 (LifeTechnologies, Grand Island, NY) was used as transfection reagent and 0.2 ul were diluted in 10 ul final volume of OPTI-MEM. After 5 minutes of incubation at room temperature, both solutions were combined and incubated an additional 15 minute at room temperature. Then the 20 ul combined solution was added to the 100 ul cell culture medium containing the HeLa cells and incubated at room temperature.

[1411] After 18 to 22 hours of incubation cells expressing luciferase were lysed with 100 ul of Passive Lysis Buffer (Promega, Madison, WI) according to manufacturer instructions. Aliquots of the lysates were transferred to white opaque polystyrene 96-Well plates (Corning, Manassas, VA) and combined with 100 ul complete luciferin se assay solution (Promega, Madison, WI). The lysate volumes were adjusted or diluted until no more than 2 mio relative light units (RL) per well were detected for the strongest signal producing samples and the R-is for each chemistry tested are shown in Table 06. The plate reader was a BioTek Synergy H1 (BioTek Winooski, VT). The background signal of the plates without reagent was about 200 relative light units per well.

[1412] These results demonstrate that many, but not all, chemical modifications can be used to productively produce human G-CSF in HeLa cells. Of note, 100% N1-methyl-pseudouridine substitution demonstrates the highest level of human G-CSF production.

TABLE 106
Relative Light Units of Luciferase

| Chemical Modification | RLU |
|---|---|
| N6-methyladenosine (m6a) | 534 |
| 5-methylcytidine (m5c) | 138,428 |
| N4-acetylcytidine (ac4c) | 235,412 |
| 5-formylcytidine (f5c) | 436 |
| 5-methylcytosine/pseudouridine, test A1 | 48,659 |
| 5-methylcytosine/N1-methyl-pseudouridine, test A1 | 190,924 |
| Pseudouridine | 655,632 |
| 1-methylpseudouridine (m1u) | 1,517,998 |
| 2-thiouridine (s2u) | 3387 |
| 5-methoxyuridine (mo5u) | 253,719 |
| 5-methylcytosine/pseudouridine, test B1 | 317,744 |
| 5-methylcytosine/N1-methyl-pseudouridine, test B1 | 265,871 |
| 5-Bromo-uridine | 43,276 |
| 5 (2 carbovinyl) uridine | 531 |
| 5 (3-1E propenyl Amino) uridine | 446 |
| 5-methylcytosine/pseudouridine, test A2 | 295,824 |
| 5-methylcytosine/N1-methyl-pseudouridine, test A2 | 233,921 |
| 5-methyluridine | 50,932 |
| α-Thio-cytidine | 26,358 |
| 5-methylcytosine/pseudouridine, test B2 | 481,477 |
| 5-methylcytosine/N1-methyl-pseudouridine, test B2 | 271,989 |
| 5-methylcytosine/pseudouridine, test A3 | 438,831 |
| 5-methylcytosine/N1-methyl-pseudouridine, test A3 | 277,499 |
| Unmodified Luciferase | 234,802 |

C. In vitro Screening in Rabbit Reticulocyte Lysates

[1413] Luciferase mRNA (mRNA sequence shown in SEQ ID NO: 16112; polyA tail of approximately 160 nucleotides not shown in sequence; 5′cap, Cap1) was modified with the chemical modification listed in Table 107 and were diluted in sterile nuclease-free water to a final amount of 250 ng in 10 ul. The diluted luciferase was added to 40 ul of freshly prepared Rabbit Reticulocyte Lysate and the in vitro translation reaction was done in a standard 1.5 mL polypropylene reaction tube (Thermo Fisher Scientific, Waltham, MA) at 30° C. in a dry heating block. The translation assay was done with the Rabbit Reticulocyte Lysate (nuclease-treated) kit (Promega, Madison, WI) according to the manufacturer's instructions. The reaction buffer was supplemented with a one-to-one blend of provided amino acid stock solutions devoid of either Leucine or Methionine resulting in a reaction mix containing sufficient amounts of both amino acids to allow effective in vitro translation.

[1414] After 60 minutes of incubation, the reaction was stopped by placing the reaction tubes on ice. Aliquots of the in vitro translation reaction containing luciferase modified RNA were transferred to white opaque polystyrene 96-well plates (Corning, Manassas, VA) and combined with 100 ul complete luciferase assay solution (Promega, Madison, WI). The volumes of the in vitro translation reactions were adjusted or diluted until no more than 2 mio relative light units (RLUs) per well were detected for the strongest signal producing samples and the RLUs for each chemistry tested are shown in Table 107. The plate reader was a BioTek Synergy H1 BioTek, Winooski, VT).The background signal of the plates without reagent was about 200 relative light units per well.

[1415] These cell-free translation results very nicely correlate with the protein production results in HeLa, with the same modifications generally working or not working in both systems. One notable exception is 5-formylcytidine modified luciferase mRNA which worked in the cell-free translation system, but not in the HeLa cell-based transfection system. A similar difference between the two assays was also seen with 5-formylcytidine modified G-CSF mRNA.

TABLE 107
Relative Light Units of Luciferase

| Chemical Modification | RLU |
|---|---|
| N6-methyladenosine (m6a) | 398 |
| 5-methylcytidine (m5c) | 152,989 |
| N4-acetylcytidine (ac4c) | 60,879 |
| 5-formylcytidine (f5c) | 55,208 |
| 5-methylcytosine/pseudouridine, test A1 | 349,398 |
| 5-methylcytosine/N1-methyl-pseudouridine, test A1 | 205,465 |
| Pseudouridine | 587,795 |
| 1-methylpseudouridine (m1u) | 589,758 |
| 2-thiouridine (s2u) | 708 |
| 5-methoxyuridine (mo5u) | 288,647 |
| 5-methylcytosine/pseudouridine, test B1 | 454,662 |
| 5-methylcytosine/N1-methyl-pseudouridine, test B1 | 223,732 |
| 5-Bromo-uridine | 221,879 |
| 5 (2 carbovinyl) uridine | 225 |
| 5 (3-1E propenyl Amino) uridine | 211 |
| 5-methylcytosine/pseudouridine, test A2 | 558,779 |
| 5-methylcytosine/N1-methyl-pseudouridine, test A2 | 333,082 |
| 5-methyluridine | 214,680 |
| α-Thio-cytidine | 123,878 |
| 5-methylcytosine/pseudouridine, test B2 | 487,805 |
| 5-methylcytosine/N1-methyl-pseudouridine, test B2 | 154,096 |
| 5-methylcytosine/pseudouridine, test A3 | 413,535 |
| 5-methylcytosine/N1-methyl-pseudouridine, test A3 | 292,954 |
| Unmodified Luciferase | 225,986 |

### Example 70. Chemical Modification: In Vivo Studies

A. In Vivo Screening of G-CSF Modified mRNA

[1416] Balb-C mice (n=4) are intramuscularly injected in each leg with modified G-CSF mRNA (mRNA sequence shown in SEQ ID NO: 16102; polyA tail of approximately 160 nucleotides not shown in sequence; 5′ cap, Cap1), fully modified with the chemical modifications outlined in Table 108, is formulated in 1×PBS. A control of luciferase modified mRNA (mRNA sequence shown in SEQ ID NO: 16112; polyA tail of approximately 160 nucleotides not shown in sequence; 5′cap, Cap1; fully modified with pseudouridine and 5-methylcytosine) and a control of PBS are also tested. After 8 hours serum is collected to determine G-CSF protein levels cytokine levels by ELISA.

TABLE 108
G-CSF

| mRNA | Chemical Modifications |
|---|---|
| G-CSF | Pseudouridine |
| G-CSF | 5-methyluridine |
| G-CSF | 2-thiouridine |
| G-CSF | 4-thiouridine |
| G-CSF | 5-methoxyuridine |
| G-CSF | 2′-fluorouridine |
| G-CSF | 5-bromouridine |
| G-CSF | 5-[3(1-E-propenylamino)uridine) |
| G-CSF | alpha-thio-cytidine |
| G-CSF | 5-methylcytidine |
| G-CSF | N4-acetylcytidine |
| G-CSF | Pseudouridine and 5-methylcytosine |
| G-CSF | N1-methyl-pseudouridine and 5-methylcytosine |
| Luciferase | Pseudouridine and 5-methylcytosine |
| PBS | None |

B. In Vivo Screening of Luciferase Modified mRNA

[1417] Balb-C mice (n=4) were subcutaneously injected with 200 ul containing 42 to 103 μg of modified luciferase mRNA (mRNA sequence shown in SEQ ID NO: 16112; polyA tail of approximately 160 nucleotides not shown in sequence; 5′cap, Cap1), fully modified with the chemical modifications outlined in Table 109, was formulated in 1×PBS. A control of PBS was also tested. The dosages of the modified luciferase mRNA is also outlined in Table 109. 8 hours after dosing the mice were imaged to determine luciferase expression. Twenty minutes prior to imaging, mice were injected intraperitoneally with a D-luciferin solution at 150 mg/kg. Animals were then anesthetized and images were acquired with an IVIS Lumina II imaging system (Perkin Elmer). Bioluminescence was measured as total flux (photons/second) of the entire mouse.

[1418] As demonstrated in Table 109, all luciferase mRNA modified chemistries demonstrated in vivo activity, with the exception of 2′-fluorouridine. In addition 1-methylpseudouridine modified mRNA demonstrated very high expression of luciferase (5-fold greater expression than pseudouridine containing mRNA).

TABLE 109
Luciferase Screening

| | | Dose | Dose | Luciferase |
|---|---|---|---|---|
| | Chemical | (ug) of | volume | expression |
| mRNA | Modifications | mRNA | (ml) | (photon/second) |
| Luciferase | 5-methylcytidine | 83 | 0.72 | 1.94E+07 |
| Luciferase | N4-acetylcytidine | 76 | 0.72 | 1.11E07 |
| Luciferase | Pseudouridine | 95 | 1.20 | 1.36E+07 |
| Luciferase | 1-methylpseudouridine | 103 | 0.72 | 7.40E+07 |
| Luciferase | 5-methoxyuridine | 95 | 1.22 | 3.32+07 |
| Luciferase | 5-methyluridine | 94 | 0.86 | 7.42E+06 |
| Luciferase | 5-bromouridine | 89 | 1.49 | 3.75E+07 |
| Luciferase | 2′-fluoroguanosine | 42 | 0.72 | 5.88E+05 |
| Luciferase | 2′-fluorocytidine | 47 | 0.72 | 4.21E+05 |
| Luciferase | 2′-flurorouridine | 59 | 0.72 | 3.47E+05 |
| PBS | None | — | 0.72 | 3.16E+05 |

### Example 71. In Vivo Screening of Combination Luciferase Modified mRNA

[1419] Balb-C mice (n=4) were subcutaneously injected with 200 ul of 100 μg of modified luciferase mRNA (mRNA sequence shown in SEQ ID NO: 16112; polyA tail of approximately 160 nucleotides not shown in sequence; 5′cap, Cap1), fully modified with the chemical modifications outlined in Table 110, was formulated in 1×PBS. A control of PBS was also tested. 8 hours after dosing the mice were imaged to determine luciferase expression. Twenty minutes prior to imaging, mice were injected intraperitoneally with a D-luciferin solution at 150 mg/kg. Animals were then anesthetized and images were acquired with an IVIS Lumina II imaging system (Perkin Elmer). Bioluminescence was measured as total flux (photons/second) of the entire mouse.

[1420] As demonstrated in Table 110, all luciferase mRNA modified chemistries (in combination) demonstrated in vivo activity. In addition the presence of N1-methyl-pseudouridine in the modified mRNA (with N4-acetylcytidine or 5 methylcytidine) demonstrated higher expression than when the same combinations where tested using with pseudouridine. Taken together, these data demonstrate that N1-methyl-pseudouridine containing luciferase mRNA results in improved protein expression in vivo whether used alone (Table 109) or when used in combination with other modified nucleotides (Table 110).

TABLE 110
Luciferase Screening Combinations

| | | Luciferase |
|---|---|---|
| | | expression |
| mRNA | Chemical Modifications | (photon/second) |
| Luciferase | N4-acetylcytidine/pseudouridine | 4.18E+06 |
| Luciferase | N4-acetylcytidine/N1-methyl- | 2.88E+07 |
| | pseudouridine | |
| Luciferase | 5-methylcytidine/5-methoxyuridine | 3.48E+07 |
| Luciferase | 5-methylcytidine/5-methyluridine | 1.44E+07 |
| Luciferase | 5-methylcytidine/where 50% of the | 2.39E+06 |
| | uridine is replaced with 2-thiouridine | |
| Luciferase | 5-methylcytidine/pseudouridine | 2.36E+07 |
| Luciferase | 5-methylcytidine/N1-methyl- | 4.15E+07 |
| | pseudouridine | |
| PBS | None | 3.59E+05 |

### Example 72. Innate Immune Response in BJ Fibroblasts

[1421] Human primary foreskin fibroblasts (BJ fibroblasts) are obtained from American Type Culture Collection (ATCC) (catalog #CRL-2522) and grown in Eagle's Minimum Essential Medium (ATCC, cat #30-2003) supplemented with 10% fetal bovine serum at 37° C., under 5% C02. BJ fibroblasts are seeded on a 24-well plate at a density of 130,000 cells per well in 0.5 ml of culture medium. 250 ng of modified G-CSF mRNA (mRNA sequence shown in SEQ ID NO: 16102; polyA tail of approximately 160 nucleotides not shown in sequence; 5′cap, Cap1) fully modified with 5-methylcytosine and pseudouridine (Gen1) or fully modified with 5-methylcytosine and N1-methyl-pseudouridine (Gen2) is transfected using Lipofectamine 2000 (Invitrogen, cat #11668-019), following manufacturer's protocol. Control samples of Lipofectamine 2000 and unmodified G-CSF mRNA (natural G-CSF) are also transfected. The cells are transfected for five consecutive days. The transfection complexes are removed four hours after each round of transfection.

[1422] The culture supernatant is assayed for secreted G-CSF (R&D Systems, catalog #DCS50), tumor necrosis factor-alpha (TNF-alpha) and interferon alpha (IFN-alpha by ELISA every day after transfection following manufacturer's protocols. The cells are analyzed for viability using CELL TITER GLO● (Promega, catalog #G7570) 6 hrs and 18 hrs after the first round of transfection and every alternate day following that. At the same time from the harvested cells, total RNA is isolated and treated with DNASE● using the RNAEASY micro kit (catalog #74004) following the manufacturer's protocol. 100 ng of total RNA is used for cDNA synthesis using the High Capacity cDNA Reverse Transcription kit (Applied Biosystems, cat #4368814) following the manufacturer's protocol. The cDNA is then analyzed for the expression of innate immune response genes by quantitative real time PCR using SybrGreen in a Biorad CFX 384 instrument following the manufacturer's protocol.

### Example 73. In Vitro Transcription with Wild-Type T7 Polymerase

[1423] Luciferase mRNA (mRNA sequence shown in SEQ ID NO: 16112; polyA tail of approximately 160 nucleotides not shown in sequence; 5′cap, Cap1) and G-CSF mRNA (mRNA sequence shown in SEQ ID NCO: 16102; polyA tail of approximately 160 nucleotides not shown in sequence; 5′cap, Cap1) were fully modified with different chemistries and chemistry combinations listed in Tables 111-114 using wild-type T7 polymerase as previously described.

[1424] The yield of the translation reactions was determined by spectrophometric measurement (OD260) and the yield for Luciferase is shown in Table 111 and G-CSF is shown in Table 113.

[1425] The luciferase and G-CSF modified mRNA were also subjected to an enzymatic capping reaction and each modified mRNA capping reaction was evaluated for yield by spectrophometic measurement (OD260) and correct size assessed using bioanalyzer. The yield from the capping reaction for luciferase is shown in Table 112 and G-CSF is shown in Table 114.

TABLE 111
In vitro transcription chemistry for Luciferase

| Chemical Modification | Yield (mg) |
|---|---|
| N6-methyladenosine | 0.99 |
| 5-methylcytidine | 1.29 |
| N4-acetylcytidine | 1.0 |
| 5-formylcytidine | 0.55 |
| Pseudouridine | 2.0 |
| N1-methyl-pseudouridine | 1.43 |
| 2-thiouridine | 1.56 |
| 5-methoxyuridine | 2.35 |
| 5-methyluridine | 1.01 |
| α-Thio-cytidine | 0.83 |
| 5-Br-uridine (5Bru) | 1.96 |
| 5 (2 carbomethoxyvinyl) uridine | 0.89 |
| 5 (3-1E propenyl Amino) uridine | 2.01 |
| N4-acetylcytidine/pseudouridine | 1.34 |
| N4-acetylcytidine/N1-methyl-pseudouridine | 1.26 |
| 5-methylcytidine/5-methoxyuridine | 1.38 |
| 5-methylcytidine/5-bromouridine | 0.12 |
| 5-methylcytidine/5-methyluridine | 2.97 |
| 5-methylcytidine/half of the uridines are | 1.59 |
| modified with 2-thiouridine | |
| 5-methylcytidine/2-thiouridine | 0.90 |
| 5-methylcytidine/pseudouridine | 1.83 |
| 5-methylcytidine/N1-methyl-pseudouridine | 1.33 |

TABLE 112
Capping chemistry and yield for Luciferase modified mRNA

| Chemical Modification | Yield (mg) |
|---|---|
| 5-methylcytidine | 1.02 |
| N4-acetylcytidine | 0.93 |
| 5-formylcytidine | 0.55 |
| Pseudouridine | 2.07 |
| N1-methyl-pseudouridine | 1.27 |
| 2-thiouridine | 1.44 |
| 5-methoxyuridine | 2 |
| 5-methyluridine | 0.8 |
| α-Thio-cytidine | 0.74 |
| 5-Br-uridine (5Bru) | 1.29 |
| 5 (2 carbomethoxyvinyl) uridine | 0.54 |
| 5 (3-1E propenyl Amino) uridine | 1.39 |
| N4-acetylcytidine/pseudouridine | 0.99 |
| N4-acetylcytidine/N1-methyl-pseudouridine | 1.08 |
| 5-methylcytidine/5-methoxyuridine | 1.13 |
| 5-methylcytidine/5-methyluridine | 1.08 |
| 5-methylcytidine/half of the uridines are | 1.2 |
| modified with 2-thiouridine | |
| 5-methylcytidine/2-thiouridine | 1.27 |
| 5-methylcytidine/pseudouridine | 1.19 |
| 5-methylcytidine/N1-methyl-pseudouridine | 1.04 |

TABLE 113
In vitro transcription chemistry
and yield for G-CSF modified mRNA

| Chemical Modification | Yield (mg) |
|---|---|
| N6-methyladenosine | 1.57 |
| 5-methylcytidine | 2.05 |
| N4-acetylcytidine | 3.13 |
| 5-formylcytidine | 1.41 |
| Pseudouridine | 4.1 |
| N1-methyl-pseudouridine | 3.24 |
| 2-thiouridine | 3.46 |
| 5-methoxyuridine | 2.57 |
| 5-methyluridine | 4.27 |
| 4-thiouridine | 1.45 |
| 2′-F-uridine | 0.96 |
| α-Thio-cytidine | 2.29 |
| 2′-F-guanosine | 0.6 |
| N-1-methyladenosine | 0.63 |
| 5-Br-uridine (5Bru) | 1.08 |
| 5 (2 carbomethoxyvinyl) uridine | 1.8 |
| 5 (3-1E propenyl Amino) uridine | 2.09 |
| N4-acetylcytidine/pseudouridine | 1.72 |
| N4-acetylcytidine/N1-methyl-pseudouridine | 1.37 |
| 5-methylcytidine/5-methoxyuridine | 1.85 |
| 5-methylcytidine/5-methyluridine | 1.56 |
| 5-methylcytidine/half of the uridines are | 1.84 |
| modified with 2-thiouridine | |
| 5-methylcytidine/2-thiouridine | 2.53 |
| 5-methylcytidine/pseudouridine | 0.63 |
| N4-acetylcytidine/2-thiouridine | 1.3 |
| N4-acetylcytidine/5-bromouridine | 1.37 |
| 5-methylcytidine/N1-methyl-pseudouridine | 1.25 |
| N4-acetylcytidine/pseudouridine | 2.24 |

TABLE 114
Capping chemistry and yield for G-CSF modified mRNA

| Chemical Modification | Yield (mg) |
|---|---|
| N6-methyladenosine | 1.04 |
| 5-methylcytidine | 1.08 |
| N4-acetylcytidine | 2.73 |
| 5-formylcytidine | 0.95 |
| Pseudouridine | 3.88 |
| N1-methyl-pseudouridine | 2.58 |
| 2-thiouridine | 2.57 |
| 5-methoxyuridine | 2.05 |
| 5-methyluridine | 3.56 |
| 4-thiouridine | 0.91 |
| 2′-F-uridine | 0.54 |
| α-Thio-cytidine | 1.79 |
| 2′-F-guanosine | 0.14 |
| 5-Br-uridine (5Bru) | 0.79 |
| 5 (2 carbomethoxyvinyl) uridine | 1.28 |
| 5 (3-1E propenyl Amino) uridine | 1.78 |
| N4-acetylcytidine/pseudouridine | 0.29 |
| N4-acetylcytidine/N1-methyl-pseudouridine | 0.33 |
| 5-methylcytidine/5-methoxyuridine | 0.91 |
| 5-methylcytidine/5-methyluridine | 0.61 |
| 5-methylcytidine/half of the uridines are | 1.24 |
| modified with 2-thiouridine | |
| 5-methylcytidine/pseudouridine | 1.08 |
| N4-acetylcytidine/2-thiouridine | 1.34 |
| N4-acetylcytidine/5-bromouridine | 1.22 |
| 5-methylcytidine/N1-methyl-pseudouridine | 1.56 |

### Example 74. In vitro Transcription with mutant T7 polymerase

[1426] Luciferase mRNA (mRNA sequence shown in SEQ ID NO: 16112; polyA tail of approximately 160 nucleotides not shown in sequence; 5′cap, Cap1) and G-CSF mRNA (mRNA sequence shown in SEQ ID NO: 16102; poly A tail of approximately 160 nucleotides not shown in sequence; 5′cap, Cap1) were fully modified with different chemistries and chemistry combinations listed in Tables 115-118 using a mutant T7 polymerase (Durascribe● T7 Transcription kit (Cat. No. DSO 10925) (Epicentre●, Madison, WI).

[1427] The yield of the translation reactions was determined by spectrophometric measurement (OD260) and the yield for Luciferase is shown in Tables 115 and G-CSF is shown in Tables 117.

[1428] The luciferase and G-CSF modified mRNA were also subjected to an enzymatic capping reaction and each modified mRNA capping reaction was evaluated for yield by spectrophometic measurement (OD260) and correct size assessed using bioanalyzer. The yield from the capping reaction for luciferase is shown in Table 116 and G-CSF is shown in Table 118.

TABLE 115
In vitro transcription chemistry and
yield for Luciferase modified mRNA

| Chemical Modification | Yield (ug) |
|---|---|
| 2′Fluorocytosine | 71.4 |
| 2′Fluorouridine | 57.5 |
| 5-methylcytosine/pseudouridine, test A | 26.4 |
| 5-methylcytosine/N1-methyl-pseudouridine, test A | 73.3 |
| N1-acetylcytidine/2-fluorouridine | 202.2 |
| 5-methylcytidine/2-fluorouridine | 131.9 |
| 2-fluorocytosine/pseudouridine | 119.3 |
| 2-fluorocytosine/N1-methyl-pseudouridine | 107.0 |
| 2-fluorocytosine/2-thiouridine | 34.7 |
| 2-fluorocytosine/5-bromouridine | 81.0 |
| 2-fluorocytosine/2-fluorouridine | 80.4 |
| 2-fluoroguanine/5-methylcytosine | 61.2 |
| 2-fluoroguanine/5-methylcytosine/pseudouridine | 65.0 |
| 2-fluoroguanine/5-methylcytidine/N1-methyl-pseudouridine | 41.2 |
| 2-fluoroguanine/pseudouridine | 79.1 |
| 2-fluoroguanine/N1-methyl-pseudouridine | 74.6 |
| 5-methylcytidine/pseudouridine, test B | 91.8 |
| 5-methylcytidine/N1-methyl-pseudouridine, test B | 72.4 |
| 2′fluoroadenosine | 190.98 |

TABLE 116
Capping chemistry and yield for Luciferase modified mRNA

| Chemical Modification | Yield (ug) |
|---|---|
| 2′Fluorocytosine | 19.2 |
| 2′Fluorouridine | 16.7 |
| 5-methylcytosine/pseudouridine, test A | 7.0 |
| 5-methylcytosine/N1-methyl-pseudouridine, test A | 21.5 |
| N1-acetylcytidine/2-fluorouridine | 47.5 |
| 5-methylcytidine/2-fluorouridine | 53.2 |
| 2-fluorocytosine/pseudouridine | 58.4 |
| 2-fluorocytosine/N1-methyl-pseudouridine | 26.2 |
| 2-fluorocytosine/2-thiouridine | 12.9 |
| 2-fluorocytosine/5-bromouridine | 26.5 |
| 2-fluorocytosine/2-fluorouridine | 35.7 |
| 2-fluoroguanine/5-methylcytosine | 24.7 |
| 2-fluoroguanine/5-methylcytosine/pseudouridine | 32.3 |
| 2-fluoroguanine/5-methylcytidine/N1-methyl-pseudouridine | 31.3 |
| 2-fluoroguanine/pseudouridine | 20.9 |
| 2-fluoroguanine/N1-methyl-pseudouridine | 29.8 |
| 5-methylcytidine/pseudouridine, test B | 58.2 |
| 5-methylcytidine/N1-methyl-pseudouridine, test B | 44.4 |

TABLE 117
In vitro transcription chemistry
and yield for G-CSF modified mRNA

| Chemical Modification | Yield (ug) |
|---|---|
| 2′Fluorocytosine | 56.5 |
| 2′Fluorouridine | 79.4 |
| 5-methylcytosine/pseudouridine, test A | 21.2 |
| 5-methylcytosine/N1-methyl-pseudouridine, test A | 77.1 |
| N1-acetylcytidine/2-fluorouridine | 168.6 |
| 5-methylcytidine/2-fluorouridine | 134.7 |
| 2-fluorocytosine/pseudouridine | 97.8 |
| 2-fluorocytosine/N1-methyl-pseudouridine | 103.1 |
| 2-fluorocytosine/2-thiouridine | 58.8 |
| 2-fluorocytosine/5-bromouridine | 88.8 |
| 2-fluorocytosine/2-fluorouridine | 93.9 |
| 2-fluoroguanine/5-methylcytosine | 97.3 |
| 2-fluoroguanine/5-methylcytosine/pseudouridine | 96.0 |
| 2-fluoroguanine/5-methylcytidine/N1-methyl-pseudouridine | 82.0 |
| 2-fluoroguanine/pseudouridine | 68.0 |
| 2-fluoroguanine/N1-methyl-pseudouridine | 59.3 |
| 5-methylcytidine/pseudouridine, test B | 58.7 |
| 5-methylcytidine/N1-methyl-pseudouridine, test B | 78.0 |

TABLE 118
Capping chemistry and yield for G-CSF modified mRNA

| Chemical Modification | Yield (ug) |
|---|---|
| 2′Fluorocytosine | 16.9 |
| 2′Fluorouridine | 17.0 |
| 5-methylcytosine/pseudouridine, test A | 10.6 |
| 5-methylcytosine/N1-methyl-pseudouridine, test A | 22.7 |
| N1-acetylcytidine/2-fluorouridine | 19.9 |
| 5-methylcytidine/2-fluorouridine | 21.3 |
| 2-fluorocytosine/pseudouridine | 65.2 |
| 2-fluorocytosine/N1-methyl-pseudouridine | 58.9 |
| 2-fluorocytosine/2-thiouridine | 41.2 |
| 2-fluorocytosine/5-bromouridine | 35.8 |
| 2-fluorocytosine/2-fluorouridine | 36.7 |
| 2-fluoroguanine/5-methylcytosine | 36.6 |
| 2-fluoroguanine/5-methylcytosine/pseudouridine | 37.3 |
| 2-fluoroguanine/5-methylcytidine/N1-methyl-pseudouridine | 30.7 |
| 2-fluoroguanine/pseudouridine | 29.0 |
| 2-fluoroguanine/N1-methyl-pseudouridine | 22.7 |
| 5-methylcytidine/pseudouridine, test B | 60.4 |
| 5-methylcytidine/N1-methyl-pseudouridine, test B | 33.0 |

### Example 75. 2′O-methyl and 2′Fluoro compounds

[1429] Luciferase mRNA (mRNA sequence shown in SEQ ID NO: 16112; polyA tail of approximately 160 nucleotides not shown in sequence; 5′cap, Cap1) were produced as fully modified versions with the chemistries in Table 119 and transcribed using mutant T7 polymerase (Durascribe● T7 Transcription kit (Cat. No. DS010925) (Epicentre●, Madison, WI). 2′ fluoro-containing mRNA were made using Durascribe T7, however, 2′Omethyl-containing mRNA could not be transcribed using Durascribe T7.

[1430] Incorporation of 2′Omethyl modified mRNA might possibly be accomplished using other mutant 17 polymerases (Nat Biotechnol. (2004) 22:1155-1 160; Nucleic Acids Res. (2002) 30:e138) or U.S. Pat. No. 7,309,570, the contents of each of which are incorporated herein by reference in their entirety. Alternatively, 2′OMe modifications could be introduced post-transcriptionally using enzymatic means.

[1431] Introduction of modifications on the 2′ group of the sugar has many potential advantages. 2′OMe substitutions, like 2′ fluoro substitutions are known to protect against nucleases and also have been shown to abolish innate immune recognition when incorporated into other nucleic acids such as siRNA and anti-sense (incorporated in its entirety, Crooke, ed. Antisense Drug Technology, 2^{nd} edition; Boca Raton: CRC press).

[1432] The 2′Fluoro-modified mRNA were then transfected into HeLa cells to assess protein production in a cell context and the same mRNA were also assessed in a cell-free rabbit reticulocyte system. A control of unmodified luciferase (natural luciferase) was used for both transcription experiments, a control of untreated and mock transfected (Lipofectamine 2000 alone) were also analyzed for the HeLa transfection and a control of no RNA was analyzed for the rabbit reticulysates.

[1433] For the HeLa transfection experiments, the day before transfection, 20,000 HeLa cells (ATCC no. CCL-2; Manassas, VA) were harvested by treatment with Trypsin-EDTA solution (LifeTechnologies, Grand Island, NY) and seeded in a total volume of 100 ul EMEM medium (supplemented with 10% FCS and 1× Glutamax) per well in a 96-well cell culture plate (Corning, Manassas, VA). The cells were grown at 37° G in 5% CO₂ atmosphere overnight. Next day, 83 ng of the 2′fluoro-containing luciferase modified RNA (mRNA sequence shown in SEQ ID NO: 16112; polyA tail of approximately 160 nucleotides not shown in sequence; 5′cap, Cap1) with the chemical modification described in Table 119, were diluted in 10 ul final volume of OPTI-MEM (LifeTechnologies, Grand Island, NY). Lipofectamine 2000 (LifeTechnologies, Grand Island, NY) was used as transfection reagent and 0.2 ul were diluted in 10 ul final volume of OPTI-MEM. After 5 minutes of incubation at room temperature, both solutions were combined and incubated an additional 15 minute at room temperature. Then the 20 ul combined solution was added to the 100 ul cell culture medium containing the HeeLa cells and incubated at room temperature. After 18 to 22 hours of incubation cells expressing luciterase were lysed with 100 ul of Passive Lysis Buffer (Promega, Madison, WI) according to manufacturer instructions. Aliquots of the lysates were transferred to white opaque polystyrene 96-well plates (Corning, Manassas, VA) and combined with 100 ul complete luciferase assay solution (Promega, Madison, WI). The lysate volumes were adjusted or diluted until no more than 2 mio relative light units (RLU) per well were detected for the strongest signal producing samples and the RLUs for each chemistry tested are shown in Table 119, The plate reader was a BioTek Synergy 111 (BioTek, Winooski, VT). The background signal of the plates without reagent was about 200 relative light units per well.

[1434] For the rabbit reticulocyte lysate assay, 2′-fluoro-containing luciferase mRNA were diluted in sterile nuclease-free water to a final amount of 250 ng in 10 ul and added to 40 ul of freshly prepared Rabbit Reticulocyte Lysate and the in vitro translation reaction was done in a standard 1.5 mL polypropylene reaction tube (Thermo Fisher Scientific, Waltham, MA) at 30° C. in a dry heating block. The translation assay was done with the Rabbit Reticulocyte Lysate (nuclease-treated) kit (Promega, Madison, WI) according to the manufacturer's instructions. The reaction buffer was supplemented with a one-to-one blend of provided amino acid stock solutions devoid of either Leucine or Methionine resulting in a reaction mix containing sufficient amounts of both amino acids to allow effective in vitro translation. After 60 minutes of incubation, the reaction was stopped by placing the reaction tubes on ice.

[1435] Aliquots of the in vitro translation reaction containing luciferase modified RNA were transferred to white opaque polystyrene 96-well plates (Corning, Manassas, VA) and combined with 100 ul complete luciferase assay solution (Promega, Madison, WI). The volumes of the in vitro translation reactions were adjusted or diluted until no more than 2 mio relative light units (RLUs) per well were detected for the strongest signal producing samples and the RLUs for each chemistry tested are shown in Table 120. The plate reader was a BioTek Synergy H1 (BioTek, Winooski, VT). The background signal of the plates without reagent was about 160 relative light units per well.

[1436] As can be seen in Table 119 and 120, multiple 2′Fluoro-containing compounds are active in vitro and produce luciferase protein.

TABLE 119
HeLa Cells

| | Concentration | Volume | Yield | |
|---|---|---|---|---|
| Chemical Modification | (ug/ml) | (ul) | (ug) | RLU |
| 2′Fluoroadenosine | 381.96 | 500 | 190.98 | 388.5 |
| 2′Fluorocytosine | 654.56 | 500 | 327.28 | 2420 |
| 2′Fluoroguanine | 541.795 | 500 | 270.90 | 11,705.5 |
| 2′Flurorouridine | 944.005 | 500 | 472.00 | 6767.5 |
| Natural luciferase | N/A | N/A | N/A | 133,853.5 |
| Mock | N/A | N/A | N/A | 340 |
| Untreated | N/A | N/A | N/A | 238 |

TABLE 120
Rabbit Reticulysates

| Chemical Modification | RLU |
|---|---|
| 2′Fluoroadenosine | 162 |
| 2′Fluorocytosine | 208 |
| 2′Fluoroguanine | 371,509 |
| 2′Flurorouridine | 258 |
| Natural luciferase | 2,159,968 |
| No RNA | 156 |

### Example 76. Luciferase in HeLa Cells using a combination of modifications

[1437] To evaluate using of 2′fluoro-modified mRNA in combination with other modification a series of mRNA were transcribed using either wild-type T7 polymerase (non-fluoro-containing compounds) or using mutant 17 polymerases (fluoro-containing compounds) as described in Example 75. All modified mRNA were tested by in vitro transfection in HeLa cells.

[1438] The day before transfection, 20,000 HeLa cells (ATCC no. CCL-2; Manassas, VA) were harvested by treatment with Trypsin-EDTA solution (LifeTechnologies, Grand Island, NY) and seeded in a total volume of 100 ul EMEM medium (supplemented with 10% FCS and 1× Glutamax) per well in a 96-well cell culture plate (Corning, Manassas, VA). The cells were grown at 37° G in 5% CO₂ atmosphere overnight. Next day, 83 ng of Luciferase modified RNA (mRNA sequence shown in SEQ ID NO: 16112; polyA tail of approximately 160 nucleotides not shown in sequence; 5′cap, Cap1) with the chemical modification described in Table 121, were diluted in 10 ul final volume of OPTI-MEM (LifeTechnologies, Grand Island, NY). Lipofectamine 2000 (LifeTechnologies, Grand Island, NY) was used as transfection reagent and 0.2 ul wₑre diluted in 10 ul final volume of OPTI-MEM. After 5 minutes of incubation at room temperature, both solutions were combined and incubated an additional 15 minute at room temperature. Then the 20 ul combined solution was added to the 100 ul cell culture medium containing the HeLa cells and incubated at room temperature.

[1439] After 18 to 22 hours of incubation cells expressing luciferase were lysed with 100 ul of Passive Lysis Buffer (Promega, Madison, WI) according to manufacturer instructions. Aliquots of the lysates were transferred to white opaque polystyrene 96-well plates (Coring, Manassas, VA) and combined with 100 ml complete luciferase assay solution (Promega, Madison, WI). The lysate volumes were adjusted or diluted until no more than 2 mio relative light units (RLU) per well were detected for the strongest signal producing samples and the RLUs for each chemistry tested are shown in Table 121. The plate reader was a BioTek Synergy H1 (BioTek, Winooski, VT). The background signal of the plates without reagent was about 200 relative light units per well.

[1440] As evidenced in Table 121, most combinations of modifications resulted in mRNA which produced functional luciferase protein, including all the non-fluoro containing compounds and many of the combinations containing fluoro modifications.

TABLE 121
Luciferase

| Chemical Modification | RLU |
|---|---|
| N4-acetylcytidine/pseudouridine | 113,796 |
| N4-acetylcytidine/N1-methyl-pseudouridine | 316,326 |
| 5-methylcytidine/5-methoxyuridine | 24,948 |
| 5-methylcytidine/5-methyluridine | 43,675 |
| 5-methylcytidine/half of the uridines modified with | 41,601 |
| 50% 2-thiouridine | |
| 5-methylcytidine/2-thiouridine | 1,102 |
| 5-methylcytidine/pseudouridine | 51,035 |
| 5-methylcytidine/N1-methyl-pseudouridine | 152,151 |
| N4-acetylcytidine/2′Fluorouridine triphosphate | 288 |
| 5-methylcytidine/2′Fluorouridine triphosphate | 269 |
| 2′Fluorocytosine triphosphate/pseudouridine | 260 |
| 2′Fluorocytosine triphosphate/N1-methyl- | 412 |
| pseudouridine | |
| 2′Fluorocytosine triphosphate/2-thiouridine | 427 |
| 2′Fluorocytosine triphosphate/5-bromouridine | 253 |
| 2′Fluorocytosine triphosphate/2′Fluorouridine | 184 |
| triphosphate | |
| 2′Fluoroguanine triphosphate/5-methylcytidine | 321 |
| 2′Fluoroguanine triphosphate/5-methylcytidine/ | 207 |
| Pseudouridine | |
| 2′Fluoroguanine/5-methylcytidine/N1-methyl- | 235 |
| psuedouridine | |
| 2′Fluoroguanine/pseudouridine | 218 |
| 2′Fluoroguanine/N1-methyl-psuedouridine | 247 |
| 5-methylcytidine/pseudouridine, test A | 13,833 |
| 5-methylcytidine/N1-methyl-pseudouridine, test A | 598 |
| 2′Fluorocytosine triphosphate | 201 |
| 2′Fluorouridine triphosphate | 305 |
| 5-methylcytidine/pseudouridine, test B | 115,401 |
| 5-methylcytidine/N1-methyl-pseudouridine, test B | 21,034 |
| Natural luciferase | 30,801 |
| Untreated | 344 |
| Mock | 262 |

### Example 77. G-CSF In Vitro Transcription

[1441] To assess the activity of all our different chemical modifications in the context of a second open reading frame, we replicated experiments previously conducted using luciferase mRNA, with human G-CSF mRNA. G-CSF mRNA (mRNA sequence shown in SEQ ID NO: 16102; polyA tail of approximately 160 nucleotides not shown in sequence; 5′cap, Cap1) were fully modified with the chemistries in Tables 122 and 123 using wild-type T7 polymerase (for all non-fluoro-containing compounds) or mutant T7 polymerase (for all fluoro-containing compounds). The mutant T7 polymerase was obtained commercially (Durascribe● T7 Transcription kit (Cat. No. DS010925) (Epicentre●, Madison, WI).

[1442] The modified RNA in Tables 122 and 123 were transfected in vitro in HeLa cells or added to rabbit reticulysates (250 ng of modified mRNA) as indicated. A control of untreated, mock transfected (transfection reagent alone), G-CSF fully modified with 5-methylcytosine and N1-methyl-pseudouridine or luciferase control (mRNA sequence shown in SEQ ID NO: 16112; polyA tail of approximately 160 nucleotides not shown in sequence; 5′cap, Cap1) fully modified with 5-methylcytosine and N1-methyl-pseudouridine were also analyzed. The expression of G-CSF protein was determined by ELISA and the values are shown in Tables 122 and 123, In Table 122, “NT” means not tested.

[1443] As shown in Table 123, many, but not all, chemical modifications resulted in human G-CSF protein production. These results from cell-based and cell-free translation systems correlate very nicely with the same modifications generally working or not working in both systems. One notable exception is 5-formylcytidine modified G-CSF mRNA which worked in the cell-free translation system, but not in the HeLa cell-based transfection system. A similar difference between the two assays was also seen with 5-formylcytidine modified luciferase mRNA.

[1444] As demonstrated in Table 123, many, but not all, G-CSF mRNA modified chemistries (when used in combination) demonstrated in vivo activity. In addition the presence of N1-methyl-pseudouridine in the modified mRNA (with N4-acetylcytidine or 5 methylcytidine) demonstrated higher expression than when the same combinations where tested using with pseudouridine. Taken together, these data demonstrate that N1-methyl-pseudouridine containing G-CSF mRNA results in improved protein expression in vitro.

TABLE 122
G-CSF Expression

| | | G-CSF |
|---|---|---|
| | | protein |
| | G-CSF | (pg/ml) |
| | protein | Rabbit |
| | (pg/ml) | reticulysates |
| Chemical Modification | HeLa cells | cells |
| Pseudouridine | 1,150,909 | 147,875 |
| 5-methyluridine | 347,045 | 147,250 |
| 2-thiouridine | 417,273 | 18,375 |
| N1-methylpseudouridine | NT | 230,000 |
| 4-thiouridine | 107,273 | 52,375 |
| 5-methoxyuridine | 1,715,909 | 201,750 |
| 5-methylcytosine/pseudouridine, Test A | 609,545 | 119,750 |
| 5-methylcytosine/N1-methyl- | 1,534,318 | 110,500 |
| pseudouridine, Test A | | |
| 2′-Fluoro-guanosine | 11,818 | 0 |
| 2′-Fluoro-uridine | 60,455 | 0 |
| 5-methylcytosine/pseudouridine, Test B | 358,182 | 57,875 |
| 5-methylcytosine/N1-methyl- | 1,568,636 | 76,750 |
| pseudouridine, Test B | | |
| 5-Bromo-uridine | 186,591 | 72,000 |
| 5-(2carbomethoxyvinyl) uridine | 1,364 | 0 |
| 5-[3(1-E-propenylamino) uridine | 27,955 | 32,625 |
| α-thio-cytidine | 120,455 | 42,625 |
| 5-methylcytosine/pseudouridine, Test C | 882,500 | 49,250 |
| N1-methyl-adenosine | 4,773 | 0 |
| N6-methyl-adenosine | 1,591 | 0 |
| 5-methyl-cytidine | 646,591 | 79,375 |
| N4-acetylcytidine | 39,545 | 8,000 |
| 5-formyl-cytidine | 0 | 24,000 |
| 5-methylcytosine/pseudouridine, Test D | 87,045 | 47,750 |
| 5-methylcytosine/N1-methyl- | 1,168,864 | 97,125 |
| pseudouridine, Test D | | |
| Mock | 909 | 682 |
| Untreated | 0 | 0 |
| 5-methylcytosine/N1-methyl- | 1,106,591 | NT |
| pseudouridine, Control | | |
| Luciferase control | NT | 0 |

TABLE 123
Combination Chemistries in HeLa cells

| | G-CSF protein |
|---|---|
| | (pg/ml) |
| Chemical Modification | HeLa cells |
| N4-acetylcytidine/pseudouridine | 537,273 |
| N4-acetylcytidine/N1-methyl-pseudouridine | 1,091,818 |
| 5-methylcytidine/5-methoxyuridine | 516,136 |
| 5-methylcytidine/5-bromouridine | 48,864 |
| 5-methylcytidine/5-methyluridine | 207,500 |
| 5-methylcytidine/2-thiouridine | 33,409 |
| N4-acetylcytidine/5-bromouridine | 211,591 |
| N4-acetylcytidine/2-thiouridine | 46,136 |
| 5-methylcytosine/pseudouridine | 301,364 |
| 5-methylcytosine/N1-methyl-pseudouridine | 1,017,727 |
| N4-acetylcytidine/2′Fluorouridine triphosphate | 62,273 |
| 5-methylcytidine/2′Fluorouridine triphosphate | 49,318 |
| 2′Fluorocytosine triphosphate/pseudouridine | 7,955 |
| 2′Fluorocytosine triphosphate/N1-methyl- | 1,364 |
| pseudouridine | |
| 2′Fluorocytosine triphosphate/2-thiouridine | 0 |
| 2′Fluorocytosine triphosphate/5-bromouridine | 1,818 |
| 2′Fluorocytosine triphosphate/2′Fluorouridine | 909 |
| triphosphate | |
| 2′Fluoroguanine triphosphate/5-methylcytidine | 0 |
| 2′Fluoroguanine triphosphate/5-methylcytidine/ | 0 |
| pseudouridine | |
| 2′Fluoroguanine triphosphate/5-methylcytidine/ | 1,818 |
| N1-methyl-pseudouridine | |
| 2′Fluoroguanine triphosphate/pseudouridine | 1,136 |
| 2′Fluoroguanine triphosphate/2′Fluorocytosine | 0 |
| triphosphate/N1-methyl-pseudouridine | |
| 5-methylcytidine/pseudouridine | 617,727 |
| 5-methylcytidine/N1-methyl-pseudouridine | 747,045 |
| 5-methylcytidine/pseudouridine | 475,455 |
| 5-methylcytidine/N1-methyl-pseudouridine | 689,091 |
| 5-methylcytosine/N1-methyl-pseudouridine, Control 1 | 848,409 |
| 5-methylcytosine/N1-methyl-pseudouridine, Control 2 | 581,818 |
| Mock | 682 |
| Untreated | 0 |
| Luciferase 2′Fluorocytosine triphosphate | 0 |
| Luciferase 2′Fluorouridine triphosphate | 0 |

### Example 78. Screening of Chemistries

[1445] The tables listed in below (Tables 124-126) summarize much of the in vitro and in vitro screening data with the different compounds presented in the previous examples. A good correlation exists between cell-based and cell-free translation assays. The same chemistry substitutions generally show good concordance whether tested in the context of luciferase or G-CSF mRNA. Lastly, N1-methyl-pseudouridine containing mRNA show a very high level of protein expression with little to no detectable cytokine stimulation in vitro and in vivo, and is superior to mRNA containing pseudouridine both in vitro and in vivo.

[1446] Luciferase mRNA (mRNA sequence shown in SEQ ID NO: 16112; polyA tail of approximately 160 nucleotides not shown in sequence; 5′cap, Cap1) and G-CSF mRNA (mRNA sequence shown in SEQ ID NO: 16102; polyA tail of approximately 160 nucleotides not shown in sequence; 5′cap, Cap1) were modified with naturally and non-naturally occurring chemistries described in Tables 124 and 125 or combination chemistries described in Table 126 and tested using methods described herein.

[1447] In Tables 125 and 126, “*” refers to in vitro transcription reaction using a mutant T7 polymerase (Durascribe● T7 Transcription kit (Cat. No. DS010925) (Epicentre●, Madison, WI); “**” refers to the second result in vitro transcription reaction using a mutant T7 polymerase (Durascribe● T7 Transcription kit (Cat. No. DS010925) (Epicentre●, Madison, W1l); “***” refers to production seen in cell free translations (rabbit reticulocyte lysates); the protein production of HeLa is judged by “+,” “+/−” and “−”; when referring to G-CSF PBMC “++++” means greater than 6,000 pg/ml G-CSF, “+++” means greater than 3,000 pg/ml G-CSF, “+” means greater than 1,500 pg/ml G-CSF, “+” means greater than 300 pg/ml G-CSF, “+/−” means 150-300 pg/ml G-CSF and the background was about 110 pg/ml; when referring to cytokine PBMC “++++” means greater than 1,000 μg/ml interferon-alpha (IFN-alpha), “+++” means greater than 600 pg/ml IFN-alpha, “++” means greater than 300 pg/ml IFN-alpha, “+” means greater than 100 pg/ml IFN-alpha, “−” means less than 100 pg/ml and the background was about 70 pg/ml; and “NT” means not tested. In Table 125, the protein production was evaluated using a mutant T7 polymerase (Durascribe● T7 Transcription kit (Cat. No. DS010925) (Epicentre●, Madison, W1).

TABLE 124
Naturally Occurring

| | | | | Protein | Protein | Cytokines | | In Vivo |
|---|---|---|---|---|---|---|---|---|
| | | IVT | Protein | (G- | (G- | (G- | In Vivo | Protein |
| Common Name | IVT | (G- | (Luc; | CSF; | CSF; | CSF; | Protein | (G- |
| (symbol) | (Luc) | CSF) | HeLa) | HeLa) | PBMC) | PBMC) | (Luc) | CSF) |
| 1-methyladenosine | Fail | Pass | NT | − | +/− | ++ | NT | NT |
| (m¹A) | | | | | | | | |
| N⁶-methyladenosine | Pass | Pass | − | − | +/− | ++++ | NT | NT |
| (m⁶A) | | | | | | | | |
| 2′-O- | Fail* | Not | NT | NT | NT | NT | NT | NT |
| methyladenosine | | Done | | | | | | |
| (Am) | | | | | | | | |
| 5-methylcytidine | Pass | Pass | + | + | + | ++ | + | NT |
| (m⁵C) | | | | | | | | |
| 2′-O-methylcytidine | Fail* | Not | NT | NT | NT | NT | NT | NT |
| (Cm) | | Done | | | | | | |
| 2-thiocytidine (s²C) | Fail | Fail | NT | NT | NT | NT | NT | NT |
| N⁴-acetylcytidine | Pass | Pass | + | + | +/− | +++ | + | NT |
| (ac⁴C) | | | | | | | | |
| 5-formylcytidine | Pass | Pass | −*** | −*** | − | + | NT | NT |
| (f⁵C) | | | | | | | | |
| 2′-O- | Fail* | Not | NT | NT | NT | NT | NT | NT |
| methylguanosine | | Done | | | | | | |
| (Gm) | | | | | | | | |
| inosine (I) | Fail | Fail | NT | NT | NT | NT | NT | NT |
| pseudouridine (Y) | Pass | Pass | + | + | ++ | + | + | NT |
| 5-methyluridine | Pass | Pass | + | + | +/− | + | NT | NT |
| (m⁵U) | | | | | | | | |
| 2′-O-methyluridine | Fail* | Not | NT | NT | NT | NT | NT | NT |
| (Um) | | Done | | | | | | |
| 1- | Pass | Pass | + | Not | ++++ | − | + | NT |
| methylpseudouridine | | | | Done | | | | |
| (m¹Y) | | | | | | | | |
| 2-thiouridine (s²U) | Pass | Pass | − | + | + | + | NT | NT |
| 4-thiouridine (s⁴U) | Fail | Pass | | + | +/− | ++ | NT | NT |
| 5-methoxyuridine | Pass | Pass | + | + | ++ | − | + | NT |
| (mo⁵U) | | | | | | | | |
| 3-methyluridine | Fail | Fail | NT | NT | NT | NT | NT | NT |
| (m³U) | | | | | | | | |

TABLE 125
Non-Naturally Occurring

| | | | | | | | | In |
|---|---|---|---|---|---|---|---|---|
| | | | | Protein | Protein | Cytokines | | Vivo |
| | | IVT | Protein | (G- | (G- | (G- | In Vivo | Protein |
| Common | IVT | (G- | (Luc; | CSF; | CSF; | CSF; | Protein | (G- |
| Name | (Luc) | CSF) | HeLa) | HeLa) | PBMC) | PBMC) | (Luc) | CSF) |
| 2′-F-ara- | Fail | Fail | NT | NT | NT | NT | NT | NT |
| guanosine | | | | | | | | |
| 2′-F-ara- | Fail | Fail | NT | NT | NT | NT | NT | NT |
| adenosine | | | | | | | | |
| 2′-F-ara- | Fail | Fail | NT | NT | NT | NT | NT | NT |
| cytidine | | | | | | | | |
| 2′-F-ara- | Fail | Fail | NT | NT | NT | NT | NT | NT |
| uridine | | | | | | | | |
| 2′-F- | Fail/ | Pass/ | +** | +/− | − | + | + | NT |
| guanosine | Pass** | Fail** | | | | | | |
| 2′-F-adenosine | Fail/ | Fail/ | −** | NT | NT | NT | NT | NT |
| | Pass** | Fail** | | | | | | |
| 2′-F-cytidine | Fail/ | Fail/ | +** | NT | NT | NT | + | NT |
| | Pass** | Pass** | | | | | | |
| 2′-F-uridine | Fail/ | Pass/ | +** | + | +/− | + | − | NT |
| | Pass** | Pass** | | | | | | |
| 2′-OH-ara- | Fail | Fail | NT | NT | NT | NT | NT | NT |
| guanosine | | | | | | | | |
| 2′-OH-ara- | Not | Not | NT | NT | NT | NT | NT | NT |
| adenosine | Done | Done | | | | | | |
| 2′-OH-ara- | Fail | Fail | NT | NT | NT | NT | NT | NT |
| cytidine | | | | | | | | |
| 2′-OH-ara- | Fail | Fail | NT | NT | NT | NT | NT | NT |
| uridine | | | | | | | | |
| 5-Br-Uridine | Pass | Pass | + | + | + | + | + | |
| 5-(2- | Pass | Pass | − | − | +/− | − | | |
| carbomethoxy- | | | | | | | | |
| vinyl) Uridine | | | | | | | | |
| 5-[3-(1-E- | Pass | Pass | − | + | + | − | | |
| Propenylamino) | | | | | | | | |
| Uridine | | | | | | | | |
| (aka Chem 5) | | | | | | | | |
| N6-(19- | Fail | Fail | NT | NT | NT | NT | NT | NT |
| Amino- | | | | | | | | |
| pentaoxanonadecyl) | | | | | | | | |
| A | | | | | | | | |
| 2- | Fail | Fail | NT | NT | NT | NT | NT | NT |
| Dimethylamino | | | | | | | | |
| guanosine | | | | | | | | |
| 6-Aza- | Fail | Fail | NT | NT | NT | NT | NT | NT |
| cytidine | | | | | | | | |
| a-Thio- | Pass | Pass | + | + | +/− | +++ | NT | NT |
| cytidine | | | | | | | | |
| Pseudo- | NT | NT | NT | NT | NT | NT | NT | NT |
| isocytidine | | | | | | | | |
| 5-Iodo-uridine | NT | NT | NT | NT | NT | NT | NT | NT |
| a-Thio-uridine | NT | NT | NT | NT | NT | NT | NT | NT |
| 6-Aza-uridine | NT | NT | NT | NT | NT | NT | NT | NT |
| Deoxy- | NT | NT | NT | NT | NT | NT | NT | NT |
| thymidine | | | | | | | | |
| a-Thio | NT | NT | NT | NT | NT | NT | NT | NT |
| guanosine | | | | | | | | |
| 8-Oxo- | NT | NT | NT | NT | NT | NT | NT | NT |
| guanosine | | | | | | | | |
| O6-Methyl- | NT | NT | NT | NT | NT | NT | NT | NT |
| guanosine | | | | | | | | |
| 7-Deaza- | NT | NT | NT | NT | NT | NT | NT | NT |
| guanosine | | | | | | | | |
| 6-Chloro- | NT | NT | NT | NT | NT | NT | NT | NT |
| purine | | | | | | | | |
| a-Thio- | NT | NT | NT | NT | NT | NT | NT | NT |
| adenosine | | | | | | | | |
| 7-Deaza- | NT | NT | NT | NT | NT | NT | NT | NT |
| adenosine | | | | | | | | |
| 5-iodo- | NT | NT | NT | NT | NT | NT | NT | NT |
| cytidine | | | | | | | | |

[1448] In Table 126, the protein production of HeLa is judged by “+,” “+/−” and “−”; when referring to G-CSF BC “++++” means greater than 6,000 pg/ml G-CSF, “+++” means greater than 3,000 pg/ml G-CSF, “++” means greater than 1,500 pg/ml G-CSF, means greater than 3000 pg/ml G-CSF, “+/−” means 150-300 pg/ml G-CSF and the background was about 110 pg/ml; when referring to cytokine PBMC “+++” means greater than 1,000 pg/ml interferon-alpha (IFN-alpha), “+++” means greater than 600 pg/ml IFN-alpha, “++” means greater than 300 pg/ml IFN-alpha, “+” means greater than 100 pg/ml IFN-alpha, “−” means less than 100 pg/ml and the background was about 70 pg/ml; “WT” refers to the wild type T7 polymerase, “MT” refers to mutant T7 poly erase (Durascribe● T7 Transcription kit (Cat. No. DS010925) (Epicentre Madison, WI) and “NT” means not tested.

TABLE 126
Combination Chemistry

| | | | | | | Protein | Protein | Cytokines | In |
|---|---|---|---|---|---|---|---|---|---|
| | | | | IVT | Protein | (G- | (G- | (G- | Vivo |
| Cytidine | Uridine | | IVT | (G- | (Luc; | CSF; | CSF; | CSF; | Protein |
| analog | analog | Purine | Luc | CSF) | HeLa) | HeLa) | PBMC) | PBMC) | (Luc) |
| N4- | pseudouridine | A, G | Pass | Pass | + | + | NT | NT | + |
| acetylcytidine | | | WT | WT | | | | | |
| N4- | N1- | A, G | Pass | Pass | + | + | NT | NT | + |
| acetylcytidine | methyl- | | WT | WT | | | | | |
| | pseudouridine | | | | | | | | |
| 5- | 5- | A, G | Pass | Pass | + | + | NT | NT | + |
| methylcytidine | methoxyuridine | | WT | WT | | | | | |
| 5- | 5- | A, G | Pass | Pass | Not | + | NT | NT | |
| methylcytidine | bromouridine | | WT | WT | Done | | | | |
| 5- | 5- | A, G | Pass | Pass | + | + | NT | NT | + |
| methylcytidine | methyluridine | | WT | WT | | | | | |
| 5- | 50% 2- | A, G | Pass | Pass | + | NT | NT | NT | + |
| methylcytidine | thiouridine; | | WT | WT | | | | | |
| | 50% | | | | | | | | |
| | uridine | | | | | | | | |
| 5- | 100% | A, G | Pass | Pass | − | + | NT | NT | |
| methylcytidine | 2- | | WT | WT | | | | | |
| | thiouridine | | | | | | | | |
| 5- | pseudo- | A, G | Pass | Pass | + | + | ++ | + | + |
| methylcytidine | uridine | | WT | WT | | | | | |
| 5- | N1- | A, G | Pass | Pass | + | + | ++++ | − | + |
| methylcytidine | methyl- | | WT | WT | | | | | |
| | pseudouridine | | | | | | | | |
| N4- | 2- | A, G | Not | Pass | Not | + | NT | NT | NT |
| acetylcytidine | thiouridine | | Done | WT | Done | | | | |
| N4- | 5- | A, G | Not | Pass | Not | + | NT | NT | NT |
| acetylcytidine | bromouridine | | Done | WT | Done | | | | |
| N4- | 2 | A, G | Pass | Pass | − | + | NT | NT | NT |
| acetylcytidine | Fluorouridine | | | | | | | | |
| | triphosphate | | | | | | | | |
| 5- | 2 | A, G | Pass | Pass | − | + | NT | NT | NT |
| methylcytidine | Fluorouridine | | | | | | | | |
| | triphosphate | | | | | | | | |
| 2 | pseudouridine | A, G | Pass | Pass | − | + | NT | NT | NT |
| Fluorocytosine | | | | | | | | | |
| triphosphate | | | | | | | | | |
| 2 | N1- | A, G | Pass | Pass | − | +/− | NT | NT | NT |
| Fluorocytosine | methyl- | | | | | | | | |
| triphosphate | pseudouridine | | | | | | | | |
| 2 | 2- | A, G | Pass | Pass | − | − | NT | NT | NT |
| Fluorocytosine | thiouridine | | | | | | | | |
| triphosphate | | | | | | | | | |
| 2 | 5- | A, G | Pass | Pass | − | +/− | NT | NT | NT |
| Fluorocytosine | bromouridine | | | | | | | | |
| triphosphate | | | | | | | | | |
| 2 | 2 | A, G | Pass | Pass | − | +/− | NT | NT | NT |
| Fluorocytosine | Fluorouridine | | | | | | | | |
| triphosphate | triphosphate | | | | | | | | |
| 5- | uridine | A, 2 | Pass | Pass | − | − | NT | NT | NT |
| methylcytidine | | Fluoro | | | | | | | |
| | | GTP | | | | | | | |
| 5- | pseudouridine | A, 2 | Pass | Pass | − | − | NT | NT | NT |
| methylcytidine | | Fluoro | | | | | | | |
| | | GTP | | | | | | | |
| 5- | N1- | A, 2 | Pass | Pass | − | +/− | NT | NT | NT |
| methylcytidine | methyl- | Fluoro | | | | | | | |
| | pseudouridine | GTP | | | | | | | |
| 2 | pseudouridine | A, 2 | Pass | Pass | − | +/− | NT | NT | NT |
| Fluorocytosine | | Fluoro | | | | | | | |
| triphosphate | | GTP | | | | | | | |
| 2 | N1- | A, 2 | Pass | Pass | − | − | NT | NT | NT |
| Fluorocytosine | methyl- | Fluoro | | | | | | | |
| triphosphate | pseudouridine | GTP | | | | | | | |

[1449] The ability of G-S modified mRNA (mRNA sequence shown in SEQ ID NO: 16102; poly A tail of approximately 160 nucleotides not shown in sequence; 5′cap, Cap1) to trigger innate an immune response was determined by measuring interferon-alpha (IFN-αalpha) and tumor necrosis factor-alpha (TNF-alpha) production. Use of in vitro PBMG cultures is an accepted way to measure the immunostimulatory potential of oligonucleotides (Robbins et al., Oligonucleotides 2009 19:89-102) and transfection methods are described herein. Shown in Table 127 are the average from 2 or 3 separate PBMC donors of the interferon-alpha (IFN-alpha) and tumor necrosis factor alpha (INF-alpha) production over time as measured by specific ELISA. Controls of R848, P(I)P(C), LPS and Lipofectamine 2000 (L2000) were also analyzed.

[1450] With regards to innate immune recognition, while both modified mRNA chemistries largely prevented IFN-alpha and TNF-alpha production relative to positive controls (R848, P(I)P(C), 2′fluoro compounds reduce IFN-alpha and TNF-alpha production even lower than other combinations and -acetylcytidine combinations raised the cytokine profile.

TABLE 127
IFN-alpha and TNF-alpha

| | IFN-alpha: 3 | TNF-alpha: 2 |
|---|---|---|
| | Donor Aver- | Donor Aver- |
| | age (pg/ml) | age (pg/ml) |
| L2000 | 1 | 361 |
| P(I)P(C) | 482 | 544 |
| R848 | 45 | 8,235 |
| LPS | 0 | 6,889 |
| N4-acetylcytidine/pseudouridine | 694 | 528 |
| N4-acetylcytidine/N1-methyl- | 307 | 283 |
| pseudouridine | | |
| 5-methylcytidine/5-methoxyuridine | 0 | 411 |
| 5-methylcytidine/5-bromouridine | 0 | 270 |
| 5-methylcytidine/5-methyluridine | 456 | 428 |
| 5-methylcytidine/2-thiouridine | 274 | 277 |
| N4-acetylcytidine/2-thiouridine | 0 | 285 |
| N4-acetylcytidine/5-bromouridine | 44 | 403 |
| 5-methylcytidine/pseudouridine | 73 | 332 |
| 5-methylcytidine/N1-methyl- | 31 | 280 |
| pseudouridine | | |
| N4-acetylcytidine/2′fluorouridine | 35 | 32 |
| triphosphate | | |
| 5-methylcytodine/2′fluorouridine | 24 | 0 |
| triphosphate | | |
| 2′fluorocytidine triphosphate/N1- | 0 | 11 |
| methyl-pseudouridine | | |
| 2′fluorocytidine triphosphate/ | 0 | 0 |
| 2-thiouridine | | |
| 2′fluorocytidine/triphosphate5- | 12 | 2 |
| bromouridine | | |
| 2′fluorocytidine triphosphate/ | 11 | 0 |
| 2′fluorouridine triphosphate | | |
| 2′fluorocytidine triphosphate/ | 14 | 23 |
| 5-methylcytidine | | |
| 2′fluorocytidine triphosphate/ | 6 | 21 |
| 5-methylcytidine/pseudouridine | | |
| 2′fluorocytidine triphosphate/ | 3 | 15 |
| 5-methylcytidine/N1-methyl- | | |
| pseudouridine | | |
| 2′fluorocytidine triphosphate/ | 0 | 4 |
| pseudouridine | | |
| 2′fluorocytidine triphosphate/ | 6 | 20 |
| N1-methyl-pseudouridine | | |
| 5-methylcytidine/pseudouridine | 82 | 18 |
| 5-methylcytidine/N1-methyl- | 35 | 3 |
| pseudouridine | | |

### Example 80. Modified mRNA with a Tobacco Etch Virus 5′UTR

[1451] A 5′ untranslated region (UTR) may be provided as a flanking region. Multiple 5′ UTRs may be included in the flanking region and may be the same or of different sequences. Any portion of the flanking regions, including none, may be codon optimized and any may independently contain one or more different structural or chemical modifications, before and/or after codon optimization.

[1452] The 5′ UTR may comprise the 5′UTR from the tobacco etch virus (TEV). Variants of 5′ UTRs may be utilized wherein one or more nucleotides are added or removed to the termini, including A, T, C or G.

### Example 81. Expression of PLGA Formulated mRNA

### A. Synthesis and Characterization of Luciferase PLGA Microspheres

[1453] Luciferase mRNA (mRNA sequence shown in SEQ ID NO: 16112; polyA tail of approximately 140 nucleotides not shown in sequence; 5′cap, Cap1) fully modified with 5-methylcytosine and N1-methyl-pseudouridine, modified with 25% of uridine replaced with 2-thiouridine and 25% of cytosine replaced with 5-methylcytosine, fully modified with N1-methyl-pseudouridine, or fully modified with pseudouridine was reconstituted in 1×TE buffer and then formulated in PLGA microspheres. PLGA microspheres were synthesized using the water/oil/water double emulsification methods known in the art using PLGA-ester cap (Lactel, Cat #B6010-2, inherent viscosity 0.55-0.75, 50:50 LA:GA), polyvinylalcohol (PVA) (Sigma, Cat, #348406-25G, MW 13-23 k) dichloromethane and water. Briefly. 0.4 ml of mRNA in TE buffer at 4 mg/ml (WI) was added to 2 ml of PLGA dissolved in dichloromethane (DCM) (01) at a concentration of 200 mg/mll of PLGA. The W1/01 emulsion was homogenized (IKA Ultra-Turrax Homogenizer, T18) for 30 seconds at speed 5 (˜19,000 rpm). The W1/O1 emulsion was then added to 250 ml 1% PVA (W2) and homogenized for 1 minute at speed 5 (˜19,000 rpm). Formulations were left to stir for 3 hours, then passed through a 100 μm nylon mesh strainer (Fisherbrand Cell Strainer, Cat #22-363-549) to remove larger aggregates, and finally washed by centrifugation (10 min, 9,250 rpm, 4° C.). The supernatant was discarded and the PLGA pellets were resuspended in 5-10 ml of water, which was repeated 2×. After washing and resuspension with water, 100-200 μl of a PLGA microspheres sample was used to measure particle size of the formulations by laser diffraction (Malvern Mastersizer2000). The washed formulations were frozen in liquid nitrogen and then lyophilized for 2-3 days.

[1454] After lyophilization, −10 mg of PLGA MS were weighed out in 2 ml eppendorf tubes and deformulated by adding 1 ml of DCM and letting the samples shake for 2-6 hrs. The mRNA was extracted from the deformulated PLGA microspheres by adding 0.5 ml of water and shaking the sample overnight. Unformulated luciferase mRNA in TE buffer (unformulated control) was spiked into DCM and went through the deformulation process (deformulation control) to be used as controls in the transfection assay. The encapsulation efficiency, weight percent loading and particle size are shown in Table 128. Encapsulation efficiency was calculated as mg of mRNA from deformulation of PLGA microspheres divided by the initial amount of mRNA added to the formulation. Weight percent loading in the formulation was calculated as mg of mRNA from deformulation of PLGA microspheres divided by the initial amount of PLGA added to the formulation.

TABLE 128
PLGA Characteristics

| | | | Theoretical | | Particle |
|---|---|---|---|---|---|
| | Sample | Encapsulation | mRNA | Actual mRNA | Size |
| Chemical Modifications | ID | Efficiency (%) | Loading (wt %) | Loading (wt %) | (D50, um) |
| Fully modified with 5- | 43-66A | 45.8 | 0.4 | 0.18 | 33.4 |
| methylcytosine and N1- | 43-66B | 29.6 | | 0.12 | 27.7 |
| methyl pseudouridine | 43-66C | 25.5 | | 0.10 | 27.1 |
| 25% of uridine replaced | 43-67A | 34.6 | 0.4 | 0.14 | 29.9 |
| with 2-thiouridine and | 43-67B | 22.8 | | 0.09 | 30.2 |
| 25% of cytosine replaced | 43-67C | 23.9 | | 0.10 | 25.1 |
| with 5-methylcytosine | | | | | |
| Fully modified with N1- | 43-69A | 55.8 | 0.4 | 0.22 | 40.5 |
| methyl pseudouridine | 43-69B | 31.2 | | 0.12 | 41.1 |
| | 43-69C | 24.9 | | 0.10 | 46.1 |
| Fully modified with | 43-68-1 | 49.3 | 0.4 | 0.20 | 34.8 |
| pseudouridine | 43-68-2 | 37.4 | | 0.15 | 35.9 |
| | 43-68-3 | 45.0 | | 0.18 | 36.5 |

B. Protein Expression of Modified mRNA Encapsulated in PLGA Microspheres

[1455] The day before transfection, 20,000 HeLa cells (ATCC no. CCL-2; Manassas, VA) were harvested by treatment with Trypsin-EDTA solution (LifeTechnologies, Grand Island, NY) and seeded in a total volume of 100 ul EMEM medium (supplemented with 10% FCS and 1× Glutamax) per well in a 96-well cell culture plate (Corning, Manassas. VA). The cells were grown at 37° C. in a 5% C02 atmosphere overnight. The next day, 83 ng of the deformulated luciferase mRNA PLGA microsphere samples, deformulated luciferase mRNA control (Deform control), or unformulated luciferase mRNA control (Unfomul control) was diluted in a 10 ul final volume of OPTI-MEM (LifeTechnologies, Grand Island, NY). Lipofectamine 2000 (LifeTechnologies, Grand Island, NY) was used as a transfection reagent and 0.2 ul was diluted in a 11 ul final volume of OPTI-MEM. After 5 min of incubation at room temperature, both solutions were combined and incubated an additional 15 min at room temperature. Then 20 ul of the combined solution was added to 100 ul of cell culture medium containing the HeLa cells. The plates were then incubated as described before.

[1456] After an 18 to 22 hour incubation, cells expressing luciferase were lysed with 100 ul Passive Lysis Buffer (Promega, Madison, WI) according to manufacturer instructions. Aliquots of the lysates were transferred to white opaque polystyrene 96-well plates (Corning, Manassas, VA) and combined with 100 ul complete luciferase assay solution (Promega, Madison, WI). The background signal of the plates without reagent was about 200 relative light units per well. The plate reader was a BioTek Synergy H1 (BioTek, Winooski, VT).

[1457] Cells were harvested and the bioluminescence (in relative light units, RLU) for each sample is shown in Table 129. Transfection of these samples confirmed that the varied chemistries of luciferase mRNA is still able to express luciferase protein after PLGA microsphere formulation.

TABLE 129
Chemical Modifications

| Chemical | | Biolum. |
|---|---|---|
| Modifications | Sample ID | (RLU) |
| Fully modified with | Deform contol | 164266.5 |
| 5-methylcytosine | Unformul control | 113714 |
| and N1-methyl- | 43-66A | 25174 |
| pseudouridine | 43-66B | 25359 |
| | 43-66C | 20060 |
| 25% of uridine | Deform contol | 90816.5 |
| replaced with 2- | Unformul control | 129806 |
| thiouridine and 25% | 43-67A | 38329.5 |
| of cytosine replaced | 43-67B | 8471.5 |
| with 5- | 43-67C | 10991.5 |
| methylcytosine | | |
| Fully modified with | Deform contol | 928093.5 |
| N1-methyl- | Unformul control | 1512273.5 |
| pseudouridine | 43-69A | 1240299.5 |
| | 43-69B | 748667.5 |
| | 43-69C | 1193314 |
| Fully modified with | Deform contol | 154168 |
| pseudouridine | Unformul control | 151581 |
| | 43-68-1 | 120974.5 |
| | 43-68-2 | 107669 |
| | 43-68-3 | 97226 |

### Example 82. In vitro studies of Factor IX

### A. Serum-Free Media

[1458] Human Factor IX mRNA (mRNA sequence shown in SEQ ID NO: 16106; polyA tail of approximately 160 nucleotides not shown in sequence; 5′cap, Cap1; fully modified with 5-methylcytosine and pseudouridine) was transfected in serum-free media. The cell culture supernatant was collected and subjected to trypsin digestion before undergoing 2-dimensional HPLC separation of the peptides. Matrix-assisted laser desorption/ionization was used to detect the peptides. 8 peptides were detected and 7 of the detected peptides are unique to Factor IX. These results indicate that the mRNA transfected in the serum-free media was able to express full-length Factor IX protein.

### B. Human Embryonic Kidney (HEK) 293A Cells

[1459] 250 ng of codon optimized Human Factor IX mRNA (mRNA sequence shown in SEQ ID NO: 16106; fully modified with 5-methylcytosine and pseudouridine; polyA tail of approximately 160 nucleotides not shown in sequence; 5′cap, Cap1) was transfected into HEK 293A cells (150,000) cells/well) using Lipofectamine 2000 in DMEM in presence of 10% FBS. The transfection complexes were removed 3 hours after transfection. Cells were harvested at 3, 6, 9, 12, 24, 48 and 72 hours after transfection. Total RNA was isolated and used for cDNA synthesis. The cDNA was subjected to analysis by quantitative Real-Time PCR using codon optimized Factor IX specific primer set. Human hypoxanthine phosphoribosyltransferase 1 (HPRT) level was used for normalization. The data is plotted as a percent of detectable mRNA considering the mRNA level as 100% at the 3 hour time point. The half-life of Factor IX modified mRNA fully modified with 5-methylcytosine and pseudouridine in human embryonic kidney 293 (HEK293) cells is about 8-10 hours.

### Example 83. Saline Formulation: Subcutaneous Administration

[1460] Human G-CSF modified mRNA (mRNA sequence shown in SEQ ID NO: 16102; polyA tail of approximately 160 nucleotides not shown in sequence; 5′cap, Cap1; fully modified with 5-methylcytosine and pseudouridine) and human EPO modified mRNA (mRNA sequence shown in SEQ ID NO: 16105; polyA tail of approximately 160 nucleotides not shown in sequence; 5′cap, Cap1; fully modified with 5-methylcytosine and pseudouridine), were formulated in saline and delivered to mice via intramuscular (IM) injection at a dose of 100 ug.

[1461] Controls included Luciferase (mRNA sequence shown in SEQ ID NO: 16112; polyA tail of approximately 160 nucleotides not shown in sequence; 5′cap, Cap1; fully modified with 5-methylcytosine and pseudouridine)) or the formulation buffer (F.Buffer). The mice were bled at 13 hours after the injection to determine the concentration of the human polypeptide in serum in pg/mL. (G-CSF groups measured human G-CSF in mouse serum and EPO groups measured human EPO in mouse serum). The data are shown in Table 130.

[1462] mRNA degrades rapidly in serum in the absence of formulation suggesting the best method to deliver mRNA to last longer in the system is by formulating the mRNA. As shown in Table 130, mRNA can be delivered subcutaneously using only a buffer formulation.

TABLE 130
Dosing Regimen

| | | Dose | | Average |
|---|---|---|---|---|
| | | Vol. | Dosing | Protein Product |
| Group | Treatment | (μl/mouse) | Vehicle | pg/mL, serum |
| G-CSF | G-CSF | 100 | F. buffer | 45 |
| G-CSF | Luciferase | 100 | F. buffer | 0 |
| G-CSF | F. buffer | 100 | F. buffer | 2.2 |
| EPO | EPO | 100 | F. buffer | 72.03 |
| EPO | Luciferase | 100 | F. buffer | 26.7 |
| EPO | F. buffer | 100 | F. buffer | 13.05 |

### Example 84. Intravitreal Delivery

[1463] mCherry modified mRNA (mRNA sequence shown in SEQ ID NO: 16103; polyA tail of approximately 160) nucleotides not shown in sequence; 5′cap, Cap1; fully modified with 5-methylcytosine and pseudouridine) and luciferase modified mRNA (mRNA sequence shown in SEQ ID NO: 16112; polyA tail of approximately 160 nucleotides not shown in sequence; 5′cap, Cap1; fully modified with 5-methylcytosine and pseudouridine) formulated in saline was delivered intravitreally in rats as described in Table 131. The sample was compared against a control of saline only delivered intravitreally.

TABLE 131
Dosing Chart

| | Dose Level | Dose | Treatment | |
|---|---|---|---|---|
| | (μg modified | volume | Right Eye | Left Eye |
| Group No. | RNA/eye) | (μL/eye) | (OD) | (OS) |
| Control | 0 | 5 | Delivery | Delivery |
| | | | buffer only | buffer only |
| Modified RNA in | 10 | 5 | mCherry | Luciferase |
| delivery buffer | | | | |

[1464] The formulation will be administered to the left or right eye of each animal on day 1 while the animal is anesthetized. On the day prior to administration gentamicin ophthalmic ointment or solution was applied to both eyes twice. The gentamicin ophthalmic ointment or solution was also applied immediately following the injection and on the day following the injection. Prior to dosing, mydriatic drops (1% tropicamide and/or 2.5% phenylephrine) are applied to each eye.

[1465] 18 hours post dosing the eyes receiving the dose of mCherry and delivery buffer are enucleated and each eye was separately placed in a tube containing 10 mL 4% paraformaldehyde at room temperature for overnight tissue fixation. The following day, eyes will be separately transferred to tubes containing 10 mL of 30% sucrose and stored at 21° C. until they were processed and sectioned. The slides prepared from different sections were evaluated under F-microscopy. Positive expression was seen in the slides prepared with the eyes administered mCherry modified mRNA and the control showed no expression.

### Example 85. In Vivo Cytokine Expression Study

[1466] Mice were injected intramuscularly with 200 μg of G-CSF modified mRNA (mRNA sequence shown in SEQ ID NO: 16102; polyA tail of approximately 160 nucleotides not shown in sequence) which was unmodified with a 5′cap, Cap1 (unmodified), fully modified with 5-methylcytosine and pseudouridine and a 5′cap, Cap1 (Gen1) or fully modified with 5-methylcytosine and N1-methyl-pseudouridine and a 5′cap, Cap1 (Gen2 cap) or no cap (Gen2 uncapped). Controls of R-848, 5% sucrose and untreated mice were also analyzed. After 8 hours serum was collected from the mice and analyzed for interferon-alpha (IFN-alpha) expression. The results are shown in Table 132.

TABLE 132
IFN-alpha Expression

| Formulation | IFN-alpha (pg/ml) |
|---|---|
| G-CSF unmodified | 67.012 |
| G-CSF Gen1 | 8.867 |
| G-CSF Gen2 cap | 0 |
| G-CSF Gen2 uncapped | 0 |
| R-848 | 40.971 |
| 5% sucrose | 1.493 |
| Untreated | 0 |

### Example 86. In Vitro Expression of VEGF Modified mRNA

[1467] HEK293 cells were transfected with modified mRNA (mmRNA) VEGF-A (mRNA sequence shown, in SEQ ID NO: 16115; polyA tail of approximately 160 nucleotides not shown in sequence; 5′cap, Cap1; fully modified with 5-methylcytosine and pseudouridine) which had been complexed with Lipofectamine 2000 from Invitrogen (Carlsbad, CA) at the concentration shown in Table 133. The protein expression was detected by ELISA and the protein (pg/ml) is shown in Table 133 and FIG. 7.

TABLE 134
Protein Expression

| | Amount Transfected | | | | | | | |
|---|---|---|---|---|---|---|---|---|
| | 10 | 2.5 | 625 | 156 | 39 | 10 | 2 | 610 |
| | ng | ng | pg | pg | pg | pg | pg | fg |
| Protein | 10495 | 10038 | 2321.23 | 189.6 | 0 | 0 | 0 | 0 |
| (pg/ml) | | | | | | | | |

### Example 87. In Vitro Screening in HeLa Cells of GFP

[1468] The day before transfection, 20,000 HeLa cells (ATCC no. CCL-2; Manassas, VA) were harvested by treatment with Trypsin-EDTA solution (LifeTechnologies, Grand Island, NY) and seeded in a total volume of 100 ul EMEM medium (supplemented with 10% FCS and 1× Glutamax) per well in a 96-well cell culture plate (Corning, Manassas, VA). The cells were grown at 37° C. in 5% CO₂ atmosphere overnight, Next day, 37.5 rig or 75 ng of Green Fluorescent protein (GFP) modified RNA (mRNA sequence shown in SEQ ID NO: 16114; polyA tail of approximately 160 nucleotides not shown in sequence; 5′cap, Cap1) with the chemical modification described in Table 134, were diluted in 10 ul final volume of OPTI-MEM (LifeTechnologies, Grand Island, NY). Lipofectamine 2000 (LifeTechnologies, Grand Island, NY) was used as transfection reagent and 0.2 ul were diluted in 10 ul final volume of OPTI-MEM. After 5 minutes of incubation at room temperature, both solutions were combined and incubated an additional 15 minute at room temperature. Then the 20 ul combined solution was added to the 100 ul cell culture medium containing the 1HeLa cells and incubated at room temperature.

[1469] After an 18 to 22 hour incubation cells expressing luciferase were lysed with 100 ul of Passive Lysis Buffer (Promega, Madison, WI) according to manufacturer instructions. Aliquots of the lysates were transferred to white opaque polystyrene 96-well plates (Corning, Manassas, VA) and combined with 100 ul complete luciferase assay solution (Promega, Madison, WI). The median fluorescence intensity (MFI) was determined for each chemistry and is shown in Table 134.

[1470] These results demonstrate that GFP fully modified with N1-methyl-pseudouridine and 5-methylcytosine produces more protein in HeLa cells compared to the other chemistry. Additionally the higher dose of GFP administered to the cells resulted in the highest MFI value.

TABLE 134
Mean Fluorescence Intensity

| | 37.5 ng | 75 ng |
|---|---|---|
| Chemistry | MFI | MFI |
| No modifications | 97400 | 89500 |
| 5-methylcytosine/pseudouridine | 324000 | 715000 |
| 5-methylcytosine/N1-methyl-pseudouridine | 643000 | 1990000 |

### Example 88. Homogenization

[1471] Different luciferase mRNA solutions (as described in Table 135 where “X” refers to the solution containing that component) (mRNA sequence shown in SEQ ID NO: 16112; polyA tail of approximately 160 nucleotides not shown in sequence; 5′cap, Cap1; fully modified with 5-methylcytosine and pseudouridine) were evaluated to test the percent yield of the different solutions, the integrity of the mRNA by bioanalyzer, and the protein expression of the mRNA by in vitro transfection. The mRNA solutions were prepared in water, 1×TE buffer at 4 mg/mll as indicated in Table 135, and added to either dichloromethane (DCM) or DCM containing 200 mg/ml of poly(lactic-co-glycolic acid) (PLGA) (Lactel, Cat #B6010-2, inherent viscosity 0.55-0.75, 50:50 LA:GA) to achieve a final mRNA concentration of 0.8 mg/ml. The solutions requiring homogenization were homogenized for 30 seconds at speed 5 (approximately 19,000 rpm) (IKA Ultra-Turrax Homogenizer, T18). The mRNA samples in water, dichloromethane and poly(lactic-co-glycolic acid) (PLGA) were not recoverable (NR). All samples, except the NR samples, maintained integrity of the mRNA as determined by bioanalyzer (Bio-rad Experion).

[1472] The day before transfection, 20,000 HeLa cells (ATCC no. CCL-2; Manassas, VA) were harvested by treatment with Trypsin-EDTA solution (LifeTechnologies, Grand Island, NY) and seeded in a total volume of 100 ul EMEM medium (supplemented with 10% FCS and 1× Glutamax) per well in a 96-well cell culture plate (Corning, Manassas, VA). The cells were grown at 37° C. in a 5% CO₂ atmosphere overnight. The next day, 250 ng of luciferase mRNA from the recoverable samples was diluted in a 10 ul final volume of OPTI-MEM (LifeTechnologies, Grand Island, NY). Lipofectamine 2000 (LifeTechnologies, Grand Island, NY) was used as a transfection reagent and 0.2 ul was diluted in a 10 ul final volume of OPTI-MEM. After 5 minutes of incubation at room temperature, both solutions were combined and incubated an additional 15 minutes at room temperature. Then 20 ul of the combined solution was added to 100 ul of cell culture medium containing the HeLa cells. The plates were then incubated as described before. Controls luciferase mRNA (luciferase mRNA formulated in saline) (Control) and untreated cells (Untreat.) were also evaluated. Cells were harvested and the bioluminescence average (in photons/second) (biolum. (p/s)) for each signal is also shown in Table 135. The recoverable samples all showed activity of luciferase mRNA when analyzed.

[1473] After an 18 to 22 hour incubation, cells expressing luciferase were lysed with 10 ul Passive Lysis Buffer (Promega, Madison, WI) according to manufacturer instructions. Aliquots of the lysates were transferred to white opaque polystyrene 96-well plates (Corning, Manassas, VA) and combined with 100 ul complete luciferase assay solution (Promega, Madison, WI). The background signal of the plates without reagent was about 200 relative light units per well. The plate reader was a BioTek Synergy H1 (BioTek, Winooski, VT).

[1474] Cells were harvested and the bioluminescence average (in relative light units, RLU) (biolum. (RLU)) for each signal is also shown in Table 135. The recoverable samples all showed activity of luciferase mRNA when analyzed.

TABLE 135
Solutions

| Solution | | 1x TE | | | | Yield | Biolum. |
|---|---|---|---|---|---|---|---|
| No. | Water | Buffer | DCM | DCM/PLGA | Homogenizer | (%) | (RLU) |
| 1 | X | | | | | 96 | 5423780 |
| 2 | | X | | | X | 95 | 4911950 |
| 3 | X | | | | X | 92 | 2367230 |
| 4 | | X | | | X | 90 | 4349410 |
| 5 | X | | X | | X | 66 | 4145340 |
| 6 | | X | X | | X | 71 | 3834440 |
| 7 | X | | | X | X | NR | n/a |
| 8 | | X | | X | X | 24 | 3182080 |
| 9 | X | | | X | | NR | n/a |
| 10 | | X | | X | | 79 | 3276800 |
| 11 | X | | X | | | 79 | 5563550 |
| 12 | | X | X | | | 79 | 4919100 |
| Control | | | | | | | 2158060 |
| Untreat. | | | | | | | 3530 |

### Example 89. TE Buffer and Water Evaluation

[1475] Luciferase mRNA (mRNA sequence shown in SEQ ID NO: 16112; polyA tail of approximately 160 nucleotides not shown in sequence; 5′cap, Cap1; fully modified with 5-methylcytosine and pseudouridine) was reconstituted in water or TE buffer as outlined in Table 136 and then formulated in PLGA microspheres. PLGA microspheres were synthesized using the water/oil/water double emulsification methods known in the art using PLGA (Lactel, Cat #B6010-2, inherent viscosity 0.55-0.75, 50:50 LA:GA), polyvinylalcohol (PVA) (Sigma, Cat #348406-25G, MW 13-23 k) dichloromethane and water. Briefly, 0.2 to 0.6 ml of mRNA in water or TE buffer at a concentration of 2 to 6 mg/ml (WI) was added to 2 ml of PLGA dissolved in dichloromethane (DCM) (01) at a concentration of 100 mg/ml of PLGA. The W1/O1 emulsion was homogenized (IKA Ultra-Turrax Homogenizer, T18) for 30) seconds at speed 5 (˜19,000 rpm), The WI/01 emulsion was then added to 250 ml 1% PVA (W2) and homogenized for 1 minute at speed 5 (˜19,000 rpm).

[1476] Formulations were left to stir for 3 hours, then passed through a 100 μm nylon mesh strainer (Fisherbrand Cell Strainer, Cat #22-363-549) to remove larger aggregates, and finally washed by centrifugation (10) min, 9,250 rpm, 4° C.). The supernatant was discarded and the PLGA pellets were resuspended in 5-10 ml of water, which was repeated 2×. The washed formulations were frozen in liquid nitrogen and then lyophilized for 2-3 days. After lyophilization, ˜10) mg of PLGA MS were weighed out in 2 ml eppendorf tubes and deformulated by adding 1 ml of DCM and letting the samples shake for 2-6 hrs, mRNA was extracted from the deformulated PLGA microspheres by adding 0.5 ml of water and shaking the sample overnight. Unformulated luciferase mRNA in water or TE buffer (deformulation controls) was spiked into DCM and went through the deformulation process to be used as controls in the transfection assay.

[1477] The day before transfection, 20,000 HeLa cells (ATCC no. CCL-2; Manassas, VA) were harvested by treatment with Trypsin-EDTA solution (LifeTechnologies, Grand Island, NY) and seeded in a total volume of 100 ul EMEM medium (supplemented with 10% FCS and 1× Glutamax) per well in a 96-well cell culture plate (Corning, Manassas, VA). The cells were grown at 37° C. in a 5% C02 atmosphere overnight. The next day, 100 ng of the deformulated luciferase mRNA samples was diluted in a 10 ul final volume of OPTI-MEM (LifeTechnologies, Grand Island, NY). Lipofectamine 2000 (LifeTechnologies, Grand Island, NY) was used as a transfection reagent and 0.2 ul was diluted in a 10 ul final volume of OPTI-MEM. After 5 minutes of incubation at room temperature, both solutions were combined and incubated an additional 15 minutes at room temperature. Then 20 ul of the combined solution was added to 100 ul of cell culture medium containing the HeLa cells. The plates were then incubated as described before.

[1478] After 18 to 22 hour incubation, cells expressing luciferase were lysed with 100 ul Passive Lysis Buffer (Promega, Madison, WI) according to manufacturer instructions. Aliquots of the lysates were transferred to white opaque polystyrene 96-well plates (Corning, Manassas, VA) and combined with 100 ul complete luciferase assay solution (Promega, Madison, WI). The background signal of the plates without reagent was about 200 relative light units per well. The plate reader was a BioTek Synergy H1 (BioTek, Winooski, VT). To determine the activity of the luciferase mRNA from each formulation, the relative light units (RLU) for each formulation was divided by the RLU of the appropriate mRNA deformulation control (mRNA in water or TE buffer). Table 136 shows the activity of the luciferase mRNA. The activity of the luciferase mRNA in the PLGA microsphere formulations (Form.) was substantially improved by formulating in TE buffer versus water.

TABLE 136
Formulations

| | | W1 | | Theoretical | Actual | | Activity (% of |
|---|---|---|---|---|---|---|---|
| | mRNA | Solvent | Total | mRNA | mRNA | W1 | deformulation |
| Form. | conc. (mg/ml) | volume (ul) | mRNA (ug) | Loading (wt %) | Loading (wt %) | Solvent | control) |
| PLGA A | 4 | 400 | 1600 | 0.80 | 0.14 | Water | 12.5% |
| PLGA B | 4 | 200 | 800 | 0.40 | 0.13 | Water | 1.3% |
| PLGA C | 4 | 600 | 2400 | 1.20 | 0.13 | Water | 12.1% |
| PLGA D | 2 | 400 | 800 | 0.40 | 0.07 | Water | 1.3% |
| PLGA E | 6 | 400 | 2400 | 1.20 | 0.18 | TE Buffer | 38.9% |
| PLGA F | 4 | 400 | 1600 | 0.80 | 0.16 | TE Buffer | 39.7% |
| PLGA G | 4 | 400 | 1600 | 0.80 | 0.10 | TE Buffer | 26.6% |

### Example 90. Chemical Modifications on mRNA

[1479] The day before transfection, 20,000 HeLa cells (ATCC no. CCL-2; Manassas, VA) were harvested by treatment with Trypsin-EDTA solution (Life Technologies, Grand Island, NY) and seeded in a total volume of 100 ul EMEM medium (supplemented with I0% FCS and 1× Glutamax) per well in a 96-well cell culture plate (Corning, Manassas, VA). The cells were grown at 37° C. in 5% CO₂ atmosphere overnight. The next day, 83 ng of Luciferase modified RNA (mRNA sequence shown SEQ ID NO: 16112; polyA tail of approximately 140 nucleotides not shown in sequence; 5′cap, Cap1) with the chemical modification described in Table 137, were diluted in 10 ul final volume of OPTI-MEM (LifeTechnologies, Grand Island, NY). Lipofectamine 2000 (LifeTechnologies, Grand Island, NY) was used as transfection reagent and 0.2 ul were diluted in 10 ul final volume of OPTI-MEM. After 5 minutes of incubation at room temperature, both solutions were combined and incubated an additional 15 minute at room temperature. Then the 20 ul combined solution was added to the 100 ul cell culture medium containing the HeLa cells and incubated at room temperature.

[1480] After 18 to 22 hours of incubation cells expressing luciferase were lysed with 100 ul of Passive Lysis Buffer (Promega, Madison, WI) according to manufacturer instructions. Aliquots of the lysates were transferred to white opaque polystyrene 96-well plates (Corning, Manassas, VA) and combined with 100 ul complete luciferase assay solution (Promega, Madison, WI). The lysate volumes were adjusted or diluted until no more than 2 mio relative light units (RLU) per well were detected for the strongest signal producing samples and the RLUs for each chemistry tested are shown in Table 137. The plate reader was a BioTek Synergy 1-1 (BioTek, Winooski, VT). The background signal of the plates without reagent was about 200 relative light units per well.

TABLE 137
Chemical Modifications

| Sample | RLU |
|---|---|
| Untreated | 336 |
| Unmodified Luciferase | 33980 |
| 5-methylcytosine and pseudouridine | 1601234 |
| 5-methylcytosine and N1-methyl-pseudouridine | 421189 |
| 25% cytosines replaced with 5-methylcytosine | 222114 |
| and 25% of uridines replaced with 2-thiouridine | |
| N1-methyl-pseudouridine | 3068261 |
| Pseudouridine | 140234 |
| N4-Acetylcytidine | 1073251 |
| 5-methoxyuridine | 219657 |
| 5-Bromouridine | 6787 |
| N4-Acetylcytidineand N1-methyl-pseudouridine | 976219 |
| 5-methylcytosine and 5-methoxyuridine | 66621 |
| 5-methylcytosine and 2′fluorouridine | 11333 |

### Example 91. Intramuscular and Subcutaneous Administration of Modified mRNA

[1481] Luciferase modified mRNA (mRNA sequence shown in SEQ ID NO: 16112; polyA tail of approximately 140 nucleotides not shown in sequence; 5′cap, Cap1) fully modified with 5-methylcytosine and pseudouridine (5 mC/pU), fully modified with 5-methylcytosine and N1-methyl-pseudouridine (5 mC/N1mpU), fully modified with pseudouridine (pU), fully modified with N1-methyl-pseudouridine (N1mpU) or modified where 25% of the cytosines replaced with 5-methylcytosine and 25% of the uridines replaced with 2-thiouridine (5 mC/s2U) formulated in PBS (pH 7.4) was administered to Balb-C mice intramuscularly or subcutaneously at a dose of 2.5 mg/kg. The mice were imaged at 2 hours, 8 hours, 24 hours, 48 hours, 72 hours, 96 hours, 120 hours and 144 hours for intramuscular delivery and 2 hours, 8 hours, 24 hours, 48 hours, 72 hours, 96 hours and 120 hours for subcutaneous delivery. Twenty minutes prior to imaging, mice were injected intraperitoneally with a D-luciferin solution at 150 mg/kg. Animals were then anesthetized and images were acquired with an IVIS Lumina 11 imaging system (Perkin Elmer). Bioluminescence was measured as total flux (photons/second) of the entire mouse. The average total flux (photons/second) for intramuscular administration is shown in Table 138 and the average total flux (photons/second) for subcutaneous administration is shown in Table 139. The background signal was 3.79E+05 (p/s). The peak expression for intramuscular administration was seen between 24 and 48 hours for all chemistry and expression was still detected at 144 hours. For subcutaneous delivery the peak expression was seen at 2-8 hours and expression was detected at 72 hours.

TABLE 138
Intramuscular Administration

| | 5mC/ | 5mC/ | 5mC/ | | |
|---|---|---|---|---|---|
| | pU | N1mpU | s2U | pU | N1mpU |
| | Flux | Flux | Flux | Flux | Flux |
| | (p/s) | (p/s) | (p/s) | (p/s) | (p/s) |
| 2 hours | 1.98E+07 | 4.65E+06 | 4.68E+06 | 2.33E+06 | 3.66E+07 |
| 8 hours | 1.42E+07 | 3.64E+06 | 3.78E+06 | 8.07E+06 | 7.21E+07 |
| 24 hours | 2.92E+07 | 1.22E+07 | 3.35E+07 | 1.01E+07 | 1.75E+08 |
| 48 hours | 2.64E+07 | 1.01E+07 | 5.06E+07 | 7.46E+06 | 3.42E+08 |
| 72 hours | 2.18E+07 | 8.59E+06 | 3.42E+07 | 4.08E+06 | 5.83E+07 |
| 96 hours | 2.75E+07 | 2.70E+06 | 2.38E+07 | 4.35E+06 | 7.15E+07 |
| 120 hours | 2.19E+07 | 1.60E+06 | 1.54E+07 | 1.25E+06 | 3.87E+07 |
| 144 hours | 9.17E+06 | 2.19E+06 | 1.14E+07 | 1.86E+06 | 5.04E+07 |

TABLE 139
Subcutaneous Administration

| | 5mC/ | 5mC/ | 5mC/ | | |
|---|---|---|---|---|---|
| | pU | N1mpU | s2U | pU | N1mpU |
| | Flux | Flux | Flux | Flux | Flux |
| | (p/s) | (p/s) | (p/s) | (p/s) | (p/s) |
| 2 hours | 5.26E+06 | 4.54E+06 | 9.34E+06 | 2.43E+06 | 2.80E+07 |
| 8 hours | 2.32E+06 | 8.75E+05 | 8.15E+06 | 2.12E+06 | 3.09E+07 |
| 24 hours | 2.67E+06 | 5.49E+06 | 3.80E+06 | 2.24E+06 | 1.48E+07 |
| 48 hours | 1.22E+06 | 1.77E+06 | 3.07E+06 | 1.58E+06 | 1.24E+07 |
| 72 hours | 1.12E+06 | 8.00E+05 | 8.53E+05 | 4.80E+05 | 2.29E+06 |
| 96 hours | 5.16E+05 | 5.33E+05 | 4.30E+05 | 4.30E+05 | 6.62E+05 |
| 120 hours | 3.80E+05 | 4.09E+05 | 3.21E+05 | 6.82E+05 | 5.05E+05 |

### Example 92. Osmotic Pump Study

[1482] Prior to implantation, an osmotic pump (ALZET● Osmotic Pump 2001D, DURECT Corp. Cupertino, CA) is loaded with the 0.2 ml of 1×PBS (pH 7.4) (PBS loaded pump) or 0.2 ml of luciferase modified mRNA (mRNA sequence shown in SEQ ID NO: 16112; polyA tail of approximately 140 nucleotides not shown in sequence; 5′cap, Cap1; fully modified with 5-methylcytosine and N1-methyl-pseudouridine) at 1 mg/ml in 1×PBS (pH 7.4) (Luciferase loaded pump) and incubated overnight in 1×PBS (pH 7.4) at 37° C.

[1483] Balb-C mice (n=3) are implanted subcutaneously with either the PBS loaded pump or the luciferase loaded pump and imaged at 2 hours, 8 hours and 24 hours. As a control a PBS loaded pump is implanted subcutaneously and the mice are injected subcutaneously with luciferase modified mRNA in 1×PBS (PBS loaded pump; SC Luciferase) or an osmotic pump is not implanted and the mice are injected subcutaneously with luciferase modified mRNA in 1×PBS (SC Luciferase). The luciferase formulations are outlined in Table 140.

TABLE 140
Luciferase Formulations

| | | Conc | Inj. Vol. | Amt | Dose |
|---|---|---|---|---|---|
| Group | Vehicle | (mg/ml) | (ul) | (ug) | (mg/kg) |
| PBS loaded pump; | PBS | 1.00 | 50 | 50 | 2.5 |
| SC Luciferase | | | | | |
| Luciferase loaded | PBS | 1.00 | — | 200 | 10.0 |
| pump | | | | | |
| PBS loaded pump | PBS | — | — | — | — |
| SC Luciferase | PBS | 1.00 | 50 | 50 | 2.5 |

### Example 93. External Osmotic Pump Study

[1484] An external osmotic pump (ALZET● Osmotic Pump 2001D, DURECT Corp. Cupertino, CA) is loaded with the 0.2 ml of 1×PBS (pH 7.4) (PBS loaded pump) or 0.2 ml of luciferase modified mRNA (mRNA sequence shown in SEQ ID NO: 16112; polyA tail of approximately 140 nucleotides not shown in sequence; 5′cap, Cap1; fully modified with 5-methylcytosine and N1-methyl-pseudouridine) at 1 mg/m in 1×PBS (pH 7.4) (luciferase loaded pump) and incubated overnight in 1×PBS (pH 7.4) at 37° C.

[1485] Using a catheter connected to the external PBS loaded pump or the luciferase loaded pump Balb-C mice (n=3) are administered the formulation. The mice are imaged at 2 hours, 8 hours and 24 hours. As a control an external PBS loaded pump is used and the mice are injected subcutaneously with luciferase modified mRNA in 1×PBS (PBS loaded pump; SC Luciferase) or the external pump is not used and the mice are only injected subcutaneously with luciferase modified mRNA in 1×PBS (SC Luciferase). Twenty minutes prior to imaging, mice are injected intraperitoneally with a D-luciferin solution at 150 mg/kg. Animals are then anesthetized and images are acquired with an IVIS Lumina II imaging system (Perkin Elmer). Bioluminescence is measured as total flux (photons/second) of the entire mouse. The luciferase formulations are outlined in Table 141 and the average total flux (photons/second).

TABLE 141
Luciferase Formulations

| | | Conc | Inj. Vol. | Amt | Dose |
|---|---|---|---|---|---|
| Group | Vehicle | (mg/ml) | (ul) | (ug) | (mg/kg) |
| PBS loaded pump; | PBS | 1.00 | 50 | 50 | 2.5 |
| SC Luciferase | | | | | |
| Luciferase loaded | PBS | 1.00 | — | 200 | 10.0 |
| pump | | | | | |
| PBS loaded pump | PBS | — | — | — | — |
| SC Luciferase | PBS | 1.00 | 50 | 50 | 2.5 |

### Example 94. Fibrin Sealant Study

[1486] Fibrin sealant, such as Tisseel (Baxter Healthcare Corp., Deerfield, IL), is composed of fibrinogen and thrombin in a dual-barreled syringe. Upon mixing, fibrinogen is converted to fibrin to form a fibrin clot in about 10 to 30 seconds. This clot can mimic the natural clotting mechanism of the body. Additionally a fibrin hydrogel is a three dimensional structure that can potentially be used in sustained release delivery. Currently, fibrin sealant is approved for application in hemostasis and sealing to replace conventional surgical techniques such as suture, ligature and cautery.

[1487] The thrombin and fibrinogen components were loaded separately into a dual barreled syringe. Balb-C mice (n=3) were injected subcutaneously with 50 ul of fibrinogen, 50 ul of thrombin and they were also injected at the same site with modified luciferase mRNA (mRNA sequence shown in SEQ ID NO: 16112; polyA tail of approximately 140 nucleotides not shown in sequence; 5′cap, Cap1; fully modified with 5-methylcytosine and N1-methyl-pseudouridine) (Tisseel+Luciferase), 50 ul of fibrinogen and 50 ul thrombin (Tisseel) or modified luciferase mRNA (Luciferase). The injection of fibrinogen and thrombin was done simultaneously using the dual-barreled syringe. The SC injection of luciferase was done 15 minutes after the fibrinogen/thrombin injection to allow the fibrin hydrogel to polymerize (Tisseel+Luciferase group). A control group of untreated mice were also evaluated. The mice were imaged at 5 hours and 24 hours. Twenty minutes prior to imaging, mice were injected intraperitoneally with a D-luciferin solution at 150 mg/kg. Animals were then anesthetized and images were acquired with an IVIS Lumina II imaging system (Perkin Elmer). Bioluminescence was measured as total flux (photons/second) of the entire mouse. The luciferase formulations are outlined in Table 142 and the average total flux (photons/second) is shown in Table 143. The fibrin sealant was found to not interfere with imaging and the injection of luciferase and Tisseel showed expression of luciferase.

TABLE 142
Luciferase Formulations

| | | Conc | Inj. Vol. | Amt | Dose |
|---|---|---|---|---|---|
| Group | Vehicle | (mg/ml) | (ul) | (ug) | (mg/kg) |
| Tisseel + | PBS | 1.00 | 50 | 50 | 2.5 |
| Luciferase | | | | | |
| Tisseel | — | — | — | — | — |
| Luciferase | PBS | 1.00 | 50 | 50 | 2.5 |
| Untreated | — | — | — | — | — |

TABLE 143
Total Flux

| | 5 Hours | 24 Hours |
|---|---|---|
| Group | Flux (p/s) | Flux (p/s) |
| Tisseel + Luciferase | 4.59E+05 | 3.39E+05 |
| Tisseel | 1.99E+06 | 1.06E+06 |
| Luciferase | 9.94E+05 | 7.44E+05 |
| Untreated | 3.90E+05 | 3.79E+05 |

### Example 95. Fibrin Containing mRNA Sealant Study

A. Modified mRNA and Calcium Chloride

[1488] Prior to reconstitution, luciferase mRNA (mRNA sequence shown in SEQ ID NO: 16112; polyA tail of approximately 140 nucleotides not shown in sequence; 5′cap, Cap 1) fully modified with 5-methylcytosine and N1-methyl-pseudouridine or fully modified with N1-methyl-pseudouridine is added to calcium chloride. The calcium chloride is then used to reconstitute thrombin. Fibrinogen is reconstituted with fibrinolysis inhibitor solution per the manufacturer's instructions. The reconstituted thrombin containing modified mRNA and fibrinogen is loaded into a dual barreled syringe. Mice are injected subcutaneously with 50 ul of fibrinogen and 50 ul of thrombin containing modified mRNA or they were injected with 50 ul of PBS containing an equivalent dose of modified luciferase mRNA. A control group of untreated mice is also evaluated. The mice are imaged at predetermined intervals to determine the average total flux (photons/second).

B. Lipid Nanoparticle Formulated Modified mRNA and Calcium Chloride

[1489] Prior to reconstitution, luciferase mRNA (mRNA sequence shown in SEQ ID NO: 16112; polyA tail of approximately 140 nucleotides not shown in sequence; 5′cap, Cap1) fully modified with 5-methylcytosine and N1-methyl-pseudouridine or fully modified with N1-methyl-pseudouridine is formulated in a lipid nanoparticle is added to calcium chloride. The calcium chloride is then used to reconstitute thrombin. Fibrinogen is reconstituted with fibrinolysis inhibitor solution per the manufacturer's instructions. The reconstituted thrombin containing modified mRNA and fibrinogen is loaded into a dual barreled syringe. Mice are injected subcutaneously with 50 ul of fibrinogen and 50 ul of thrombin containing modified mRNA or they were injected with 50 ul of PBS containing an equivalent dose of modified luciferase mRNA. A control group of untreated mice is also evaluated. The mice are imaged at predetermined intervals to determine the average total flux (photons/second).

C. Modified mRNA and Fibrinogen

[1490] Prior to reconstitution, luciferase mRNA (mRNA sequence shown in SEQ ID NO: 16112; polyA tail of approximately 140 nucleotides not shown in sequence; 5′cap, Cap1) fully modified with 5-methylcytosine and N1-methyl-pseudouridine or fully modified with N1-methyl-pseudouridine is added to the fibrinolysis inhibitor solution. The fibrinolysis inhibitor solution is then used to reconstitute fibrinogen. Thrombin is reconstituted with the calcium chloride solution per the manufacturer's instructions. The reconstituted fibrinogen containing modified mRNA and thrombin is loaded into a dual barreled syringe. Mice are injected subcutaneously with 50 ul of thrombin and 50 ul of fibrinogen containing modified mRNA or they were injected with 50 ul of PBS containing an equivalent dose of modified luciferase mRNA. A control group of untreated mice is also evaluated. The mice are imaged at predetermined intervals to determine the average total flux (photons/second).

D. Lipid Nanoparticle Formulated Modified mRNA and Fibrinogen

[1491] Prior to reconstitution, luciferase mRNA (mRNA sequence shown in SEQ ID NO: 16112; polyA tail of approximately 140 nucleotides not shown in sequence; 5′cap, Cap1) fully modified with 5-methylcytosine and N1-methyl-pseudouridine or fully modified with N1-methyl-pseudouridine is formulated in a lipid nanoparticle is added to the fibrinolysis inhibitor solution. The fibrinolysis inhibitor solution is then used to reconstitute fibrinogen. Thrombin is reconstituted with the calcium chloride solution per the manufacturer's instructions. The reconstituted fibrinogen containing modified mRNA and thrombin is loaded into a dual barreled syringe. Mice are injected subcutaneously with 50 ul of thrombin and 50 ul of fibrinogen containing modified mRNA or they were injected with 50 ul of PBS containing an equivalent dose of modified luciferase mRNA. A control group of untreated mice is also evaluated. The mice are imaged at predetermined intervals to determine the average total flux (photons/second).

F. Modified mRNA and Thrombin

[1492] Prior to reconstitution, luciferase mRNA (mRNA sequence shown in SEQ ID NO: 16112; polyA tail of approximately 140 nucleotides not shown in sequence; 5′cap, Cap 1) fully modified with 5-methylcytosine and N1-methyl-pseudouridine or fully modified with N1-methyl-pseudouridine is added to the reconstituted thrombin after it is reconstituted with the calcium chloride per the manufacture's instructions. The fibrinolysis inhibitor solution is then used to reconstitute fibrinogen per the manufacturer's instructions. The reconstituted fibrinogen and thrombin containing modified mRNA is loaded into a dual barreled syringe. Mice are injected subcutaneously with 50 ul of thrombin containing modified mRNA and 50 ul of fibrinogen or they were injected with 50 ul of PBS containing an equivalent dose of modified luciferase mRNA. A control group of untreated mice is also evaluated. The mice are imaged at predetermined intervals to determine the average total flux (photons/second).

F. Lipid Nanoparticle Formulated Modified mRNA and Thrombin

[1493] Prior to reconstitution, luciferase mRNA (mRNA sequence shown in SEQ ID NO: 16112; polyA tail of approximately 140 nucleotides not shown in sequence; 5′cap, Cap1) fully modified with 5-methylcytosine and N1-methyl-pseudouridine or fully modified with N1-methyl-pseudouridine is formulated in a lipid nanoparticle is added to the reconstituted thrombin after it is reconstituted with the calcium chloride per the manufacture's instructions. The fibrinolysis inhibitor solution is then used to reconstitute fibrinogen per the manufacturer's instructions. The reconstituted fibrinogen and thrombin containing modified mRNA is loaded into a dual barreled syringe. Mice are injected subcutaneously with 50 ul of thrombin containing modified mRNA and 50 ul of fibrinogen or they were injected with 50 ul of PBS containing an equivalent dose of modified luciferase mRNA. A control group of untreated mice is also evaluated. The mice are imaged at predetermined intervals to determine the average total flux (photons/second).

### Example 96. Cationic Lipid Formulation of 5-Methylcytosine and N1-Methyl-pseudouridine Modified mRNA

[1494] Luciferase mRNA (mRNA sequence shown in SEQ ID NO: 161 12; polyA tail of approximately 140 nucleotides not shown in sequence; 5′cap, Cap1) fully modified with 5-methylcytosine and N1-methyl-pseudouridine was formulated in the cationic lipids described in Table 144. The formulations were administered intravenously (I.V.), intramuscularly (I.M.) or subcutaneously (S.C.) to Balb-C mice at a dose of 0.05 mg/kg.

TABLE 144
Cationic Lipid Formulations

| Formulation | NPA-126-1 | | NPA-127-1 | | NPA-128-1 | | NPA-129-1 | | 111612-B | |
|---|---|---|---|---|---|---|---|---|---|---|
| Lipid | DLin-MC3- | | DLin-KC2- | | C12-200 | | DLinDMA | | DODMA | |
| | DMA | | DMA | | | | | | | |
| Lipid/mRNA | 20:1 | | 20:1 | | 20:1 | | 20:1 | | 20:1 | |
| ratio (wt/wt) | | | | | | | | | | |
| Mean Size | 122 | nm | 114 | nm | 153 | nm | 137 | nm | 223.2 | nm |
| | PDI: 0.13 | | PDI: 0.10 | | PDI: 0.17 | | PDI: 0.09 | | PDI: 0.142 | |
| Zeta at pH 7.4 | −1.4 | mV | −0.5 | mV | −1.4 | mV | 2.0 | mV | −3.09 | mV |

| | | | | | |
|---|---|---|---|---|---|
| Encaps. | 95% | 77% | 69% | 80% | 64% |
| (RiboGr) | | | | | |

[1495] Twenty minutes prior to imaging, mice were injected intraperitoneally with a D-luciferin solution at 150 mg/kg. Animals were then anesthetized and images were acquired with an IVIS Lumina II imaging system (Perkin Elmer). Bioluminescence was measured as total flux (photons/second) of the entire mouse. The mice were imaged at 2 hours, 8 hours and 24 hours after dosing and the average total flux (photons/second) was measured for each route of administration and cationic lipid formulation. The background flux was about 4.17E+05 p/s. The results of the imaging are shown in Table 145. In Table 145, “NT” means not tested.

TABLE 145
Flux

| | | | DLin- | DLin- | | | |
|---|---|---|---|---|---|---|---|
| | | | MC3-DMA | KC2-DMA | C12-200 | DLinDMA | DODMA |
| Route | Time Point | | Flux (p/s) | Flux (p/s) | Flux (p/s) | Flux (p/s) | Flux (p/s) |
| I.V. | 2 | hrs | 1.92E+08 | 2.91E+08 | 1.08E+08 | 2.53E+07 | 8.40E+06 |
| I.V. | 8 | hrs | 1.47E+08 | 2.13E+08 | 3.72E+07 | 3.82E+07 | 5.62E+06 |
| I.V. | 24 | hrs | 1.32E+07 | 2.41E+07 | 5.35E+06 | 4.20E+06 | 8.97E+05 |
| I.M. | 2 | hrs | 8.29E+06 | 2.37E+07 | 1.80E+07 | 1.51E+06 | NT |
| I.M. | 8 | hrs | 5.83E+07 | 2.12E+08 | 2.60E+07 | 1.99E+07 | NT |
| I.M. | 24 | hrs | 4.30E+06 | 2.64E+07 | 3.01E+06 | 9.46E+05 | NT |
| S.C. | 2 | hrs | 1.90E+07 | 5.16E+07 | 8.91E+07 | 4.66E+06 | 9.61E+06 |
| S.C. | 8 | hrs | 7.74E+07 | 2.00E+08 | 4.58E+07 | 9.67E+07 | 1.90E+07 |
| S.C. | 24 | hrs | 7.49E+07 | 2.47E+07 | 6.96E+06 | 6.50E+06 | 1.28E+06 |

### Example 97. Lipid Nanoparticle Intravenous Study

[1496] Luciferase mRNA (mRNA sequence shown in SEQ ID NO: 16112; polyA tail of approximately 160 nucleotides not shown in sequence; 5′cap, Cap1; fully modified with 5-methylcytosine and pseudouridine) was formulated in a lipid nanoparticle containing 50% DLin-MC3-DMA OR DLin-KC2-DMA as described in Table 146, 38.5% cholesterol, 10% DSPC and 1.5% PEG. The formulation was administered intravenously (I.V.) to Balb-C mice at a dose of 0.5 mg/kg, 0.05 mg/kg, 0.005 mg/kg or 0.0005 mg/kg. Twenty minutes prior to imaging, mice were injected intraperitoneally with a D-luciferin solution at 150 mg/kg. Animals were then anesthetized and images were acquired with an IVIS Lumina II imaging system (Perkin Elmer). Bioluminescence was measured as total flux (photons/second) of the entire mouse.

TABLE 146
Formulations

| Formulation | NPA-098-1 | | NPA-100-1 | |
|---|---|---|---|---|
| Lipid | DLin-KC2-DMA | | DLin-MC3-DMA | |
| Lipid/mRNA | 20:1 | | 20:1 | |
| ratio (wt/wt) | | | | |
| Mean Size | 135 | nm | 152 | nm |
| | PDI: 0.08 | | PDI: 0.08 | |
| Zeta at pH 7.4 | −0.6 | mV | −1.2 | mV |

| | | |
|---|---|---|
| Encaps. (RiboGr) | 91% | 94% |

[1497] For DLin-IKC2-DMA the mice were imaged at 2 hours, 8 hours, 24 hours, 72 hours, 96 hours and 168 hours after dosing and the average total flux (photons/second) was measured for each route of administration and cationic lipid formulation. The background flux was about 3.66E+05 p/s. The results of the imaging are shown in Table 147. Organs were imaged at 8 hours and the average total flux (photons/second) was measured for the liver, spleen, lung and kidney. A control for each organ was also analyzed. The results are shown in Table 149. The peak signal for all dose levels was at 8 hours after administration. Also, distribution to the various organs (liver, spleen, lung, and kidney) may be able to be controlled by increasing or decreasing the LNP dose.

TABLE 147
Flux

| | | 0.5 mg/kg | 0.05 mg/kg | 0.005 mg/kg | 0.0005 mg/kg |
|---|---|---|---|---|---|
| Time Point | | Flux (p/s) | Flux (p/s) | Flux (p/s) | Flux (p/s) |
| 2 | hrs | 3.54E+08 | 1.75E+07 | 2.30E+06 | 4.09E+05 |
| 8 | hrs | 1.67E+09 | 1.71E+08 | 9.81E+06 | 7.84E+05 |
| 24 | hrs | 2.05E+08 | 2.67E+07 | 2.49E+06 | 5.51E+05 |
| 72 | hrs | 8.17E+07 | 1.43E+07 | 1.01E+06 | 3.75E+05 |
| 96 | hrs | 4.10E+07 | 9.15E+06 | 9.58E+05 | 4.29E+05 |
| 168 | hrs | 3.42E+07 | 9.15E+06 | 1.47E+06 | 5.29E+05 |

TABLE 148
Organ Flux

| | | Liver | Spleen | Lung | Kidney |
|---|---|---|---|---|---|
| | | Flux (p/s) | Flux (p/s) | Flux (p/s) | Flux (p/s) |
| 0.5 | mg/kg | 1.42E+08 | 4.86E+07 | 1.90E+05 | 3.20E+05 |
| 0.05 | mg/kg | 7.45E+06 | 4.62E+05 | 6.86E+04 | 9.11E+04 |
| 0.005 | mg/kg | 3.32E+05 | 2.97E+04 | 1.42E+04 | 1.15E+04 |
| 0.0005 | mg/kg | 2.34E+04 | 1.08E+04 | 1.87E+04 | 9.78E+03 |

| | | | | |
|---|---|---|---|---|
| Untreated | 1.88E+04 | 1.02E+04 | 1.41E+04 | 9.20E+03 |

[1498] For DLin-MC3-DMA the mice were imaged at 2 hours, 8 hours, 24 hours, 48 hours, 72 hours and 144 hours after dosing and the average total flux (photons/second) was measured for each route of administration and cationic lipid formulation. The background flux was about 4.51E05 p/s. The results of the imaging are shown in Table 149. Organs were imaged at 8 hours and the average total flux (photons/second) was measured for the liver, spleen, lung and kidney. A control for each organ was also analyzed. The results are shown in Table 150. The peak signal for all dose levels was at 8 hours after administration. Also, distribution to the various organs (liver, spleen, lung, and kidney) may be able to be controlled by increasing or decreasing the LNP dose.

TABLE 149
Flux

| | | 0.5 mg/kg | 0.05 mg/kg | 0.005 mg/kg | 0.0005 mg/kg |
|---|---|---|---|---|---|
| Time Point | | Flux (p/s) | Flux (p/s) | Flux (p/s) | Flux (p/s) |
| 2 | hrs | 1.23E+08 | 7.76E+06 | 7.66E+05 | 4.88E+05 |
| 8 | hrs | 1.05E+09 | 6.79E+07 | 2.75E+06 | 5.61E+05 |
| 24 | hrs | 4.44E+07 | 1.00E+07 | 1.06E+06 | 5.71E+05 |
| 48 | hrs | 2.12E+07 | 4.27E+06 | 7.42E+05 | 4.84E+05 |
| 72 | hrs | 1.34E+07 | 5.84E+06 | 6.90E+05 | 4.38E+05 |
| 144 | hrs | 4.26E+06 | 2.25E+06 | 4.58E+05 | 3.99E+05 |

TABLE 150
Organ Flux

| | | Liver | Spleen | Lung | Kidney |
|---|---|---|---|---|---|
| | | Flux (p/s) | Flux (p/s) | Flux (p/s) | Flux (p/s) |
| 0.5 | mg/kg | 1.19E+08 | 9.66E+07 | 1.19E+06 | 1.85E+05 |
| 0.05 | mg/kg | 1.10E+07 | 1.79E+06 | 7.23E+04 | 5.82E+04 |
| 0.005 | mg/kg | 3.58E+05 | 6.04E+04 | 1.33E+04 | 1.33E+04 |
| 0.0005 | mg/kg | 2.25E+04 | 1.88E+04 | 2.05E+04 | 1.65E+04 |

| | | | | |
|---|---|---|---|---|
| Untreated | 1.91E+04 | 1.66E+04 | 2.63E+04 | 2.14E+04 |

### Example 98. Lipid Nanoparticle Subcutaneous Study

[1499] Luciferase mRNA (mRNA sequence shown in SEQ ID NO: 16112; polyA tail of approximately 160 nucleotides not shown in sequence; 5′cap, Cap1; fully modified with 5-methylcytosine and pseudouridine) was formulated in a lipid nanoparticle containing 50% DLin-KC2-DMA as described in Table 151, 385% cholesterol, 10% DSPC and 1.5% PEG. The formulation was administered subcutaneously (S.C.) to Balb-C mice at a dose of 0.5 mg/kg, 0.05 mg/kg or 0.005 mg/kg.

TABLE 151
DLin-KC2-DMA Formulation

| Formulation | NPA-098-1 | |
|---|---|---|
| Lipid | DLin-KC2-DMA | |
| Lipid/mRNA ratio (wt/wt) | 20:1 | |
| Mean Size | 135 | nm |
| | PDI: 0.08 | |
| Zeta at pH 7.4 | −0.6 | mV |

| | |
|---|---|
| Encaps. (RiboGr) | 91% |

[1500] Twenty minutes prior to imaging, mice were injected intraperitoneally with a D-luciferin solution at 150 mg/kg. Animals were then anesthetized and images were acquired with an IVIS Lumina 11 imaging system (Perkin Elmer). Bioluminescence was measured as total flux (photons/second) of the entire mouse. The mice were imaged at 2 hours, 8 hours, 24 hours, 48 hours, 72 hours and 144 hours after dosing and the average total flux (photons/second) was measured for each route of administration and cationic lipid formulation. The lower limit of detection was about 3E+05 p/s. The results of the imaging are shown in Table 152. Organs were imaged at 8 hours and the average total flux (photons/second) was measured for the liver, spleen, lung and kidney. A control for each organ was also analyzed. The results are shown in Table 153. The peak signal for all dose levels was at 8 hours after administration. Also, distribution to the various organs (liver, spleen, lung, and kidney) may be able to be controlled by increasing or decreasing the LNP dose. At high doses, the LNP formulations migrates outside of the subcutaneous injection site, as high levels of luciferase expression are detected in the liver, spleen, lung, and kidney.

TABLE 152
Flux

| | 0.5 mg/kg | 0.05 mg/kg | 0.005 mg/kg |
|---|---|---|---|
| Time Point | Flux (p/s) | Flux (p/s) | Flux (p/s) |

| | | | | |
|---|---|---|---|---|
| 2 | hrs | 3.18E+07 | 7.46E+06 | 8.94E+05 |
| 8 | hrs | 5.15E+08 | 2.18E+08 | 1.34E+07 |
| 24 | hrs | 1.56E+08 | 5.30E+07 | 7.16E+06 |
| 48 | hrs | 5.22E+07 | 8.75E+06 | 9.06E+05 |
| 72 | hrs | 8.87E+06 | 1.50E+06 | 2.98E+05 |
| 144 | hrs | 4.55E+05 | 3.51E+05 | 2.87E+05 |

TABLE 153
Organ Flux

| | | Liver | Spleen | Lung | Kidney |
|---|---|---|---|---|---|
| | | Flux (p/s) | Flux (p/s) | Flux (p/s) | Flux (p/s) |
| 0.5 | mg/kg | 1.01E+07 | 7.43E+05 | 9.75E+04 | 1.75E+05 |
| 0.05 | mg/kg | 1.61E+05 | 3.94E+04 | 4.04E+04 | 3.29E+04 |
| 0.005 | mg/kg | 2.84E+04 | 2.94E+04 | 2.42E+04 | 9.79E+04 |

| | | | | |
|---|---|---|---|---|
| Untreated | 1.88E+04 | 1.02E+04 | 1.41E+04 | 9.20E+03 |

### Example 99. Cationic Lipid Nanoparticle Subcutaneous Study

[1501] Luciferase mRNA (mRNA sequence shown in SEQ ID NO: 16112; polyA tail of approximately 160 nucleotides not shown in sequence; 5′cap, Cap1; fully modified with 5-methylcytosine and pseudouridine) is formulated in a lipid nanoparticle containing 50% DLin-MC3-DMA, 38.5% cholesterol, 10% DSPC and 1.5% PEG. The formulation is administered subcutaneously (S.C.) to Balb-C mice at a dose of 0.5 mg/kg, 0.05 mg/kg or 0.005 mg/kg.

[1502] The mice are imaged at 2 hours, 8 hours, 24 hours, 48 hours, 72 hours and 144 hours after dosing and the average total flux (photons/second) was measured for each route of administration and cationic lipid formulation. Organs are imaged at 8 hours and the average total flux (photons/second) is measured for the liver, spleen, lung and kidney. A control for each organ is also analyzed.

### Example 100. Luciferase Lipoplex Study

[1503] Lipoplexed luciferase mRNA (mRNA sequence shown in SEQ ID NO: 2 polyA tail of approximately 140 nucleotides not shown in sequence; 5′cap, Cap1) fully modified with 5-methylcytosine and pseudouridine (5 mC/pU), fully modified with 5-methylcytosine and N1-methyl-pseudouridine (5 mC/N1mpU) or modified where 25% of the cytosines replaced with 5-methylcytosine and 25% of the uridines replaced with 2-thiouridine (5 mC/s2U). The formulation was administered intravenously (I.V.), intramuscularly (I.M.) or subcutaneously (S.C.) to Balb-C mice at a dose of 0.10 mg/kg.

[1504] Twenty minutes prior to imaging, mice were injected intraperitoneally with a D-luciferin solution at 150 mg/kg. Animals were then anesthetized and images were acquired with an IVIS Lumina II imaging system (Perkin Elmer). Bioluminescence was measured as total flux (photons/second) of the entire mouse. The mice were imaged at 8 hours, 24 hours and 48 hours after dosing and the average total flux (photons/second) was measured for each route of administration and chemical modification. The background signal was about 3.91E+05 p/s. The results of the imaging are shown in Table 154. Organs were imaged at 6 hours and the average total flux (photons/second) was measured for the liver, spleen, lung and kidney. A control for each organ was also analyzed. The results are shown in Table 155.

TABLE 154
Flux

| | | | 5mC/pU | 5mC/N1mpU | 5mC/s2U |
|---|---|---|---|---|---|
| Route | Time Point | | Flux (p/s) | Flux (p/s) | Flux (p/s) |
| I.V. | 8 | hrs | 5.76E+06 | 1.78E+06 | 1.88E+06 |
| I.V. | 24 | hrs | 1.02E+06 | 7.13E+05 | 5.28E+05 |
| I.V. | 48 | hrs | 4.53E+05 | 3.76E+05 | 4.14E+05 |
| I.M. | 8 | hrs | 1.90E+06 | 2.53E+06 | 1.29E+06 |
| I.M. | 24 | hrs | 9.33E+05 | 7.84E+05 | 6.48E+05 |
| I.M. | 48 | hrs | 8.51E+05 | 6.59E+05 | 5.49E+05 |
| S.C. | 8 | hrs | 2.85E+06 | 6.48E+06 | 1.14E+06 |
| S.C. | 24 | hrs | 6.66E+05 | 7.15E+06 | 3.93E+05 |
| S.C. | 48 | hrs | 3.24E+05 | 3.20E+06 | 5.45E+05 |

TABLE 155
Organ Flux

| | | Liver | Spleen | Lung | Kidney | Inj. Site |
|---|---|---|---|---|---|---|
| Route | Chemistry | Flux (p/s) | Flux (p/s) | Flux (p/s) | Flux (p/s) | Flux (p/s) |
| I.V. | 5mC/pU | 5.26E+05 | 2.04E+07 | 4.28E+06 | 1.77E+04 | n/a |
| I.V. | 5mC/N1mpU | 1.48E+05 | 5.00E+06 | 1.93E+06 | 1.77E+04 | n/a |
| I.V. | 5mC/s2U | 2.14E+04 | 3.29E+06 | 5.48E+05 | 2.16E+04 | n/a |
| I.M. | 5mC/pU | 2.46E+04 | 1.38E+04 | 1.50E+04 | 1.44E+04 | 1.15E+06 |
| I.M. | 5mC/N1mpU | 1.72E+04 | 1.76E+04 | 1.99E+04 | 1.56E+04 | 1.20E+06 |
| I.M. | 5mC/s2U | 1.28E+04 | 1.36E+04 | 1.33E+04 | 1.07E+04 | 7.60E+05 |
| S.C. | 5mC/pU | 1.55E+04 | 1.67E+04 | 1.45E+04 | 1.69E+04 | 4.46E+04 |
| S.C. | 5mC/N1mpU | 1.20E+04 | 1.46E+04 | 1.38E+04 | 1.14E+04 | 8.29E+04 |
| S.C. | 5mC/s2U | 1.22E+04 | 1.31E+04 | 1.45E+04 | 1.08E+04 | 5.62E+04 |
| | Untreated | 2.59E+04 | 1.34E+04 | 1.26E+04 | 1.22E+04 | n/a |

### Example 101. Cationic Lipid Formulation of Modified mRNA

[1505] Luciferase mRNA (mRNA sequence shown in SEQ ID NO: 16112; polyA tail of approximately 140 nucleotides not shown in sequence; 5′cap, Cap1) modified where 25% of the cytosines replaced with 5-methylcytosine and 25% of the uridines replaced with 2-thiouridine (5 mC/s2U) was formulated in the cationic lipids described in Table 156. The formulations were administered intravenously (I.V.), intramuscularly (I.M.) or subcutaneously (S.C.) to Balb-C mice at a dose of 0.05 mg/kg.

TABLE 156
Cationic Lipid Formulations

| Formulation | NPA-130-1 | NPA-131-1 | NPA-132-1 | NPA-133-1 | 111612-C |
|---|---|---|---|---|---|
| Lipid | DLin-MC3- | DLin-KC2- | C12-200 | DLinDMA | DODMA |
| | DMA | DMA | | | |
| Lipid/mRNA | 20:1 | 20:1 | 20:1 | 20:1 | 20:1 |
| ratio (wt/wt) | | | | | |
| Mean Size | 120 nm | 105 nm | 122 nm | 105 nm | 221.3 nm |
| | PDI: 0.10 | PDI: 0.11 | PDI: 0.13 | PDI: 0.14 | PDI: 0.063 |
| Zeta at pH 7.4 | 0.2 mV | −0.6 mV | −0.5 mV | −0.3 mV | −3.10 mV |
| Encaps. | 100% | 100% | 93% | 93% | 60% |
| (RiboGr) | | | | | |

[1506] Twenty minutes prior to imaging, mice were injected intraperitoneally with a D-luciferin solution at 150 mg/kg. Animals were then anesthetized and images were acquired with an IVIS Lumina 11 imaging system (Perkin Elmer). Bioluminescence was measured as total flux (photons/second) of the entire mouse. The mice were imaged at 2 hours, 8 hours and 24 hours after dosing and the average total flux (photons/second) was measured for each route of administration and cationic lipid formulation. The background flux was about 3.31 E+05 p/s. The results of the imaging are shown in Table 157. In Table 157, “NT” means not tested. Untreated mice showed an average flux of 3,14E+05 at 2 hours, 3.33E+05 at 8 hours and 3.46E-+05 at 24 hours. Peak expression was seen for all three routes tested at 8 hours. DLin-KC2-DMA has better expression than DLin-MC3-DMA and DODMA showed expression for all routes evaluated.

TABLE 157
Flux

| | | | DLin- | DLin- | | | |
|---|---|---|---|---|---|---|---|
| | Time | | MC3-DMA | KC2-DMA | C12-200 | DLinDMA | DODMA |
| Route | Point | | Flux (p/s) | Flux (p/s) | Flux (p/s) | Flux (p/s) | Flux (p/s) |
| I.V. | 2 | hrs | 9.88E+06 | 6.98E+07 | 9.18E+06 | 3.98E+06 | 5.79E+06 |
| I.V. | 8 | hrs | 1.21E+07 | 1.23E+08 | 1.02E+07 | 5.98E+06 | 6.14E+06 |
| I.V. | 24 | hrs | 2.02E+06 | 1.05E+07 | 1.25E+06 | 1.35E+06 | 5.72E+05 |
| I.M. | 2 | hrs | 6.72E+05 | 3.66E+06 | 3.25E+06 | 7.34E+05 | 4.42E+05 |
| I.M. | 8 | hrs | 7.78E+06 | 2.85E+07 | 4.29E+06 | 2.22E+06 | 1.38E+05 |
| I.M. | 24 | hrs | 4.22E+05 | 8.79E+05 | 5.95E+05 | 8.48E+05 | 4.80E+05 |
| S.C. | 2 | hrs | 2.37E+06 | 4.77E+06 | 4.44E+06 | 1.07E+06 | 1.05E+06 |
| S.C. | 8 | hrs | 3.65E+07 | 1.17E+08 | 3.71E+06 | 9.33E+06 | 2.57E+06 |
| S.C. | 24 | hrs | 4.47E+06 | 1.28E+07 | 6.39E+05 | 8.89E+05 | 4.27E+05 |

### Example 102. Formulation of 5-Methylcytosine and N1-Methyl-1pseudouridine Modified mRNA

[1507] Luciferase mRNA (mRNA sequence shown in SEQ ID NO: 16112; polyA tail of approximately 140 nucleotides not shown in sequence; 5′cap, Cap1) fully modified with 5-methylcytosine and N1-methyl-pseudouridine was formulated in PBS (pH of 7.4). The formulations were administered intramuscularly (I.M.) or subcutaneously (S.C.) to Balb-C mice at a dose of 2.5 mg/kg.

[1508] Twenty minutes prior to imaging, mice were injected intraperitoneally with a D-luciferin solution at 150 mg/kg. Animals were then anesthetized and images were acquired with an IVIS Lumina 11 imaging system (Perkin Elmer). Bioluminescence was measured as total flux (photons/second) of the entire mouse. The mice were imaged at 5 minutes, 30 minutes, 60 minutes and 120 minutes after dosing and the average total flux (photons/second) was measured for each route of administration and cationic lipid formulation. The background flux was about 3.78E-05 p/s. The results of the imaging are shown in Table 158. Expression of luciferase was already seen at 30 minutes with both routes of delivery. Peak expression from subcutaneous administration appears between 30 to 60 minutes. Intramuscular expression was still increasing at 120 minutes.

TABLE 158
Flux

| | | PBS (pH 7.4) |
|---|---|---|
| Route | Time Point | Flux (p/s) |

| | | | |
|---|---|---|---|
| I.M. | 5 | min | 4.38E+05 |
| I.M. | 30 | min | 1.09E+06 |
| I.M. | 60 | min | 1.18E+06 |
| I.M. | 120 | min | 2.86E+06 |
| S.C. | 5 | min | 4.19E+05 |
| S.C. | 30 | min | 6.38E+06 |
| S.C. | 60 | min | 5.61E+06 |
| S.C. | 120 | min | 2.66E+06 |

### Example 103. Intramuscular and Subcutaneous Administration of Chemically Modified mRNA

[1509] Luciferase modified mRNA (mRNA sequence shown in SEQ ID NO: 16112; polyA tail of approximately 140 nucleotides not shown in sequence; 5′cap, Cap1) fully modified with N4-acetylcytidine, fully modified with 5-methoxyuridine, fully modified with N4-acetylcytidine and N1-methyl-pseudouridine or fully modified 5-methylcytosine and 5-methoxyuridine formulated in PBS (PH 7.4) was administered to Balb-C mice intramuscularly or subcutaneously at a dose of 2.5 mg/kg. Twenty minutes prior to imaging, mice were injected intraperitoneally with a D-luciferin solution at 150 mg/kg. Animals were then anesthetized and images were acquired with an IVIS Lumina II imaging system (Perkin Elmer). Bioluminescence was measured as total flux (photons/second) of the entire mouse. The mice were imaged at 2 hours, 8 hours and 24 hours. The average total flux (photons/second) for intramuscular administration is shown in Table 159 and the average total flux (photons/second) for subcutaneous administration is shown in Table 160. The background signal was 3.84E+05 (p/s). The peak expression for intramuscular administration was seen between 24 and 48 hours for all chemistry and expression was still detected at 120 hours. For subcutaneous delivery the peak expression was seen at 2-8 hours and expression was detected at 72 hours.

TABLE 159
Intramuscular Administration

| | 2 hours | 8 hours | 24 hours |
|---|---|---|---|
| | Flux (p/s) | Flux (p/s) | Flux (p/s) |
| N4-acetylcytidine | 1.32E+07 | 2.15E+07 | 4.01E+07 |
| 5-methoxyuridine | 4.93E+06 | 1.80E+07 | 4.53E+07 |
| N4-acetylcytidine/ | 2.02E+07 | 1.93E+07 | 1.63E+08 |
| N1-methyl-pseudouridine | | | |
| 5-methylcytosine/5- | 6.79E+06 | 4.55E+07 | 3.44E+07 |
| methoxyuridine | | | |

TABLE 160
Subcutaneous Administration

| | 2 hours | 8 hours | 24 hours |
|---|---|---|---|
| | Flux (p/s) | Flux (p/s) | Flux (p/s) |
| N4-acetylcytidine | 3.07E+07 | 1.23E+07 | 1.28E+07 |
| 5-methoxyuridine | 7.10E+06 | 9.38E+06 | 1.32E+07 |
| N4-acetylcytidine/ | 7.12E+06 | 3.07E+06 | 1.03E+07 |
| N1-methyl-pseudouridine | | | |
| 5-methylcytosine/5- | 7.15E+06 | 1.25E+07 | 1.11E+07 |
| methoxyuridine | | | |

### Example 104. In Vivo Study

[1510] Luciferase modified mRNA containing at least one chemical modification is formulated as a lipid nanoparticle (LNP) using the syringe pump method and characterized by particle size, zeta potential, and encapsulation.

[1511] As outlined in Table 161, the luciferase LNP formulation is administered to Balb-C mice intramuscularly (I.M.), intravenously (I.V.) and subcutaneously (S.C.). As a control luciferase modified RNA formulated in PBS is administered intravenously to mice.

TABLE 161
Luciferase Formulations

| | | | Concen- | Injection | Amount of | |
|---|---|---|---|---|---|---|
| | | | tration | Volume | modified | Dose |
| Formulation | Vehicle | Route | (mg/ml) | (ul) | RNA (ug) | (mg/kg) |
| Luc-LNP | PBS | S.C. | 0.2000 | 50 | 10 | 0.5000 |
| Luc-LNP | PBS | S.C. | 0.0200 | 50 | 1 | 0.0500 |
| Luc-LNP | PBS | S.C. | 0.0020 | 50 | 0.1 | 0.0050 |
| Luc-LNP | PBS | S.C. | 0.0002 | 50 | 0.01 | 0.0005 |
| Luc-LNP | PBS | I.V. | 0.2000 | 50 | 10 | 0.5000 |
| Luc-LNP | PBS | I.V. | 0.0200 | 50 | 1 | 0.0500 |
| Luc-LNP | PBS | I.V. | 0.0020 | 50 | 0.1 | 0.0050 |
| Luc-LNP | PBS | I.V. | 0.0002 | 50 | 0.01 | 0.0005 |
| Luc-LNP | PBS | I.M. | 0.2000 | 50 | 10 | 0.5000 |
| Luc-LNP | PBS | I.M. | 0.0200 | 50 | 1 | 0.0500 |
| Luc-LNP | PBS | I.M. | 0.0020 | 50 | 0.1 | 0.0050 |
| Luc-LNP | PBS | I.M. | 0.0002 | 50 | 0.01 | 0.0005 |
| Luc-PBS | PBS | I.V. | 0.20 | 50 | 10 | 0.50 |

[1512] The mice are imaged at 2 8, 24, 48, 120 and 192 hours to determine the bioluminescence (measured as total flux (photons/Second) of the entire mouse). At 8 hours or 192 hours the liver, spleen, kidney and injection site for subcutaneous and intramuscular administration are imaged to determine the bioluminescence.

### Example 105. Cationic Lipid Formulation Studies of Chemically Modified mRNA

[1513] Luciferase mRNA (mRNA sequence shown in SEQ ID NO: 16112; polyA tail of approximately 140 nucleotides not shown in sequence; 5′cap, Cap1) fully modified with 5-methylcytosine and pseudouridine (5 mC/pU), pseudouridine (pU) or N1-methyl-pseudouridine (1mpU) was formulated in the cationic lipids described in Table 162. The formulations were administered intravenously (I.V.), intramuscularly (I.M.) or subcutaneously (S.C.) to Balb-C mice at a dose of 0.05 mg/kg.

TABLE 162
Cationic Lipid Formulations

| Formulation | NPA-137-1 | NPA-134-1 | NPA-135-1 | NPA-136-1 | 111612-A |
|---|---|---|---|---|---|
| Lipid | DLin-MC3- | DLin-MC3- | DLin-KC2- | C12-200 | DODMA |
| | DMA | DMA | DMA | | |
| Lipid/mRNA | 20:1 | 20:1 | 20:1 | 20:1 | 20:1 |
| ratio (wt/wt) | | | | | |
| Mean Size | 111 nm | 104 nm | 95 | 143 nm | 223.2 nm |
| | PDI: 0.15 | PDI: 0.13 | PDI: 0.11 | PDI: 0.12 | PDI: 0.142 |
| Zeta at pH 7.4 | −4.1 mV | −1.9 mV | −1.0 mV | 0.2 mV | −3.09 mV |
| Encaps. | 97% | 100% | 100% | 78% | 64% |
| (RiboGr) | | | | | |
| Chemistry | pU | N1mpU | N1mpU | N1mpU | 5mC/pU |

[1514] Twenty minutes prior to imaging, mice were injected intraperitoneally with a D-luciferin solution at 150 mg/kg. Animals were then anesthetized and images were acquired with an IVIS Lumina II imaging system (Perkin Elmer). Bioluminescence was measured as total flux (photons/second) of the entire mouse. The mice were imaged at 2 hours, 8 hours and 24 hours after dosing and the average total flux (photons/second) was measured for each route of administration and cationic lipid formulation. The background flux was about 4.11E+05 p/s. The results of the imaging are shown in Table 163. Peak expression was seen for all three routes tested at 8 hours.

TABLE 163
Flux

| | | | DLin- | DLin- | DLin- | | |
|---|---|---|---|---|---|---|---|
| | | | MC3-DMA | MC3-DMA | KC2-DMA | C12-200 | DODMA |
| | Time | | (pU) | (N1mpU) | (N1mpU) | (N1mpU) | (5mC/pU) |
| Route | Point | | Flux (p/s) | Flux (p/s) | Flux (p/s) | Flux (p/s) | Flux (p/s) |
| I.V. | 2 | hrs | 3.21E+08 | 1.24E+09 | 1.01E+09 | 9.00E+08 | 3.90E+07 |
| I.V. | 8 | hrs | 1.60E+09 | 3.22E+09 | 2.38E+09 | 1.11E+09 | 1.17E+07 |
| I.V. | 24 | hrs | 1.41E+08 | 3.68E+08 | 3.93E+08 | 8.06E+07 | 1.11E+07 |
| I.M. | 2 | hrs | 2.09E+07 | 3.29E+07 | 8.32E+07 | 9.43E+07 | 4.66E+06 |
| I.M. | 8 | hrs | 2.16E+08 | 6.14E+08 | 1.00E+09 | 8.77E+07 | 7.05E+06 |
| I.M. | 24 | hrs | 1.23E+07 | 1.40E+08 | 5.09E+08 | 1.36E+07 | 1.14E+06 |
| S.C. | 2 | hrs | 2.32E+07 | 3.60E+07 | 2.14E+08 | 1.01E+08 | 3.11E+07 |
| S.C. | 8 | hrs | 5.55E+08 | 9.80E+08 | 4.93E+09 | 1.01E+09 | 8.04E+07 |
| S.C. | 24 | hrs | 1.81E+08 | 2.74E+08 | 2.12E+09 | 4.74E+07 | 1.34E+07 |

### Example 106. Studies of Chemical Modified mRNA

[1515] Luciferase mRNA (mRNA sequence shown in SEQ ID NO: 16112; polyA tail of approximately 140 nucleotides not shown in sequence; 5′cap, Cap1) fully modified with N4-acetylcytidine (N4-acetyl), fully modified with 5-methoxyuridine (5meth), fully modified with N4-acetylcytidine and N1-methyl-pseudouridine (N4-acetyl/N1mpU) or fully modified with 5-methylcytosine and 5-methoxyuridine (5 mC/5-meth) was formulated in DLin-MC3-DMA as described in Table 164.

[1516] The formulations were administered intravenously (I.V.), intramuscularly (I.M.) or subcutaneously (S.C.) to Balb-C mice at a dose of 0.05 mg/kg.

TABLE 164
Cationic Lipid Formulations

| Formulation | NPA-141-1 | NPA-142-1 | NPA-143-1 | NPA-144-1 |
|---|---|---|---|---|
| Lipid | DLin-MC3- | DLin-MC3- | DLin-MC3- | DLin-MC3- |
| | DMA | DMA | DMA | DMA |
| Lipid/mRNA | 20:1 | 20:1 | 20:1 | 20:1 |
| ratio (wt/wt) | | | | |
| Mean Size | 138 nm | 116 nm | 144 nm | 131 nm |
| | PDI: 0.16 | PDI: 0.15 | PDI: 0.15 | PDI: 0.15 |
| Zeta at pH 7.4 | −2.8 mV | −2.8 mV | −4.3 mV | −5.0 mV |
| Encaps. | 97% | 100% | 75% | 72% |
| (RiboGr) | | | | |
| Chemistry | N4-acetyl | 5meth | N4-acetyl/ | 5mC/5-meth |
| | | | N1mpU | |

[1517] Twenty minutes prior to imaging, mice were injected intraperitoneally with a D-luciferin solution at 150 mg/kg. Animals were then anesthetized and images were acquired with an IVIS Lumina 11 imaging system (Perkin Elmer). Bioluminescence was measured as total flux (photons/second) of the entire mouse. The mice were imaged at 2 hours, 6 hours and 24 hours after dosing and the average total flux (photons/second) was measured for each route of administration and cationic lipid formulation. The background flux was about 2.70E+05 p/s. The results of the imaging are shown in Table 165.

TABLE 165
Flux

| | | | | | N4-acetyl/ | 5mC/5- |
|---|---|---|---|---|---|---|
| | | | N4-acetyl | 5meth | N1mpU | meth |
| Route | Time Point | | Flux (p/s) | Flux (p/s) | Flux (p/s) | Flux (p/s) |
| I.V. | 2 | hrs | 9.17E+07 | 3.19E+06 | 4.21E+07 | 1.88E+06 |
| I.V. | 6 | hrs | 7.70E+08 | 9.28E+06 | 2.34E+08 | 7.75E+06 |
| I.V. | 24 | hrs | 6.84E+07 | 1.04E+06 | 3.55E+07 | 3.21E+06 |
| I.M. | 2 | hrs | 8.59E+06 | 7.86E+05 | 5.30E+06 | 5.11E+05 |
| I.M. | 6 | hrs | 1.27E+08 | 8.88E+06 | 3.82E+07 | 3.17E+06 |
| I.M. | 24 | hrs | 4.46E+07 | 1.38E+06 | 2.00E+07 | 1.39E+06 |
| S.C. | 2 | hrs | 1.83E+07 | 9.67E+05 | 4.45E+06 | 1.01E+06 |
| S.C. | 6 | hrs | 2.89E+08 | 1.78E+07 | 8.91E+07 | 1.29E+07 |
| S.C. | 24 | hrs | 6.09E+07 | 6.40E+06 | 2.08E+08 | 6.63E+06 |

### Example 107. Lipid Nanoparticle Containing A Plurality of Modified mRNAs

[1518] EPO mRNA (mRNA sequence shown in SEQ ID NO: 16105; polyA tail of approximately 140 nucleotides not shown in sequence; 5′cap, Cap1; fully modified with 5-methylcytosine and N1-methyl-pseudouridine), G-CSF mRNA (mRNA sequence shown in SEQ ID NO: 16102; polyA tail of approximately 140 nucleotides not shown in sequence; 5′cap, Cap1; fully modified with 5-methylcytosine and N1-methyl-pseudouridine) and Factor IX mRNA (mRNA sequence shown in SEQ ID NO: 16106; polyA tail of approximately 140 nucleotides not shown in sequence; 5′cap, Cap1; fully modified with 5-methylcytosine and N1-methyl-pseudouridine), is formulated in DLin-MC3-DMA as described in Table 166. The formulations are administered intravenously (I.V.), intramuscularly (I.M.) or subcutaneously (S.C.) to Balb-C mice at a dose of 0.05 mg/kg. Control LNP formulations containing only one mRNA are also administered at an equivalent dose.

TABLE 166
DLin-MC3-DMA Formulation

| Formulation | NPA-157-1 |
|---|---|
| Lipid | DLin-MC3- DMA |
| Lipid/mRN Aratio (wt/wt) | 20:1 |
| Mean Size | 89 nm |
| | PDI: 0.08 |
| Zeta at pH 7.4 | 1.1 mV |
| Encaps. (RiboGr) | 97% |

[1519] Serum is collected from the mice at 8 hours, 24 hours, 72 hours and/or 7 days after administration of the formulation. The serum is analyzed by ELISA to determine the protein expression of EPO, G-CSF, and Factor IX.

### Example 108. Cationic Lipid Formulation Studies of of 5-Methylcytosine and N1-Methyl-Pseudouridine Modified mRNA

[1520] EPO mRNA (mRNA sequence shown in SEQ ID NO: 16105; polyA tail of approximately 140 nucleotides not shown in sequence; 5′cap, Cap1; fully modified with 5-methylcytosine and N1-methyl-pseudouridine) or G-CSF mRNA (mRNA sequence shown in SEQ ID NO: 16102; polyA tail of approximately 140 nucleotides not shown in sequence; 5′cap, Cap1; fully modified with 5-methylcytosine and N1-methyl-pseudouridine) is formulated in DLin-MC3-DMA and DLin-KC2-DMA as described in Table 167. The formulations are administered intravenously (I.V), intramuscularly (I.M.) or subcutaneously (S.C.) to Balb-C mice at a dose of 0.05 mg/kg.

TABLE 167
DLin-MC3-DMA and DLin-KC2-DMA Formulations

| Formulation | NPA-147-1 | NPA-148-1 | NPA-150-1 | NPA-151-1 |
|---|---|---|---|---|
| mRNA | EPO | EPO | G-CSF | G-CSF |
| Lipid | DLin-MC3- | DLin-KC2- | DLin-MC3- | DLin-KC2- |
| | DMA | DMA | DMA | DMA |
| Lipid/mRNA | 20:1 | 20:1 | 20:1 | 20:1 |
| ratio (wt/wt) | | | | |
| Mean Size | 117 nm | 82 nm | 119 nm | 88 nm |
| | PDI: 0.14 | PDI: 0.08 | PDI: 0.13 | PDI: 0.08 |
| Zeta at pH 7.4 | −1.7 mV | 0.6 mV | 3.6 mV | 2.2 mV |
| Encaps. | 100% | 96% | 100% | 100% |
| (RiboGr) | | | | |

[1521] Serum is collected from the mice at 8 hours, 24 hours, 72 hours and/or 7 days after administration of the formulation. The serum is analyzed by ELISA to determine the protein expression of EPO and G-CSF.

### Example 109. In Vitro VEGF PBMC Study

[1522] 500 ng of VEGF mRNA (mRNA sequence shown in SEQ ID NO: 16115 polyA tail of approximately 160 nucleotides not shown in sequence; 5′cap, Cap1) fully modified with 5-methylcytosine and pseudouridine (VEGF 5 mC/pU), fully modified with 5-methylcytosine and N1-methyl-pseudouridine (VEGF 5 mC/N1mpU) or unmodified (VEGF unmod) was transfected with 0.4 uL of Lipofectamine 2000 into peripheral blood mononuclear cells (PBMC) from three normal blood donors (D1, D2, and D3). Cells were also untreated for each donor as a control. The supernatant was harvested and run by ELISA 22 hours after transfection to determine the protein expression and cytokine induction. The expression of VEGF and IFN-alpha induction is shown in Table 168 and FIGS. 8A and 8B.

TABLE 168
Protein and Cytokine levels

| | VEGF Expression | | | IFN-alpha Induction | | |
|---|---|---|---|---|---|---|
| | (pg/ml) | | | (pg/ml) | | |
| | D1 | D2 | D3 | D1 | D2 | D3 |
| VEGF unmod | 2 | 0 | 0 | 5400 | 3537 | 4946 |
| VEGF 5mC/pU | 424 | 871 | 429 | 145 | 294 | 106 |
| VEGF 5mC/N1mpU | 5088 | 10331 | 6183 | 205 | 165 | 6 |

### Example 110. In Vitro Expression of Modified mRNA

[1523] HEK293 cells were transfected EPO modified mRNA (mRNA sequence shown in SEQ ID NO:16105; polyA tail of approximately 160 nucleotides not shown in sequence; 5′cap, Cap1; fully modified with 5-methylcytosine and pseudouridine), HeLa cells were forward transfected with Transforming growth factor beta (TGF-beta) modified mRNA (mRNA sequence shown in SEQ ID NO: 16116; poly A tail of approximately 160 nucleotides not shown in sequence; 5′cap, Cap1; fully modified with 5-methylcytosine and pseudouridine) and HepG2 cells were transfected with bactericidal/permeability-increasing protein (rBPI-21) modified mRNA (mRNA sequence shown in SEQ ID NO: 16117; poly A tail of approximately 160 nucleotides not shown in sequence: 5′cap, Cap1; fully modified with 5-methylcytosine and pseudouridine) which had been complexed with Lipofectamine 2000 from Invitrogen (Carlsbad, CA) at the concentrations shown in Table 169, 170 and 171 using the procedures described herein. The protein expression was detected by ELISA and the protein (pg/ml) is also shown in Table 169, 170 and 171. In Table 169, “>” means greater than. For TGF-beta a control of untreated cells and a mock transfection of Lipofectamine2000 was also tested.

TABLE 169
EPO Protein Expression

| | Amount Transfected | | | | | | | |
|---|---|---|---|---|---|---|---|---|
| | 5 | 1 | 200 | 40 | 8 | 1.6 | 320 | 64 |
| | ng | ng | pg | pg | pg | pg | fg | fg |
| Protein | >2000 | 609.486 | 114.676 | 0 | 0 | 0 | 0 | 0 |
| (pg/ml) | | | | | | | | |

TABLE 170
TGF-beta Protein Expression

| | Amount Transfected | | | | |
|---|---|---|---|---|---|
| | 750 ng | 250 ng | 83 ng | Mock | Untreated |
| Protein | 5058 | 4325 | 3210 | 2 | 0 |
| (pg/ml) | | | | | |

TABLE 171
rBPI-21 Protein Expression

| | Amount Transfected | | | | | | | |
|---|---|---|---|---|---|---|---|---|
| | 2 | 400 | 80 | 16 | 3.2 | 640 | 128 | 26 |
| | ug | ng | ng | ng | ng | pg | pg | pg |
| Protein | 20.683 | 9.269 | 4.768 | 0 | 0 | 0 | 0 | 0 |
| (pg/ml) | | | | | | | | |

### Example 111. Bicistronic Modified mRNA

[1524] Human embryonic kidney epithelial (HEK293) were seeded on 96-well plates (Greiner Bio-one GmbH, Frickenhausen, Germany) HEK293 were seeded at a density of 30,000 in 100 μl cell culture medium (DMEM, 10% FCS, adding 2 mM L-Glutamine, 1 n M Sodiumpyruvate and 1× non-essential amino acids (Biochrom AG, Berlin, Germany) and 1.2 mg/ml Sodiumbicarbonate (Sigma-Aldrich, Munich, Germany)) 75 ng of the bi-cistronic modified mRNA (mCherry-2A-GFP) (SEQ ID NO: 16118; polyA tail of approximately 160 nucleotides not shown in sequence; 5′cap, Cap1; fully modified with 5-methylcytosine and pseudouridine), mCherry modified mRNA (mRNA SEQ ID NO: 16103; polyA tail of approximately 160 nucleotides not shown in sequence; 5′cap, Cap1; fully modified with 5-methylcytosine and pseudouridine) or green fluorescent protein (GFP) modified mRNA (mRNA sequence shown in SEQ ID NO: 16114; polyA tail of approximately 160 nucleotides not shown in sequence; 5′cap, Cap1; fully modified with 5-methylcytosine and pseudouridine) were added after seeding the cells and incubated. A control of untreated cells was also evaluated. mCherry-2A-GFP refers to a modified mRNA sequence comprising the coding region of mCherry, the 2A peptide and the coding region of GFP.

[1525] Cells were harvested by transferring the culture media supernatants to a 96-well Pro-Bind U-bottom plate (Beckton Dickinson GmbH, Heidelberg, Germany). Cells were trypsinized with ½ volume Trypsin/EDTA (Biochrom AG, Berlin, Germany), pooled with respective supernatants and fixed by adding one volume PBS/2% FCS (both Biochrom AG, Berlin, Germany)/0.5% formaldehyde (Merck, Darmstadt, Germany). Samples then were submitted to a flow cytometer measurement with a 532 nm excitation laser and the 610/20 filter for PE-Texas Red in a LSRII cytometer (Beckton Dickinson GmbH, Heidelberg, Germany). The mean fluorescence intensity (MFI) of all events is shown in Table 172. Cells transfected with the bi-cistronic modified mRNA were able to express both mCherry and GFP.

TABLE 172
MFI of Modified mRNA

| Modified mRNA | mCherry MFI | GFP MFI |
|---|---|---|
| mCherry | 17746 | 427 |
| GFP | 427 | 20019 |
| mCherry-2A-GFP | 5742 | 6783 |
| Untreated | 427 | 219 |

### Example 112. Cationic Lipid Formulation Studies of of 5-Methylcytosine and N1-Methyl-pseudouridine Modified mRNA to Produce an Antibody

[1526] Herceptin heavy chain (HC) mRNA (mRNA sequence shown in SEQ ID NO: 16119; polyA tail of approximately 140 nucleotides not shown in sequence; 5′cap, Cap1; fully modified with 5-methylcytosine and N1-methyl-pseudouridine) and Herceptin light chain (LC) mRNA (mRNA sequence shown in SEQ ID NO: 16120; polyA tail of approximately 140 nucleotides not shown in sequence; 5′cap, Cap1; fully modified with 5-methylcytosine and N1-methyl-pseudouridine) are formulated in DLin-MC3-DMA and DLin-KC2-DMA as described in Table 173. The formulations are administered intravenously (I.V) to Balb-C mice at a dose of 0.500, 0.050, and 0.005 mg/kg.

TABLE 173
DLin-MC3-DMA and DLin-KC2-DMA Formulations

| Formulation | NPA-158-1 | NPA-159-1 |
|---|---|---|
| Herceptin HC:LC | 2:1 | 2:1 |
| Ratio (wt/wt) | | |
| Lipid | DLin-MC3- | DLin-KC2- |
| | DMA | DMA |
| Lipid/Total mRNA | 20:1 | 20:1 |
| ratio (wt/wt) | | |
| Mean Size | 129 nm | 100 nm |
| | PDI: 0.14 | PDI: 0.10 |
| Zeta at pH 7.4 | 0.9 mV | 1.9 mV |
| Encaps. (RiboGr) | 100% | 100% |

[1527] Serum was collected from the mice at 8 hours, 24 hours 72 hours and/or 7 days after administration of the formulation. The serum was analyzed by ELISA to determine the protein expression of Herceptin.

### Example 113. Directed SAR of Pseudouridine and N1-methyl-Pseudouridine

[1528] With the recent focus on the pyrimidine nucleoside pseudouridine, a series of structure-activity studies were designed to investigate mRNA containing modifications to pseudouridine or N1-methyl-pseudouridine.

[1529] The study was designed to explore the effect of chain length, increased lipophilicity, presence of ring structures, and alteration of hydrophobic or hydrophilic interactions when modifications were made at the N1 position, C6 position, the 2-position, the 4-position and on the phosphate backbone. Stability is also investigated.

[1530] To this end, modifications involving alkylation, cycloalkylation, alkyl-cycloalkylation, arylation, alkyl-arylation, alkylation moieties with amino groups, alkylation moieties with carboxylic acid groups, and alkylation moieties containing amino acid charged moieties are investigated. The degree of alkylation is generally C₁-C₆. Examples of the chemistry modifications include those listed in Table 174 and Table 175.

TABLE 174
Pseudouridine and N1-methylPseudouridine SAR

| | Compound | Naturally |
|---|---|---|
| Chemistry Modification | # | occuring |
| N1-Modifications | | |
| N1-Ethyl-pseudo-UTP | 1 | N |
| N1-Propyl-pseudo-UTP | 2 | N |
| N1-iso-propyl-pseudo-UTP | 3 | N |
| N1-(2,2,2-Trifluoroethyl)-pseudo-UTP | 4 | N |
| N1-Cyclopropyl-pseudo-UTP | 5 | N |
| N1-Cyclopropylmethyl-pseudo-UTP | 6 | N |
| N1-Phenyl-pseudo-UTP | 7 | N |
| N1-Benzyl-pseudo-UTP | 8 | N |
| N1-Aminomethyl-pseudo-UTP | 9 | N |
| Pseudo-UTP-N1-2-ethanoic acid | 10 | N |
| N 1-(3-Amino-3-carboxypropyl)pseudo-UTP | 11 | N |
| N1-Methyl-3-(3-amino-3-carboxy- | 12 | Y |
| propyl)pseudo-UTP | | |
| C-6 Modifications | | |
| 6-Methyl-pseudo-UTP | 13 | N |
| 6-Trifluoromethyl-pseudo-UTP | 14 | N |
| 6-Methoxy-pseudo-UTP | 15 | N |
| 6-Phenyl-pseudo-UTP | 16 | N |
| 6-Iodo-pseudo-UTP | 17 | N |
| 6-Bromo-pseudo-UTP | 18 | N |
| 6-Chloro-pseudo-UTP | 19 | N |
| 6-Fluoro-pseudo-UTP | 20 | N |
| 2- or 4-position Modifications | | |
| 4-Thio-pseudo-UTP | 21 | N |
| 2-Thio-pseudo-UTP | 22 | N |
| Phosphate backbone Modifications | | |
| Alpha-thio-pseudo-UTP | 23 | N |
| N1-Me-alpha-thio-pseudo-UTP | 24 | N |

TABLE 175
Pseudouridine and N1-methyl-Pseudouridine SAR

| | Compound | Naturally |
|---|---|---|
| Chemistry Modification | # | occurring |
| N1-Methyl-pseudo-UTP | 1 | Y |
| N1-Butyl-pseudo-UTP | 2 | N |
| N1-tert-Butyl-pseudo-UTP | 3 | N |
| N1-Pentyl-pseudo-UTP | 4 | N |
| N1-Hexyl-pseudo-UTP | 5 | N |
| N1-Trifluoromethyl-pseudo-UTP | 6 | Y |
| N1-Cyclobutyl-pseudo-UTP | 7 | N |
| N1-Cyclopentyl-pseudo-UTP | 8 | N |
| N1-Cyclohexyl-pseudo-UTP | 9 | N |
| N1-Cycloheptyl-pseudo-UTP | 10 | N |
| N1-Cyclooctyl-pseudo-UTP | 11 | N |
| N1-Cyclobutylmethyl-pseudo-UTP | 12 | N |
| N1-Cyclopentylmethyl-pseudo-UTP | 13 | N |
| N1-Cyclohexylmethyl-pseudo-UTP | 14 | N |
| N1-Cycloheptylmethyl-pseudo-UTP | 15 | N |
| N1-Cyclooctylmethyl-pseudo-UTP | 16 | N |
| N1-p-tolyl-pseudo-UTP | 17 | N |
| N1-(2,4,6-Trimethyl-phenyl)pseudo-UTP | 18 | N |
| N1-(4-Methoxy-phenyl)pseudo-UTP | 19 | N |
| N1-(4-Amino-phenyl)pseudo-UTP | 20 | N |
| N1(4-Nitro-phenyl)pseudo-UTP | 21 | N |
| Pseudo-UTP-N1-p-benzoic acid | 22 | N |
| N1-(4-Methyl-benzyl)pseudo-UTP | 24 | N |
| N1-(2,4,6-Trimethyl-benzyl)pseudo-UTP | 23 | N |
| N1-(4-Methoxy-benzyl)pseudo-UTP | 25 | N |
| N1-(4-Amino-benzyl)pseudo-UTP | 26 | N |
| N1-(4-Nitro-benzyl)pseudo-UTP | 27 | N |
| Pseudo-UTP-N1-methyl-p-benzoic acid | 28 | N |
| N1-(2-Amino-ethyl)pseudo-UTP | 29 | N |
| N1-(3-Amino-propyl)pseudo-UTP | 30 | N |
| N1-(4-Amino-butyl)pseudo-UTP | 31 | N |
| N1-(5-Amino-pentyl)pseudo-UTP | 32 | N |
| N1-(6-Amino-hexyl)pseudo-UTP | 33 | N |
| Pseudo-UTP-N1-3-propionic acid | 34 | N |
| Pseudo-UTP-N1-4-butanoic acid | 35 | N |
| Pseudo-UTP-N1-5-pentanoic acid | 36 | N |
| Pseudo-UTP-N1-6-hexanoic acid | 37 | N |
| Pseudo-UTP-N1-7-heptanoic acid | 38 | N |
| N1-(2-Amino-2-carboxyethyl)pseudo-UTP | 39 | N |
| N1-(4-Amino-4-carboxybutyl)pseudo-UTP | 40 | N |
| N3-Alkyl-pseudo-UTP | 41 | N |
| 6-Ethyl-pseudo-UTP | 42 | N |
| 6-Propyl-pseudo-UTP | 43 | N |
| 6-iso-Propyl-pseudo-UTP | 44 | N |
| 6-Butyl-pseudo-UTP | 45 | N |
| 6-tert-Butyl-pseudo-UTP | 46 | N |
| 6-(2,2,2-Trifluoroethyl)-pseudo-UTP | 47 | N |
| 6-Ethoxy-pseudo-UTP | 48 | N |
| 6-Trifluoromethoxy-pseudo-UTP | 49 | N |
| 6-Phenyl-pseudo-UTP | 50 | N |
| 6-(Substituted-Phenyl)-pseudo-UTP | 51 | N |
| 6-Cyano-pseudo-UTP | 52 | N |
| 6-Azido-pseudo-UTP | 53 | N |
| 6-Amino-pseudo-UTP | 54 | N |
| 6-Ethylcarboxylate-pseudo-UTP | 54b | N |
| 6-Hydroxy-pseudo-UTP | 55 | N |
| 6-Methylamino-pseudo-UTP | 55b | N |
| 6-Dimethylamino-pseudo-UTP | 57 | N |
| 6-Hydroxyamino-pseudo-UTP | 59 | N |
| 6-Formyl-pseudo-UTP | 60 | N |
| 6-(4-Morpholino)-pseudo-UTP | 61 | N |
| 6-(4-Thiomorpholino)-pseudo-UTP | 62 | N |
| N1-Me-4-thio-pseudo-UTP | 63 | N |
| N1-Me-2-thio-pseudo-UTP | 64 | N |
| 1,6-Dimethyl-pseudo-UTP | 65 | N |
| 1-Methyl-6-trifluoromethyl-pseudo-UTP | 66 | N |
| 1-Methyl-6-ethyl-pseudo-UTP | 67 | N |
| 1-Methyl-6-propyl-pseudo-UTP | 68 | N |
| 1-Methyl-6-iso-propyl-pseudo-UTP | 69 | N |
| 1-Methyl-6-butyl-pseudo-UTP | 70 | N |
| 1-Methyl-6-tert-butyl-pseudo-UTP | 71 | N |
| 1-Methyl-6-(2,2,2-Trifluoroethyl)pseudo-UTP | 72 | N |
| 1-Methyl-6-iodo-pseudo-UTP | 73 | N |
| 1-Methyl-6-bromo-pseudo-UTP | 74 | N |
| 1-Methyl-6-chloro-pseudo-UTP | 75 | N |
| 1-Methyl-6-fluoro-pseudo-UTP | 76 | N |
| 1-Methyl-6-methoxy-pseudo-UTP | 77 | N |
| 1-Methyl-6-ethoxy-pseudo-UTP | 78 | N |
| 1-Methyl-6-trifluoromethoxy-pseudo-UTP | 79 | N |
| 1-Methyl-6-phenyl-pseudo-UTP | 80 | N |
| 1-Methyl-6-(substituted phenyl)pseudo-UTP | 81 | N |
| 1-Methyl-6-cyano-pseudo-UTP | 82 | N |
| 1-Methyl-6-azido-pseudo-UTP | 83 | N |
| 1-Methyl-6-amino-pseudo-UTP | 84 | N |
| 1-Methyl-6-ethylcarboxylate-pseudo-UTP | 85 | N |
| 1-Methyl-6-hydroxy-pseudo-UTP | 86 | N |
| 1-Methyl-6-methylamino-pseudo-UTP | 87 | N |
| 1-Methyl-6-dimethylamino-pseudo-UTP | 88 | N |
| 1-Methyl-6-hydroxyamino-pseudo-UTP | 89 | N |
| 1-Methyl-6-formyl-pseudo-UTP | 90 | N |
| 1-Methyl-6-(4-morpholino)-pseudo-UTP | 91 | N |
| 1-Methyl-6-(4-thiomorpholino)-pseudo-UTP | 92 | N |
| 1-Alkyl-6-vinyl-pseudo-UTP | 93 | N |
| 1-Alkyl-6-allyl-pseudo-UTP | 94 | N |
| 1-Alkyl-6-homoallyl-pseudo-UTP | 95 | N |
| 1-Alkyl-6-ethynyl-pseudo-UTP | 96 | N |
| 1-Alkyl-6-(2-propynyl)-pseudo-UTP | 97 | N |
| 1-Alkyl-6-(1-propynyl)-pseudo-UTP | 98 | N |

### Example 114. Incorporation of Naturally and Non-Naturally Occurring Nucleosides

[1531] Naturally and non-naturally occurring nucleosides are incorporated into mRNA encoding a polypeptide of interest. Examples of these are given in Tables 176 and 177. Certain commercially available nucleoside triphosphates (NTPs) are investigated in the polynucleotides of the invention. A selection of these are given in Table 176. The resultant mRNA are then examined for their ability to produce protein, induce cytokines, and/or produce a therapeutic outcome.

TABLE 176
Naturally and non-naturally occurring nucleosides

| | Compound | Naturally |
|---|---|---|
| Chemistry Modification | # | occuring |
| N4-Methyl-Cytosine | 1 | Y |
| N4,N4-Dimethyl-2′-OMe-Cytosine | 2 | Y |
| 5-Oxyacetic acid-methyl ester-Uridine | 3 | Y |
| N3-Methyl-pseudo-Uridine | 4 | Y |
| 5-Hydroxymethyl-Cytosine | 5 | Y |
| 5-Trifluoromethyl-Cytosine | 6 | N |
| 5-Trifluoromethyl-Uridine | 7 | N |
| 5-Methyl-amino-methyl-Uridine | 8 | Y |
| 5-Carboxy-methyl-amino-methyl-Uridine | 9 | Y |
| 5-Carboxymethylaminomethyl-2′-OMe-Uridine | 10 | Y |
| 5-Carboxymethylaminomethyl-2-thio-Uridine | 11 | Y |
| 5-Methylaminomethyl-2-thio-Uridine | 12 | Y |
| 5-Methoxy-carbonyl-methyl-Uridine | 13 | Y |
| 5-Methoxy-carbonyl-methyl-2′-OMe-Uridine | 14 | Y |
| 5-Oxyacetic acid- Uridine | 15 | Y |
| 3-(3-Amino-3-carboxypropyl)-Uridine | 16 | Y |
| 5-(carboxyhydroxymethyl)uridine methyl ester | 17 | Y |
| 5-(carboxyhydroxymethyl)uridine | 18 | Y |

TABLE 177
Non-naturally occurring nucleoside triphosphates

| | Compound | Naturally |
|---|---|---|
| Chemistry Modification | # | occuring |
| N1-Me-GTP | 1 | N |
| 2′-OMe-2-Amino-ATP | 2 | N |
| 2′-OMe-pseudo-UTP | 3 | Y |
| 2′-OMe-6-Me-UTP | 4 | N |
| 2′-Azido-2′-deoxy-ATP | 5 | N |
| 2′-Azido-2′-deoxy-GTP | 6 | N |
| 2′-Azido-2′-deoxy-UTP | 7 | N |
| 2′-Azido-2′-deoxy-CTP | 8 | N |
| 2′-Amino-2′-deoxy-ATP | 9 | N |
| 2′-Amino-2′-deoxy-GTP | 10 | N |
| 2′-Amino-2′-deoxy-UTP | 11 | N |
| 2′-Amino-2′-deoxy-CTP | 12 | N |
| 2-Amino-ATP | 13 | N |
| 8-Aza-ATP | 14 | N |
| Xanthosine-5′-TP | 15 | N |
| 5-Bromo-CTP | 16 | N |
| 2′-F-5-Methyl-2′-deoxy-UTP | 17 | N |
| 5-Aminoallyl-CTP | 18 | N |
| 2-Amino-riboside-TP | 19 | N |

### Example 115. Incorporation of Modifications to the Nucleobase and Carbohydrate (Sugar)

[1532] Naturally and non-naturally occurring nucleosides are incorporated into mRNA encoding a polypeptide of interest. Commercially available nucleosides and NIT's having modifications to both the nucleobase and carbohydrate (sugar) are examined for their ability to be incorporated into mRNA and to produce protein, induce cytokines, and/or produce a therapeutic outcome. Examples of these nucleosides are given in Tables 178 and 179.

TABLE 178
Combination modifications

| | Compound |
|---|---|
| Chemistry Modification | # |
| 5-iodo-2′-fluoro-deoxyuridine | 1 |
| 5-iodo-cytidine | 6 |
| 2′-bromo-deoxyuridine | 7 |
| 8-bromo-adenosine | 8 |
| 8-bromo-guanosine | 9 |
| 2,2′-anhydro-cytidine hydrochloride | 10 |
| 2,2′-anhydro-uridine | 11 |
| 2′-Azido-deoxyuridine | 12 |
| 2-amino-adenosine | 13 |
| N4-Benzoyl-cytidine | 14 |
| N4-Amino-cytidine | 15 |
| 2′-O-Methyl-N4-Acetyl-cytidine | 16 |
| 2′Fluoro-N4-Acetyl-cytidine | 17 |
| 2′Fluor-N4-Bz-cytidine | 18 |
| 2′O-methyl-N4-Bz-cytidine | 19 |
| 2′O-methyl-N6-Bz-deoxyadenosine | 20 |
| 2′Fluoro-N6-Bz-deoxyadenosine | 21 |
| N2-isobutyl-guanosine | 22 |
| 2′Fluro-N2-isobutyl-guanosine | 23 |
| 2′O-methyl-N2-isobutyl-guanosine | 24 |

TABLE 179
Naturally occuring combinations

| | Compound | Naturally |
|---|---|---|
| Name | # | occurring |
| 5-Methoxycarbonylmethyl-2-thiouridine TP | 1 | Y |
| 5-Methylaminomethyl-2-thiouridine TP | 2 | Y |
| 5-Crbamoylmethyluridine TP | 3 | Y |
| 5-Carbamoylmethyl-2′-O-methyluridine TP | 4 | Y |
| 1-Methyl-3-(3-amino-3-carboxypropyl) | 5 | Y |
| pseudouridine TP | | |
| 5-Methylaminomethyl-2-selenouridine TP | 6 | Y |
| 5-Carboxymethyluridine TP | 7 | Y |
| 5-Methyldihydrouridine TP | 8 | Y |
| lysidine TP | 9 | Y |
| 5-Taurinomethyluridine TP | 10 | Y |
| 5-Taurinomethyl-2-thiouridine TP | 11 | Y |
| 5-(iso-Pentenylaminomethyl)uridine TP | 12 | Y |
| 5-(iso-Pentenylaminomethyl)-2-thiouridine TP | 13 | Y |
| 5-(iso-Pentenylaminomethyl)-2′-O- | 14 | Y |
| methyluridine TP | | |
| N4-Acetyl-2′-O-methylcytidine TP | 15 | Y |
| N4,2′-O-Dimethylcytidine TP | 16 | Y |
| 5-Formyl-2′-O-methylcytidine TP | 17 | Y |
| 2′-O-Methylpseudouridine TP | 18 | Y |
| 2-Thio-2′-O-methyluridine TP | 19 | Y |
| 3,2′-O-Dimethyluridine TP | 20 | Y |

[1533] In the tables “UTP” stands for uridine triphosphate, “GTP” stands for guanosine triphosphate, “ATP” stands for adenosine triphosphate, “CTP” stands for cytosine triphosphate, “TP” stands for triphosphate and “13z” stands for benzyl.

### Example 116. Protein Production of Vascular Endothelial Growth Factor in HeLa Cells

[1534] The day before transfection, 20,000 HeLa cells (ATCC no. CCL Manassas, VA) were harvested by treatment with Trypsin-EDTA solution (LifeTechnologies, Grand Island, NY) and seeded in a total volume of 100 ul EMEM medium (supplemented with 10% FCS and 1× Glutamax) per well in a 96-well cell culture plate (Corning, Manassas, VA). The cells were grown at 37° C. in 5% CO₂ atmosphere overnight. The next day, 250 ng of vascular endothelial growth factor (VEGF) modified RNA (mRNA sequence shown in SEQ ID NO: 16115; polyA tail of approximately 160 nucleotides not shown in sequence; 5′cap, Cap1) with the chemical modification described in Table 180, was diluted in 10 ul final volume of OPTI-MEM (LifeTechnologies, Grand Island, NY). Lipofectamine 2000 (LifeTechnologies, Grand Island, NY) was used as transfection reagent and 0.2 ul of lipofectamine 2000 was diluted to 10 ul final volume of OPTI-MEM. After 5 minutes of incubation at room temperature, both solutions were combined and incubated an additional 15 minute at room temperature. Then the 20 ul combined solution was added to the 100 ul cell culture medium containing the HeLa cells and incubated at room temperature. A second set of HeLa cells was also evaluated with the VEGF mRNA according to the procedure set out above. A control of untreated cells and cells treated with just lipofectamine 2000 was also analyzed for the first set of HeLa cells.

[1535] After an 18 to 22 hour incubation cell culture supernatants of cells expressing VEGF were collected and centrifuged at 10.000 rcf for 2 minutes. The cleared supernatants were then analyzed with a VEGF-specific ELISA kit (R & D Systems, Minneapolis, MN) according to the manufacturer instructions. All samples were diluted until the determined values were within the linear range of the ELISA standard curve. The amount of protein produced is shown in Table 180.

[1536] These results demonstrate that VEGF fully modified with 1-methylpseudouridine produced more protein in HeLa cells compared to the other chemistry.

TABLE 180
Protein Production

| | VEGF | VEGF |
|---|---|---|
| | set 1 | set 2 |
| Sample | (pg/ml) | (pg/ml) |
| 5-methylcytosine and pseudouridine | 25,455 | 50,341 |
| (5 mC and pU) | | |
| 5-methylcytosine and 1-methylpsudouridine | 5,795 | 8,523 |
| (5 mC and 1 mpU) | | |
| 25% of uridine modified with | 27,045 | 27,045 |
| 2-thiouridine and 25% of cytosine | | |
| modified with 5-methylcytosine | | |
| (s2U and 5 mC) | | |
| Pseudouridine (pU) | 216,023 | 345,114 |
| 1-methylpseudouridine (1 mpU) | 32,614 | 38,523 |
| Unmodified | 409,318 | 447,273 |
| Lipofectamine 2000 (L2000) | 0 | N/A |
| Untreated | 0 | N/A |

### Example 117. Comparison of Protein Production of Chemically Modified Vascular Endothelial Growth Factor in HeLa Cells

[1537] The day before transfection, 20,000 HeLa cells (ATCC no. CCL-2; Manassas, VA) were harvested by treatment with Trypsin-EDTA solution (LifeTechnologies, Grand Island, NY) and seeded in a total volume of 100 ul EMEM medium (supplemented with 10% FCS and 1× Glutamax) per well in a 96-well cell culture plate (Corning, Manassas, VA). The cells were grown at 37° C. in 5% CO₂ atmosphere overnight. Next day, 250 ng of vascular endothelial growth factor (VEGF) modified RNA (mRNA sequence shown in SEQ ID NO: 16115; polyA tail of approximately 160 nucleotides not shown in sequence; 5′cap, Cap1) with the chemical modification described in Table 181, were diluted in 10 ul final volume of OPTI-MEM (LifeTechnologies, Grand Island, NY). Lipofectamine 2000 (LifeTechnologies, Grand Island, NY) was used as transfection reagent and 0.2 ul of lipofectamine 2000 was diluted to 10 ul final volume of OPTI-MEM. After 5 minutes of incubation at room temperature, both solutions were combined and incubated an additional 15 minute at room temperature. Then the 20 ul combined solution was added to the 100 ul cell culture medium containing the HeLa cells and incubated at room temperature. A control of untreated cells was also analyzed.

[1538] After an 18 to 22 hour incubation cell culture supernatants of cells expressing VEGF were collected and centrifuged at 10.000 rcf for 2 minutes. The cleared supernatants were then analyzed with a VEGF-specific ELISA kit (R & D Systems, Minneapolis, MN) according to the manufacturer instructions. All samples were diluted until the determined values were within the linear range of the ELISA standard curve. The amount of protein produced is shown in Table 181 and FIG. 9.

[1539] These results demonstrate that VEGF fully modified with 1-methylpseudouridine produced more protein in HeLa cells compared to the other chemistry.

TABLE 181
Protein Production

| | VEGF |
|---|---|
| Sample | (pg/ml) |
| Unmodified | 121,176 |
| 5-methylcytosine and 1-methylpsudouridine | 760,000 |
| (5 mC and 1 mpU) | |
| 1-methylpseudouridine (1 mpU) | 1,393,824 |
| Untreated | 0 |

### Example 118. Production of Vascular Endothelial Growth Factor Protein in Mammals

[1540] Lipoplexed vascular endothelial growth factor (VEGF) mRNA (mRNA sequence shown in SEQ ID NO: 16115; polyA tail of approximately 160 nucleotides not shown in sequence; 5′cap, Cap1) unmodified, fully modified with 5-methylcytosine and pseudouridine (5 mC/pU), fully modified with 5-methylcytosine and 1-methylpseudouridine (5 mC/1mpU), modified where 25% of the cytosines replaced with 5-methylcytosine and 25% of the uridines replaced with 2-thiouridine (5 mC/s2U), fully modified with 1-methylpseudouridine (1mpU) or fully modified with pseudouridine (pU). The formulation was administered intravenously to mice at a dose of 2 ug of mRNA per mouse. As a control, a group of mice were untreated. Serum from the mice is measured by specific VEGF ELISA 3 hours after administration for VEGF protein expression. The results are shown in Table 182 and FIG. 10.

TABLE 182
Protein Production

| | VEGF |
|---|---|
| Sample | (pg/ml) |
| Unmodified | 34 |
| 5-methylcytosine and pseudouridine (5 mC and pU) | 40 |
| 5-methylcytosine and 1-methylpsudouridine | 11 |
| (5 mC and 1 mpU) | |
| 25% of uridine modified with 2-thiouridine | 53 |
| and 25% of cytosine modified with 5-methyl- | |
| cytosine (s2U and 5 mC) | |
| Pseudouridine (pU) | 86 |
| 1-methyl-pseudouridine (1 mpU) | 51 |
| Untreated | 0 |

### Example 119. Protein Production of Granulocyte Colony Stimulating Factor in HeLa Cells

[1541] The day before transfection, 20,000 HeLa cells (ATCC no. CCL-2; Manassas, VA) were harvested by treatment with Trypsin-EDTA solution (LifeTechnologies, Grand Island, NY) and seeded in a total volume of 100 ul EMEM medium (supplemented with 10% FCS and 1× Glutamax) per well in a 96-well cell culture plate (Corning, Manassas, VA). The cells were grown at 37° C. in 5% CO₂ atmosphere overnight. The next day, 250 ng of granulocyte colony stimulating factor (G-CSF) modified RNA (mRNA sequence shown in SEQ ID NO: 16102; polyA tail of approximately 160 nucleotides not shown in sequence; 5′cap, Cap1) with the chemical modification described in Table 183, was diluted in 10 ul final volume of OPTI-MEM (LifeTechnologies, Grand Island, NY). Lipofectamine 2000 (LifeTechnologies, Grand Island, NY) was used as transfection reagent and 0.2 ul of lipofectamine 2000 was diluted to 10 ul final volume of OPTI-MEM. After 5 minutes of incubation at room temperature, both solutions were combined and incubated an additional 15 minute at room temperature. Then the 20 ul combined solution was added to the 100 ul cell culture medium containing the HeLa cells and incubated at room temperature. A control of untreated cells and cells treated with just lipofectamine 2000 was also analyzed.

[1542] After an 18 to 22 hour incubation cell culture supernatants of cells expressing G3-CSF were collected and centrifuged at 10.000rcf for 2 minutes. The cleared supernatants were then analyzed with a G-CSF-specific ELISA kit (R & D Systems, Minneapolis, MN) according to the manufacturer instructions. All samples were diluted until the determined values were within the linear range of the ELISA standard curve. The amount of protein produced is shown in Table 183 and FIG. 11.

TABLE 183
Protein Production

| | G-CSF |
|---|---|
| Sample | (pg/ml) |
| 5-methylcytosine and pseudouridine (5 mC and pU) | 704,250 |
| 5-methylcytosine and 1-methylpsudouridine | 1,523,750 |
| (5 mC and 1 mpU) | |
| 25% of uridine modified with 2-thiouridine and | 89,000 |
| 25% of cytosine modified with 5-methylcytosine | |
| (s2U and 5 mC) | |
| Pseudouridine (pU) | 408,250 |
| 1-methylpseudouridine (1 mpU) | 1,391,250 |
| Lipofectamine 2000 (L2000) | 0 |
| Untreated | 0 |

### Example 120. Protein Production of Chemically Modified Factor IX in HeLa Cell Supernatant

[1543] The day before transfection, 15,000 HeLa cells (ATCC no. CCL-2; Manassas, VA) were harvested by treatment with Trypsin-Ethylenediaminetetraacetic acid (EDTA) solution (LifeTechnologies, Grand Island, NY) and seeded in a total volume of 100 ul Eagle's minimal essential medium (EMEM) (supplemented with 10% fetal calf serum (FCS) and 1× Glutamax) per well in a 24-well cell culture plate (Corning, Manassas, VA). The cells were grown at 37° C. in 5% CO₂ atmosphere overnight. Next day, 250 ng of factor IX modified RNA (mRNA sequence shown in SEQ ID NO: 16106; polyA tail of approximately 140 nucleotides not shown in sequence; 5′cap, Cap1) fully modified with 5-methylcytosine and pseudouridine (5 mC/pU), fully modified with 5-methylcytosine and 1-methylpseudouridine (5 mC/1 mpU), modified where 25% of the cytosines replaced with 5-methylcytosine and 25% of the uridines replaced with 2-thiouridine (s2U/5 mC), fully modified with 1-methylpseudouridine (1mpU) or fully modified with pseudouridine (pU) were diluted in 10 ul final volume of OPTI-MEM● (LifeTechnologies, Grand Island, NY). Lipofectamine 2000 (LifeTechnologies, Grand Island, NY) was used as transfection reagent and 0.2 ul of lipofectamine 2000 was diluted to 10 ul final volume of OPTI-MEM●. After 5 minutes of incubation at room temperature, both solutions were combined and incubated an additional 15 minute at room temperature. Then the 20 ul combined solution was added to the 100 ul cell culture medium containing the HeLa cells and incubated at room temperature. A control of untreated was also analyzed.

[1544] After an 18 hour incubation cell culture supernatants of cells expressing factor IX were collected by lysing cells with immuno-precipitation (IP) buffer from Pierce Biotechnology (Thermo Scientific, Rockford, IL) and centrifuged at 10.000ref for 2 minutes. The cleared supernatants were diluted 1:2 (1 ml lysate/2 wells/24 well plate) or 1:5 (1 ml lysate/5 wells/24 well plate) then analyzed with a factor IX-specific ELISA kit according to the manufacturer instructions. All samples were diluted until the determined values were within the linear range of the ELISA standard curve. The amount of protein produced in both studies is shown in Table 184 and FIG. 12.

TABLE 184
Protein Production

| | Factor IX |
|---|---|
| Sample | (ng/ml) |
| 5-methylcytosine and pseudouridine (5 mC/pU) | 45.8 |
| 5-methylcytosine and 1-methylpseudouridine | 147.1 |
| (5 mC/1 mpU) | |
| 25% of the cytosines replaced with 5-methyl- | 7.4 |
| cytosine and 25% of the uridines replaced | |
| with 2-thiouridine (s2U/5 mC) | |
| Pseudouridine (pU) | 17.0 |
| 1-methylpseudouridine (1 mpU) | 32.0 |
| Untreated | 0 |

### Example 121. Intranasal Lung Delivery of 1-methylpseudouridine or 5-methylcytosine and 1-methylpseudouridine Modified Luciferase mRNA Formulated in Cationic Lipid Nanoparticle

[1545] Luciferase modified mRNA (mRNA sequence shown in SEQ ID NO: 16112; polyA tail of approximately 140 nucleotides not shown in sequence; 5′cap, Cap1) fully modified with 1-methylpseudouridine (Luc-G5-LNP-KC2) or fully modified with 1-methylpseudouridine and 5-methylcytosine (Luc-G2-LNP-KC2) were formulated in the cationic Lipid Nanoparticle (LNP-KC2) as described in Table 185,

TABLE 185
Formulation

| Formulation | NPA-127-1 | NPA-135-1 |
|---|---|---|
| Lipid | DLin-KC2-DMA | DLin-KC2-DMA |
| Lipid/mRNA | 20:1 | 20:1 |
| ratio (wt/wt) | | |
| Mean Size | 114 nm | 95 nm |
| | PDI: 0.10 | PDI: 0.11 |
| Zeta at pH 7.4 | −0.5 mV | −1.0 mV |
| Encaps. (RiboGr) | 77% | 100% |

[1546] The formulations were administered intranasally (I.N.) to Balb-C mice at a dose of 0.3 mg/kg. Twenty minutes prior to imaging, mice were injected intraperitoneally with a D-luciferin solution at 150 mg/kg. Animals were then anesthetized and images were acquired with an IVIS Lumina 11 imaging system (Perkin Elmer). Bioluminescence was measured as total flux (photons/second) of the entire mouse. The mice were imaged at 2 hours, 8 hours, 48, and 72 hours after dosing and the average total flux (photons/second) was measured. The background flux was about 6.3+05 p/s. The results of the imaging of Luc-G5-LNP-KC2 or Luc-G5-LNP-KC2 vs. Vehicle are shown in the Table 186, “NT” means not tested.

TABLE 186
Luciferase expression after intranasal dosing

| | | Luc-G5- | Luc-G2- | Vehicle |
|---|---|---|---|---|
| | | LNP-KC2 | LNP-KC2 | (PBS) |
| | Time | Flux | Flux | Flux |
| Route | Point | (p/s) | (p/s) | (p/s) |
| I.N. | 2 hrs | 1.53E+06 | 5.81E+05 | 3.87E+05 |
| I.N. | 8 hrs | 1.09E+07 | 9.35E+05 | 5.57E+05 |
| I.N. | 24 hrs | 5.93E+06 | 5.33E+05 | 4.89E+05 |
| I.N. | 28 hrs | 1.22E+06 | 7.63E+05 | 8.81E+05 |
| I.N. | 72 hrs | 8.43E+05 | NT | 8.17E+05 |

### Example 122. Intranasal Lung Delivery of 1-Methylpseudouridine or 5-Methylinosine and 1-Methylpseudouridine Modified Luciferase mRNA Lipoplexed in Lipofectamine 2000

[1547] Luciferase modified mRNA (mRNA sequence shown in SEQ ID NO: 16112; polyA tail of approximately 140 nucleotides not shown in sequence; 5′cap, Cap1) fully modified with 1-methylpseudouridine (Luc-G5-Lipoplex) or fully modified with 1-methylpseudouridine and 5-methylcytosine (Luc-G2-Lipoplex) were lipoplexed in two steps, first step was the dilution of 16.6 ul from 3 mg/ml of 1-methylpseudouridine or 1-methylpseudouridine and 5-methylcytosine modified luciferase mRNA in 108.5 ul DMEM and the second step was the dilution of 100 ul LF2000 in 25 ul DMEM then both mixed together gently to make 250 ul total mixer which incubated 5-10 min at RT to form a Lipid-mRNA complex before injection. The lipoplex from both Luciferase mRNA fully modified with 1-methylpseudouridine or 1-methylpseudouridine and 5-methylcytosine were administered intranasally (I.N.) to Balb-C mice at a dose of 0.5 mg/kg.

[1548] Twenty minutes prior to imaging, mice were injected intraperitoneally with a D-luciferin solution at 150 mg/kg. Animals were then anesthetized and images were acquired with an IVIS Lumina II imaging system (Perkin Elmer). Bioluminescence was measured as total flux (photons/second) of the entire mouse. The mice were imaged at 2 hours, 8 hours and 24 hours after dosing and the average total flux (photons/second) was measured. The background signal was about 4.8+05 p/s. The background flux was about 6.3+05 p/s. The results of the imaging of Luc-G5-Lipoplex or Luc-G2-Lipoplex vs. Vehicle are shown in the Table 187.

TABLE 187
Luciferase expression after intranasal dosing

| | | Luc-G5- | Luc-G2- | Vehicle |
|---|---|---|---|---|
| | | Lipoplex | Lipoplex | (PBS) |
| | Time | Flux | Flux | Flux |
| Route | Point | (p/s) | (p/s) | (p/s) |
| I.N. | 2 hrs | 8.37E+05 | 9.58E+05 | 3.87E+05 |
| I.N. | 8 hrs | 8.42E+05 | 7.11E+05 | 5.57E+05 |
| I.N. | 24 hrs | 5.74E+05 | 5.53E+05 | 4.89E+05 |

### Example 123. Intranasal Lung Delivery of 1-Methylpseudouridine or 5-Methylcytosine and 1-Methylpseudouridine Modified Luciferase mRNA Formulated in PBS

[1549] Luciferase modified mRNA (mRNA sequence shown in SEQ ID NO: 16112; polyA tail of approximately 140 nucleotides not shown in sequence; 5′cap, Cap1) fully modified with 1-methylpseudouridine (Luc-G5-EBuffer(PBS)) or fully modified with 1-methylpseudouridine and 5-methylcytosine (Luc-G2-Buffer(PBS)) formulated in PBS (pH 7.4) were administered intranasally (I. N.) to Balb-C mice at a dose of 7.5 mg/kg.

[1550] Twenty minutes prior to imaging, mice were injected intraperitoneally with a D-luciferin solution at 150 mg/kg. Animals were then anesthetized and images were acquired with an IVIS Lumina II imaging system (Perkin Elmer). Bioluminescence was measured as total flux (photons/second) of the entire mouse. The mice were imaged at 2 hours, 8 hours and 24 hours after dosing and the average total flux (photons/second) was measured. The background flux was about 4.8+05 p/s. The background flux was about 6.3+05 p/s. The results of the imaging of Luc-G5-in Buffer vs. Vehicle are shown in the Table 188.

TABLE 188
Luciferase expression after intranasal dosing

| | | Luc-G5- | Luc-G2- | V |
|---|---|---|---|---|
| | | in Buffer | in Buffer | ehicle |
| | | (PBS) | (PBS) | (PBS) |
| | Time | Flux | Flux | Flux |
| Route | Point | [p/s] | [p/s] | (p/s) |
| I.N. | 2 hrs | 4.50E+05 | 9.58E+05 | 3.87E+05 |
| I.N. | 8 hrs | 7.12E+05 | 7.11E+05 | 5.57E+05 |
| I.N. | 24 hrs | 4.47E+05 | 5.53E+05 | 4.89E+05 |

[1551] It is to be understood that the words which have been used are words of description rather than limitation, and that changes may be made within the purview of the appended claims without departing from the true scope and spirit of the invention in its broader aspects.

[1552] While the present invention has been described at some length and with some particularity with respect to the several described embodiments, it is not intended that it should be limited to any such particulars or embodiments or any particular embodiment, but it is to be continued with references to the appended claims so as to provide the broadest possible interpretation of such claims in view of the prior art and, therefore, to effectively encompass the intended scope of the invention.

[1553] All publications, patent applications, patents, and other references mentioned herein are incorporated by reference in their entirety. In case of conflict, the present specification, including definitions, will control. In addition, section headings, the materials, methods, and examples are illustrative only and not intended to be limiting.

### LENGTHY TABLE

[1554] The patent application contains a lengthy table section, A copy of the table is available in electronic form from the USPTO web site. An electronic copy of the table will also be available from the USPTO upon request and payment of the fee set forth in 37 CFR 1.19(b)(3).

1-92. (canceled)

93. A pharmaceutical composition comprising:
a plurality of lipid nanoparticles comprising a cationic lipid, a neutral lipid, a cholesterol, and a PEG lipid, wherein the plurality of lipid nanoparticles has a mean particle size of between 80 nm and 160 nm; and
wherein the lipid nanoparticles comprise an mRNA encoding a secreted protein, wherein the mRNA comprises:
(i) at least one 5′-cap structure;
(ii) a 5′-UTR;
(iii) an open reading frame encoding the secreted protein and consisting of nucleotides including N1-methyl-pseudouridine, cytosine, adenine, and guanine;
(iv) a 3′-UTR; and
(v) a poly-A region of least 100 nucleotides in length.

94. The pharmaceutical composition of claim 93, wherein the cationic lipid is a biodegradable cationic lipid.

95. The pharmaceutical composition of claim 94, wherein the biodegradable cationic lipid comprises an ester linkage.

96. The pharmaceutical composition of claim 95, wherein the biodegradable cationic lipid comprises DLin-DMA with an internal ester, DLin-DMA with a terminal ester, DLin-MC3-DMA with an internal ester, or DLin-MC3-DMA with a terminal ester.

97. The pharmaceutical composition of claim 93, wherein the at least one 5′-cap structure is cap0, cap1, ARCA, inosine, N1-methyl-guanosine, 2′-fluoro-guanosine, 7-deaza-guanosine, 8-oxo-guanosine, 2-amino-guanosine, LNA-guanosine, or 2-azido-guanosine.

98. The pharmaceutical composition of claim 97, wherein the at least one 5′-cap structure is cap0, cap1, or ARCA.

99. The pharmaceutical composition of claim 93, wherein the 3′-UTR is an alpha-globin 3′-UTR.

100. The pharmaceutical composition of claim 93, wherein the poly-A tail is at least 160 nucleotides in length.

101. The pharmaceutical composition of claim 93, wherein the 5′-UTR comprises a Kozak sequence.

102. The pharmaceutical composition of claim 93, wherein the plurality of lipid nanoparticles has a mean PDI of between 0.02 and 0.2.

103. The pharmaceutical composition of claim 93, wherein the plurality of lipid nanoparticles has a mean lipid to polynucleotide ratio (wt/wt) of between 10 and 20.

104. The pharmaceutical composition of claim 93, wherein, upon administration to a mammalian cell, the mRNA has increased expression of the encoded secreted protein relative to a corresponding mRNA comprising an open reading frame consisting of nucleotides including uracil, cytosine, adenine, and guanine.

105. The pharmaceutical composition of claim 93, wherein, upon administration to a mammalian cell, the mRNA has a longer half-life or greater area under the curve of secreted protein expression relative to a corresponding mRNA comprising an open reading frame consisting of nucleotides including uracil, cytosine, adenine, and guanine.

106. The pharmaceutical composition of claim 93, wherein, upon administration to peripheral blood mononuclear cells, the mRNA induces detectably lower levels of IFN-α or TNF-α relative to a corresponding mRNA comprising an open reading frame consisting of nucleotides including uracil, cytosine, adenine, and guanine.

The application's sequence listing, which the Patent Office published only in electronic form, follows.

SEQUENCE LISTING (16120 sequences)

SEQ ID NO: 1 - DNA, 47 bp, Homo sapiens
  source 1..47: mol_type = unassigned DNA
gggaaataagagagaaaagaagagtaagaagaaatataagagccacc

SEQ ID NO: 2 - DNA, 47 bp, Homo sapiens
  source 1..47: mol_type = unassigned DNA
gggagatcagagagaaaagaagagtaagaagaaatataagagccacc

SEQ ID NO: 3 - DNA, 145 bp, Homo sapiens
  source 1..145: mol_type = unassigned DNA
ggaataaaagtctcaacacaacatatacaaaacaaacgaatctcaagcaatcaagcattctacttctattgcagcaatttaaatcatttcttttaaagcaaaagcaattttctgaaaattttcaccatttacgaacgatagcaac

SEQ ID NO: 4 - RNA, 42 nt, Homo sapiens
  source 1..42: mol_type = unassigned RNA
gggagacaagcttggcattccggtactgttggtaaagccacc

SEQ ID NO: 5 - DNA, 371 bp, Homo sapiens
  source 1..371: mol_type = unassigned DNA
gcgcctgcccacctgccaccgactgctggaacccagccagtgggagggcctggcccaccagagtcctgctccctcactcctcgccccgccccctgtcccagagtcccacctgggggctctctccacccttctcagagttccagtttcaaccagagttccaaccaatgggctccatcctctggattctggccaatgaaatatctccctggcagggtcctcttcttttcccagagctccaccccaaccaggagctctagttaatggagagctcccagcacactcggagcttgtgctttgtctccacgcaaagcgataaataaaagcattggtggcctttggtctttgaataaagcctgagtaggaagtctaga

SEQ ID NO: 6 - DNA, 568 bp, Homo sapiens
  source 1..568: mol_type = unassigned DNA
gcccctgccgctcccacccccacccatctgggccccgggttcaagagagagcggggtctgatctcgtgtagccatatagagtttgcttctgagtgtctgctttgtttagtagaggtgggcaggaggagctgaggggctggggctggggtgttgaagttggctttgcatgcccagcgatgcgcctccctgtgggatgtcatcaccctgggaaccgggagtggcccttggctcactgtgttctgcatggtttggatctgaattaattgtcctttcttctaaatcccaaccgaacttcttccaacctccaaactggctgtaaccccaaatccaagccattaactacacctgacagtagcaattgtctgattaatcactggccccttgaagacagcagaatgtccctttgcaatgaggaggagatctgggctgggcgggccagctggggaagcatttgactatctggaacttgtgtgtgcctcctcaggtatggcagtgactcacctggttttaataaaacaacctgcaacatctcatggtctttgaataaagcctgagtaggaagtctaga

SEQ ID NO: 7 - DNA, 289 bp, Homo sapiens
  source 1..289: mol_type = unassigned DNA
acacactccacctccagcacgcgacttctcaggacgacgaatcttctcaatgggggggcggctgagctccagccaccccgcagtcactttctttgtaacaacttccgttgctgccatcgtaaactgacacagtgtttataacgtgtacatacattaacttattacctcattttgttatttttcgaaacaaagccctgtggaagaaaatggaaaacttgaagaagcattaaagtcattctgttaagctgcgtaaatggtctttgaataaagcctgagtaggaagtctaga

SEQ ID NO: 8 - DNA, 379 bp, Homo sapiens
  source 1..379: mol_type = unassigned DNA
catcacatttaaaagcatctcagcctaccatgagaataagagaaagaaaatgaagatcaaaagcttattcatctgtttttctttttcgttggtgtaaagccaacaccctgtctaaaaaacataaatttctttaatcattttgcctcttttctctgtgcttcaattaataaaaaatggaaagaatctaatagagtggtacagcactgttatttttcaaagatgtgttgctatcctgaaaattctgtaggttctgtggaagttccagtgttctctcttattccacttcggtagaggatttctagtttcttgtgggctaattaaataaatcattaatactcttctaatggtctttgaataaagcctgagtaggaagtctaga

SEQ ID NO: 9 - DNA, 118 bp, Mus sp.
  source 1..118: mol_type = unassigned DNA
gctgccttctgcggggcttgccttctggccatgcccttcttctctcccttgcacctgtacctcttggtctttgaataaagcctgagtaggaaggcggccgctcgagcatgcatctaga

SEQ ID NO: 10 - DNA, 908 bp, Homo sapiens
  source 1..908: mol_type = unassigned DNA
gccaagccctccccatcccatgtatttatctctatttaatatttatgtctatttaagcctcatatttaaagacagggaagagcagaacggagccccaggcctctgtgtccttccctgcatttctgagtttcattctcctgcctgtagcagtgagaaaaagctcctgtcctcccatcccctggactgggaggtagataggtaaataccaagtatttattactatgactgctccccagccctggctctgcaatgggcactgggatgagccgctgtgagcccctggtcctgagggtccccacctgggacccttgagagtatcaggtctcccacgtgggagacaagaaatccctgtttaatatttaaacagcagtgttccccatctgggtccttgcacccctcactctggcctcagccgactgcacagcggcccctgcatccccttggctgtgaggcccctggacaagcagaggtggccagagctgggaggcatggccctggggtcccacgaatttgctggggaatctcgtttttcttcttaagacttttgggacatggtttgactcccgaacatcaccgacgcgtctcctgtttttctgggtggcctcgggacacctgccctgcccccacgagggtcaggactgtgactctttttagggccaggcaggtgcctggacatttgccttgctggacggggactggggatgtgggagggagcagacaggaggaatcatgtcaggcctgtgtgtgaaaggaagctccactgtcaccctccacctcttcaccccccactcaccagtgtcccctccactgtcacattgtaactgaacttcaggataataaagtgtttgcctccatggtctttgaataaagcctgagtaggaaggcggccgctcgagcatgcatctaga

SEQ ID NO: 11 - DNA, 835 bp, Homo sapiens
  source 1..835: mol_type = unassigned DNA
actcaatctaaattaaaaaagaaagaaatttgaaaaaactttctctttgccatttcttcttcttcttttttaactgaaagctgaatccttccatttcttctgcacatctacttgcttaaattgtgggcaaaagagaaaaagaaggattgatcagagcattgtgcaatacagtttcattaactccttcccccgctcccccaaaaatttgaatttttttttcaacactcttacacctgttatggaaaatgtcaacctttgtaagaaaaccaaaataaaaattgaaaaataaaaaccataaacatttgcaccacttgtggcttttgaatatcttccacagagggaagtttaaaacccaaacttccaaaggtttaaactacctcaaaacactttcccatgagtgtgatccacattgttaggtgctgacctagacagagatgaactgaggtccttgttttgttttgttcataatacaaaggtgctaattaatagtatttcagatacttgaagaatgttgatggtgctagaagaatttgagaagaaatactcctgtattgagttgtatcgtgtggtgtattttttaaaaaatttgatttagcattcatattttccatcttattcccaattaaaagtatgcagattatttgcccaaatcttcttcagattcagcatttgttctttgccagtctcattttcatcttcttccatggttccacagaagctttgtttcttgggcaagcagaaaaattaaattgtacctattttgtatatgtgagatgtttaaataaattgtgaaaaaaatgaaataaagcatgtttggttttccaaaagaacatat

SEQ ID NO: 12 - DNA, 297 bp, Homo sapiens
  source 1..297: mol_type = unassigned DNA
cgccgccgcccgggccccgcagtcgagggtcgtgagcccaccccgtccatggtgctaagcgggcccgggtcccacacggccagcaccgctgctcactcggacgacgccctgggcctgcacctctccagctcctcccacggggtccccgtagccccggcccccgcccagccccaggtctccccaggccctccgcaggctgcccggcctccctccccctgcagccatcccaaggctcctgacctacctggcccctgagctctggagcaagccctgacccaataaaggctttgaacccat

SEQ ID NO: 13 - DNA, 602 bp, Homo sapiens
  source 1..602: mol_type = unassigned DNA
ggggctagagccctctccgcacagcgtggagacggggcaaggaggggggttattaggattggtggttttgttttgctttgtttaaagccgtgggaaaatggcacaactttacctctgtgggagatgcaacactgagagccaaggggtgggagttgggataatttttatataaaagaagtttttccactttgaattgctaaaagtggcatttttcctatgtgcagtcactcctctcatttctaaaatagggacgtggccaggcacggtggctcatgcctgtaatcccagcactttgggaggccgaggcaggcggctcacgaggtcaggagatcgagactatcctggctaacacggtaaaaccctgtctctactaaaagtacaaaaaattagctgggcgtggtggtgggcacctgtagtcccagctactcgggaggctgaggcaggagaaaggcatgaatccaagaggcagagcttgcagtgagctgagatcacgccattgcactccagcctgggcaacagtgttaagactctgtctcaaatataaataaataaataaataaataaataaataaataaaaataaagcgagatgttgccctcaaa

SEQ ID NO: 14 - DNA, 785 bp, Homo sapiens
  source 1..785: mol_type = unassigned DNA
ggccctgccccgtcggactgcccccagaaagcctcctgccccctgccagtgaagtccttcagtgagcccctccccagccagcccttccctggccccgccggatgtataaatgtaaaaatgaaggaattacattttatatgtgagcgagcaagccggcaagcgagcacagtattatttctccatcccctccctgcctgctccttggcacccccatgctgccttcagggagacaggcagggagggcttggggctgcacctcctaccctcccaccagaacgcaccccactgggagagctggtggtgcagccttcccctccctgtataagacactttgccaaggctctcccctctcgccccatccctgcttgcccgctcccacagcttcctgagggctaattctgggaagggagagttctttgctgcccctgtctggaagacgtggctctgggtgaggtaggcgggaaaggatggagtgttttagttcttgggggaggccaccccaaaccccagccccaactccaggggcacctatgagatggccatgctcaacccccctcccagacaggccctccctgtctccagggcccccaccgaggttcccagggctggagacttcctctggtaaacattcctccagcctcccctcccctggggacgccaaggaggtgggccacacccaggaagggaaagcgggcagccccgttttggggacgtgaacgttttaataatttttgctgaattcctttacaactaaataacacagatattgttataaataaaattgt

SEQ ID NO: 15 - DNA, 3001 bp, Homo sapiens
  source 1..3001: mol_type = unassigned DNA
atattaaggatcaagctgttagctaataatgccacctctgcagttttgggaacaggcaaataaagtatcagtatacatggtgatgtacatctgtagcaaagctcttggagaaaatgaagactgaagaaagcaaagcaaaaactgtatagagagatttttcaaaagcagtaatccctcaattttaaaaaaggattgaaaattctaaatgtctttctgtgcatattttttgtgttaggaatcaaaagtattttataaaaggagaaagaacagcctcattttagatgtagtcctgttggattttttatgcctcctcagtaaccagaaatgttttaaaaaactaagtgtttaggatttcaagacaacattatacatggctctgaaatatctgacacaatgtaaacattgcaggcacctgcattttatgttttttttttcaacaaatgtgactaatttgaaacttttatgaacttctgagctgtccccttgcaattcaaccgcagtttgaattaatcatatcaaatcagttttaattttttaaattgtacttcagagtctatatttcaagggcacattttctcactactattttaatacattaaaggactaaataatctttcagagatgctggaaacaaatcatttgctttatatgtttcattagaataccaatgaaacatacaacttgaaaattagtaatagtatttttgaagatcccatttctaattggagatctctttaatttcgatcaacttataatgtgtagtactatattaagtgcacttgagtggaattcaacatttgactaataaaatgagttcatcatgttggcaagtgatgtggcaattatctctggtgacaaaagagtaaaatcaaatatttctgcctgttacaaatatcaaggaagacctgctactatgaaatagatgacattaatctgtcttcactgtttataatacggatggattttttttcaaatcagtgtgtgttttgaggtcttatgtaattgatgacatttgagagaaatggtggctttttttagctacctctttgttcatttaagcaccagtaaagatcatgtctttttatagaagtgtagattttctttgtgactttgctatcgtgcctaaagctctaaatataggtgaatgtgtgatgaatactcagattatttgtctctctatataattagtttggtactaagtttctcaaaaaattattaacacatgaaagacaatctctaaaccagaaaaagaagtagtacaaattttgttactgtaatgctcgcgtttagtgagtttaaaacacacagtatcttttggttttataatcagtttctattttgctgtgcctgagattaagatctgtgtatgtgtgtgtgtgtgtgtgtgcgtttgtgtgttaaagcagaaaagacttttttaaaagttttaagtgataaatgcaatttgttaattgatcttagatcactagtaaactcagggctgaattataccatgtatattctattagaagaaagtaaacaccatctttattcctgccctttttcttctctcaaagtagttgtagttatatctagaaagaagcaattttgatttcttgaaaaggtagttcctgcactcagtttaaactaaaaataatcatacttggattttatttatttttgtcatagtaaaaattttaatttatatatatttttatttagtattatcttattctttgctatttgccaatcctttgtcatcaattgtgttaaatgaattgaaaattcatgccctgttcattttattttactttattggttaggatatttaaaggatttttgtatatataatttcttaaattaatattccaaaaggttagtggacttagattataaattatggcaaaaatctaaaaacaacaaaaatgatttttatacattctatttcattattcctctttttccaataagtcatacaattggtagatatgacttattttatttttgtattattcactatatctttatgatatttaagtataaataattaaaaaaatttattgtaccttatagtctgtcaccaaaaaaaaaaaattatctgtaggtagtgaaatgctaatgttgatttgtctttaagggcttgttaactatcctttattttctcatttgtcttaaattaggagtttgtgtttaaattactcatctaagcaaaaaatgtatataaatcccattactgggtatatacccaaaggattataaatcatgctgctataaagacacatgcacacgtatgtttattgcagcactattcacaatagcaaagacttggaaccaacccaaatgtccatcaatgatagacttgattaagaaaatgtgcacatatacaccatggaatactatgcagccataaaaaaggatgagttcatgtcctttgtagggacatggataaagctggaaaccatcattctgagcaaactattgcaaggacagaaaaccaaacactgcatgttctcactcataggtgggaattgaacaatgagaacacttggacacaaggtggggaacaccacacaccagggcctgtcatggggtggggggagtggggagggatagcattaggagatatacctaatgtaaatgatgagttaatgggtgcagcacaccaacatggcacatgtatacatatgtagcaaacctgcacgttgtgcacatgtaccctagaacttaaagtataattaaaaaaaaaaagaaaacagaagctatttataaagaagttatttgctgaaataaatgtgatctttcccattaaaaaaataaagaaattttggggtaaaaaaacacaatatattgtattcttgaaaaattctaagagagtggatgtgaagtgttctcaccacaaaagtgataactaattgaggtaatgcacatattaattagaaagattttgtcattccacaatgtatatatacttaaaaatatgttatacacaataaatacatacattaaaaaataagtaaatgta

SEQ ID NO: 16 - DNA, 1037 bp, Homo sapiens
  source 1..1037: mol_type = unassigned DNA
cccaccctgcacgccggcaccaaaccctgtcctcccacccctccccactcatcactaaacagagtaaaatgtgatgcgaattttcccgaccaacctgattcgctagattttttttaaggaaaagcttggaaagccaggacacaacgctgctgcctgctttgtgcagggtcctccggggctcagccctgagttggcatcacctgcgcagggccctctggggctcagccctgagctagtgtcacctgcacagggccctctgaggctcagccctgagctggcgtcacctgtgcagggccctctggggctcagccctgagctggcctcacctgggttccccaccccgggctctcctgccctgccctcctgcccgccctccctcctgcctgcgcagctccttccctaggcacctctgtgctgcatcccaccagcctgagcaagacgccctctcggggcctgtgccgcactagcctccctctcctctgtccccatagctggtttttcccaccaatcctcacctaacagttactttacaattaaactcaaagcaagctcttctcctcagcttggggcagccattggcctctgtctcgttttgggaaaccaaggtcaggaggccgttgcagacataaatctcggcgactcggccccgtctcctgagggtcctgctggtgaccggcctggaccttggccctacagccctggaggccgctgctgaccagcactgaccccgacctcagagagtactcgcaggggcgctggctgcactcaagaccctcgagattaacggtgctaaccccgtctgctcctccctcccgcagagactggggcctggactggacatgagagccccttggtgccacagagggctgtgtcttactagaaacaacgcaaacctctccttcctcagaatagtgatgtgttcgacgttttatcaaaggccccctttctatgttcatgttagttttgctccttctgtgtttttttctgaaccatatccatgttgctgacttttccaaataaaggttttcactcctctc

SEQ ID NO: 17 - DNA, 577 bp, Homo sapiens
  source 1..577: mol_type = unassigned DNA
agaggcctgcctccagggctggactgaggcctgagcgctcctgccgcagagctggccgcgccaaataatgtctctgtgagactcgagaactttcatttttttccaggctggttcggatttggggtggattttggttttgttcccctcctccactctcccccaccccctccccgcccttttttttttttttttttaaactggtattttatctttgattctccttcagccctcacccctggttctcatctttcttgatcaacatcttttcttgcctctgtccccttctctcatctcttagctcccctccaacctggggggcagtggtgtggagaagccacaggcctgagatttcatctgctctccttcctggagcccagaggagggcagcagaagggggtggtgtctccaaccccccagcactgaggaagaacggggctcttctcatttcacccctccctttctcccctgcccccaggactgggccacttctgggtggggcagtgggtcccagattggctcacactgagaatgtaagaactacaaacaaaatttctattaaattaaattttgtgtctcc

SEQ ID NO: 18 - DNA, 2212 bp, Homo sapiens
  source 1..2212: mol_type = unassigned DNA
ctccctccatcccaacctggctccctcccacccaaccaactttccccccaacccggaaacagacaagcaacccaaactgaaccccctcaaaagccaaaaaatgggagacaatttcacatggactttggaaaatatttttttcctttgcattcatctctcaaacttagtttttatctttgaccaaccgaacatgaccaaaaaccaaaagtgcattcaaccttaccaaaaaaaaaaaaaaaaaaagaataaataaataactttttaaaaaaggaagcttggtccacttgcttgaagacccatgcgggggtaagtccctttctgcccgttgggcttatgaaaccccaatgctgccctttctgctcctttctccacaccccccttggggcctcccctccactccttcccaaatctgtctccccagaagacacaggaaacaatgtattgtctgcccagcaatcaaaggcaatgctcaaacacccaagtggcccccaccctcagcccgctcctgcccgcccagcacccccaggccctgggggacctggggttctcagactgccaaagaagccttgccatctggcgctcccatggctcttgcaacatctccccttcgtttttgagggggtcatgccgggggagccaccagcccctcactgggttcggaggagagtcaggaagggccacgacaaagcagaaacatcggatttggggaacgcgtgtcaatcccttgtgccgcagggctgggcgggagagactgttctgttccttgtgtaactgtgttgctgaaagactacctcgttcttgtcttgatgtgtcaccggggcaactgcctgggggcggggatgggggcagggtggaagcggctccccattttataccaaaggtgctacatctatgtgatgggtggggtggggagggaatcactggtgctatagaaattgagatgcccccccaggccagcaaatgttcctttttgttcaaagtctatttttattccttgatatttttctttttttttttttttttttgtggatggggacttgtgaatttttctaaaggtgctatttaacatgggaggagagcgtgtgcggctccagcccagcccgctgctcactttccaccctctctccacctgcctctggcttctcaggcctctgctctccgacctctctcctctgaaaccctcctccacagctgcagcccatcctcccggctccctcctagtctgtcctgcgtcctctgtccccgggtttcagagacaacttcccaaagcacaaagcagtttttccccctaggggtgggaggaagcaaaagactctgtacctattttgtatgtgtataataatttgagatgtttttaattattttgattgctggaataaagcatgtggaaatgacccaaacataatccgcagtggcctcctaatttccttctttggagttgggggaggggtagacatggggaaggggctttggggtgatgggcttgccttccattcctgccctttccctccccactattctcttctagatccctccataaccccactcccctttctctcacccttcttataccgcaaacctttctacttcctctttcattttctattcttgcaatttccttgcaccttttccaaatcctcttctcccctgcaataccatacaggcaatccacgtgcacaacacacacacacactcttcacatctggggttgtccaaacctcatacccactccccttcaagcccatccactctccaccccctggatgccctgcacttggtggcggtgggatgctcatggatactgggagggtgaggggagtggaacccgtgaggaggacctgggggcctctccttgaactgacatgaagggtcatctggcctctgctcccttctcacccacgctgacctcctgccgaaggagcaacgcaacaggagaggggtctgctgagcctggcgagggtctgggagggaccaggaggaaggcgtgctccctgctcgctgtcctggccctgggggagtgagggagacagacacctgggagagctgtggggaaggcactcgcaccgtgctcttgggaaggaaggagacctggccctgctcaccacggactgggtgcctcgacctcctgaatccccagaacacaacccccctgggctggggtggtctggggaaccatcgtgcccccgcctcccgcctactcctttttaagctt

SEQ ID NO: 19 - DNA, 729 bp, Homo sapiens
  source 1..729: mol_type = unassigned DNA
ttggccaggcctgaccctcttggacctttcttctttgccgacaaccactgcccagcagcctctgggacctcggggtcccagggaacccagtccagcctcctggctgttgacttcccattgctcttggagccaccaatcaaagagattcaaagagattcctgcaggccagaggcggaacacacctttatggctggggctctccgtggtgttctggacccagcccctggagacaccattcacttttactgctttgtagtgactcgtgctctccaacctgtcttcctgaaaaaccaaggcccccttcccccacctcttccatggggtgagacttgagcagaacaggggcttccccaagttgcccagaaagactgtctgggtgagaagccatggccagagcttctcccaggcacaggtgttgcaccagggacttctgcttcaagttttggggtaaagacacctggatcagactccaagggctgccctgagtctgggacttctgcctccatggctggtcatgagagcaaaccgtagtcccctggagacagcgactccagagaacctcttgggagacagaagaggcatctgtgcacagctcgatcttctacttgcctgtggggaggggagtgacaggtccacacaccacactgggtcaccctgtcctggatgcctctgaagagagggacagaccgtcagaaactggagagtttctattaaaggtcatttaaacca

SEQ ID NO: 20 - DNA, 847 bp, Homo sapiens
  source 1..847: mol_type = unassigned DNA
tcctccgggaccccagccctcaggattcctgatgctccaaggcgactgatgggcgctggatgaagtggcacagtcagcttccctgggggctggtgtcatgttgggctcctggggcgggggcacggcctggcatttcacgcattgctgccaccccaggtccacctgtctccactttcacagcctccaagtctgtggctcttcccttctgtcctccgaggggcttgccttctctcgtgtccagtgaggtgctcagtgatcggcttaacttagagaagcccgccccctccccttctccgtctgtcccaagagggtctgctctgagcctgcgttcctaggtggctcggcctcagctgcctgggttgtggccgccctagcatcctgtatgcccacagctactggaatccccgctgctgctccgggccaagcttctggttgattaatgagggcatggggtggtccctcaagaccttcccctaccttttgtggaaccagtgatgcctcaaagacagtgtcccctccacagctgggtgccaggggcaggggatcctcagtatagccggtgaaccctgataccaggagcctgggcctccctgaacccctggcttccagccatctcatcgccagcctcctcctggacctcttggcccccagccccttccccacacagccccagaagggtcccagagctgaccccactccaggacctaggcccagcccctcagcctcatctggagcccctgaagaccagtcccacccacctttctggcctcatctgacactgctccgcatcctgctgtgtgtcctgttccatgttccggttccatccaaatacactttctggaacaaa

SEQ ID NO: 21 - DNA, 110 bp, Homo sapiens
  source 1..110: mol_type = unassigned DNA
gctggagcctcggtggccatgcttcttgccccttgggcctccccccagcccctcctccccttcctgcacccgtacccccgtggtctttgaataaagtctgagtgggcggc

SEQ ID NO: 22 - DNA, 27 bp, Homo sapiens
  source 1..27: mol_type = unassigned DNA
ttggaccctcgtacagaagctaatacg

SEQ ID NO: 23 - DNA, 189 bp, Homo sapiens
  source 1..189: mol_type = unassigned DNA
ttttttttttttttttttttttttttttttttttttttttttttttttttttttttttttttttttttttttttttttttttttttttttttttttttttttttttttttttttttttttttttttttttttttttttttttttttttttttttttttttcttcctactcaggctttattcaaagacca

SEQ ID NO: 24 - DNA, 20 bp, Homo sapiens
  source 1..20: mol_type = unassigned DNA
ccttgaccttctggaacttc

SEQ ID NO: 25 - DNA, 20 bp, Homo sapiens
  source 1..20: mol_type = unassigned DNA
ccaagcactgaaacggatat

SEQ ID NO: 26 - DNA, 20 bp, Homo sapiens
  source 1..20: mol_type = unassigned DNA
gatgaaaagtgctccaagga

SEQ ID NO: 27 - DNA, 20 bp, Homo sapiens
  source 1..20: mol_type = unassigned DNA
aaccgtgatgaaaaggtacc

SEQ ID NO: 28 - DNA, 20 bp, Homo sapiens
  source 1..20: mol_type = unassigned DNA
tcatgcagattggaaaggtc

SEQ ID NO: 29 - DNA, 20 bp, Homo sapiens
  source 1..20: mol_type = unassigned DNA
cttcttggactgtccagagg

SEQ ID NO: 30 - DNA, 20 bp, Homo sapiens
  source 1..20: mol_type = unassigned DNA
gcagtccctgatacaagaac

SEQ ID NO: 31 - DNA, 20 bp, Homo sapiens
  source 1..20: mol_type = unassigned DNA
gattgaaggtggctcgctac

SEQ ID NO: 32 - DNA, 75 bp, Homo sapiens
  source 1..75: mol_type = unassigned DNA
atgatgccatcctcagtctcatggggtattttgctcttggcgggtctgtgctgtctcgtgccggtgtcgctcgca

SEQ ID NO: 33 - DNA, 90 bp, Homo sapiens
  source 1..90: mol_type = unassigned DNA
atggccggaccggcgactcagtcgcccatgaaactcatggccctgcagttgttgctttggcactcagccctctggaccgtccaagaggcg

SEQ ID NO: 34 - DNA, 137 bp, Homo sapiens
  source 1..137: mol_type = unassigned DNA
atgcagagagtgaacatgattatggccgagtccccatcgctcatcacaatctgcctgcttggtacctgctttccgccgaatgcactgtctttctggatcacgagaatgcgaataagatcttgaaccgacccaaacgg

SEQ ID NO: 35 - DNA, 63 bp, Homo sapiens
  source 1..63: mol_type = unassigned DNA
atgaaaggatcattgctgttgctcctcgtgtcgaaccttctgctttgccagtccgtagccccc

SEQ ID NO: 36 - DNA, 72 bp, Homo sapiens
  source 1..72: mol_type = unassigned DNA
atgaaatgggtgacgttcatctcactgttgtttttgttctcgtccgcctactccaggggagtattccgccga

SEQ ID NO: 37 - DNA, 63 bp, Homo sapiens
  source 1..63: mol_type = unassigned DNA
atgtggtggcggctctggtggctgctcctgttgctcctcttgctgtggcccatggtgtgggca

SEQ ID NO: 38 - DNA, 95 bp, Homo sapiens
  source 1..95: mol_type = unassigned DNA
tgctctttaacctccgcatcctgttgaataacgctgcgttccgaaatgggcataacttcatggtacgcaacttcagatgcggccagccactccag

SEQ ID NO: 39 - DNA, 87 bp, Homo sapiens
  source 1..87: mol_type = unassigned DNA
atgtccgtcttgacacccctgctcttgagagggctgacggggtccgctagacgcctgccggtaccgcgagcgaagatccactccctg

SEQ ID NO: 40 - DNA, 87 bp, Homo sapiens
  source 1..87: mol_type = unassigned DNA
atgagcgtgctcactccgttgcttcttcgagggcttacgggatcggctcggaggttgcccgtcccgagagcgaagatccattcgttg

SEQ ID NO: 41 - DNA, 175 bp, unidentified
  misc_feature 1..175: note = source = /note="Description of Unknown: Bacterial signal sequence"
  source 1..175: mol_type = unassigned DNA
tgacaaaaataactttatctccccagaattttagaatccaaaaacaggaaaccacactactaaaagaaaaatcaaccgagaaaaattctttagcaaaaagtattctcgcagtaaaaatcacttcatcgaattaaggtcaaaattatcggaacgttttatttcgcataagaacact

SEQ ID NO: 42 - DNA, 69 bp, unidentified
  misc_feature 1..69: note = source = /note="Description of Unknown: Viral signal sequence"
  source 1..69: mol_type = unassigned DNA
atgctgagctttgtggatacccgcaccctgctgctgctggcggtgaccagctgcctggcgacctgccag

SEQ ID NO: 43 - DNA, 96 bp, unidentified
  misc_feature 1..96: note = source = /note="Description of Unknown: Viral signal sequence"
  source 1..96: mol_type = unassigned DNA
atgggcagcagccaggcgccgcgcatgggcagcgtgggcggccatggcctgatggcgctgctgatggcgggcctgattctgccgggcattctggcg

SEQ ID NO: 44 - DNA, 51 bp, unidentified
  misc_feature 1..51: note = source = /note="Description of Unknown: Viral signal sequence"
  source 1..51: mol_type = unassigned DNA
atggcgggcattttttattttctgtttagctttctgtttggcatttgcgat

SEQ ID NO: 45 - DNA, 66 bp, unidentified
  misc_feature 1..66: note = source = /note="Description of Unknown: Viral signal sequence"
  source 1..66: mol_type = unassigned DNA
atggaaaaccgcctgctgcgcgtgtttctggtgtgggcggcgctgaccatggatggcgcgagcgcg

SEQ ID NO: 46 - DNA, 81 bp, unidentified
  misc_feature 1..81: note = source = /note="Description of Unknown: Viral signal sequence"
  source 1..81: mol_type = unassigned DNA
atggcgcgccagggctgctttggcagctatcaggtgattagcctgtttacctttgcgattggcgtgaacctgtgcctgggc

SEQ ID NO: 47 - DNA, 57 bp, unidentified
  misc_feature 1..57: note = source = /note="Description of Unknown: Bacterial signal sequence"
  source 1..57: mol_type = unassigned DNA
atgagccgcctgccggtgctgctgctgctgcagctgctggtgcgcccgggcctgcag

SEQ ID NO: 48 - DNA, 87 bp, unidentified
  misc_feature 1..87: note = source = /note="Description of Unknown: Bacterial signal sequence"
  source 1..87: mol_type = unassigned DNA
atgaaacagcagaaacgcctgtatgcgcgcctgctgaccctgctgtttgcgctgatttttctgctgccgcatagcagcgcgagcgcg

SEQ ID NO: 49 - DNA, 78 bp, Homo sapiens
  source 1..78: mol_type = unassigned DNA
atggcgacgccgctgcctccgccctccccgcggcacctgcggctgctgcggctgctgctctccgccctcgtcctcggc

SEQ ID NO: 50 - DNA, 54 bp, Homo sapiens
  source 1..54: mol_type = unassigned DNA
atgaaggctccgggtcggctcgtgctcatcatcctgtgctccgtggtcttctct

SEQ ID NO: 51 - DNA, 45 bp, Homo sapiens
  source 1..45: mol_type = unassigned DNA
atgcttcagctttggaaacttgttctcctgtgcggcgtgctcact

SEQ ID NO: 52 - DNA, 39 bp, Homo sapiens
  source 1..39: mol_type = unassigned DNA
atgctttatctccagggttggagcatgcctgctgtggca

SEQ ID NO: 53 - DNA, 144 bp, Homo sapiens
  source 1..144: mol_type = unassigned DNA
atggataacgtgcagccgaaaataaaacatcgccccttctgcttcagtgtgaaaggccacgtgaagatgctgcggctggatattatcaactcactggtaacaacagtattcatgctcatcgtatctgtgttggcactgatacca

SEQ ID NO: 54 - DNA, 96 bp, Homo sapiens
  source 1..96: mol_type = unassigned DNA
atgccctgcctagaccaacagctcactgttcatgccctaccctgccctgcccagccctcctctctggccttctgccaagtggggttcttaacagca

SEQ ID NO: 55 - DNA, 138 bp, Homo sapiens
  source 1..138: mol_type = unassigned DNA
atgaaaaccttgttcaatccagcccctgccattgctgacctggatccccagttctacaccctctcagatgtgttctgctgcaatgaaagtgaggctgagattttaactggcctcacggtgggcagcgctgcagatgct

SEQ ID NO: 56 - DNA, 57 bp, Homo sapiens
  source 1..57: mol_type = unassigned DNA
atgaagcctctccttgttgtgtttgtctttcttttcctttgggatccagtgctggca

SEQ ID NO: 57 - DNA, 63 bp, Homo sapiens
  source 1..63: mol_type = unassigned DNA
atgtcctgttccctaaagtttactttgattgtaatttttttttactgttggctttcatccagc

SEQ ID NO: 58 - DNA, 210 bp, Homo sapiens
  source 1..210: mol_type = unassigned DNA
atggttcttactaaacctcttcaaagaaatggcagcatgatgagctttgaaaatgtgaaagaaaagagcagagaaggagggccccatgcacacacacccgaagaagaattgtgtttcgtggtaacacactaccctcaggttcagaccacactcaacctgtttttccatatattcaaggttcttactcaaccactttcccttctgtggggt

SEQ ID NO: 59 - DNA, 96 bp, Homo sapiens
  source 1..96: mol_type = unassigned DNA
atggccaccccgccattccggctgataaggaagatgttttccttcaaggtgagcagatggatggggcttgcctgcttccggtccctggcggcatcc

SEQ ID NO: 60 - DNA, 87 bp, Homo sapiens
  source 1..87: mol_type = unassigned DNA
atgagctttttccaactcctgatgaaaaggaaggaactcattcccttggtggtgttcatgactgtggcggcgggtggagcctcatct

SEQ ID NO: 61 - DNA, 123 bp, Homo sapiens
  source 1..123: mol_type = unassigned DNA
atggtctcagctctgcggggagcacccctgatcagggtgcactcaagccctgtttcttctccttctgtgagtggaccacggaggctggtgagctgcctgtcatcccaaagctcagctctgagc

SEQ ID NO: 62 - DNA, 60 bp, Homo sapiens
  source 1..60: mol_type = unassigned DNA
atgatggggtccccagtgagtcatctgctggccggcttctgtgtgtgggtcgtcttgggc

SEQ ID NO: 63 - DNA, 69 bp, Homo sapiens
  source 1..69: mol_type = unassigned DNA
atggcaagcatggctgccgtgctcacctgggctctggctcttctttcagcgttttcggccacccaggca

SEQ ID NO: 64 - DNA, 135 bp, Homo sapiens
  source 1..135: mol_type = unassigned DNA
atggtgctcatgtggaccagtggtgacgccttcaagacggcctacttcctgctgaagggtgcccctctgcagttctccgtgtgcggcctgctgcaggtgctggtggacctggccatcctggggcaggcctacgcc

SEQ ID NO: 65 - DNA, 204 bp, Homo sapiens
  source 1..204: mol_type = unassigned DNA
atggattttgtcgctggagccatcggaggcgtctgcggtgttgctgtgggctaccccctggacacggtgaaggtcaggatccagacggagccaaagtacacaggcatctggcactgcgtccgggatacgtatcaccgagagcgcgtgtggggcttctaccggggcctctcgctgcccgtgtgcacggtgtccctggtatcttcc

SEQ ID NO: 66 - DNA, 147 bp, Homo sapiens
  source 1..147: mol_type = unassigned DNA
atggagaagcccctcttcccattagtgcctttgcattggtttggctttggctacacagcactggttgtttctggtgggatcgttggctatgtaaaaacaggcagcgtgccgtccctggctgcagggctgctcttcggcagtctagcc

SEQ ID NO: 67 - DNA, 45 bp, Homo sapiens
  source 1..45: mol_type = unassigned DNA
atgggtctgctccttcccctggcactctgcatcctagtcctgtgc

SEQ ID NO: 68 - DNA, 78 bp, Homo sapiens
  source 1..78: mol_type = unassigned DNA
atggggatccagacgagccccgtcctgctggcctccctgggggtggggctggtcactctgctcggcctggctgtgggc

SEQ ID NO: 69 - DNA, 75 bp, Homo sapiens
  source 1..75: mol_type = unassigned DNA
atgtcggacctgctactactgggcctgattgggggcctgactctcttactgctgctgacgctgctagcctttgcc

SEQ ID NO: 70 - DNA, 87 bp, Homo sapiens
  source 1..87: mol_type = unassigned DNA
atggagactgtggtgattgttgccataggtgtgctggccaccatgtttctggcttcgtttgcagccttggtgctggtttgcaggcag

SEQ ID NO: 71 - DNA, 105 bp, Homo sapiens
  source 1..105: mol_type = unassigned DNA
atgcgcggctctgtggagtgcacctggggttgggggcactgtgcccccagccccctgctcctttggactctacttctgtttgcagccccatttggcctgctgggg

SEQ ID NO: 72 - DNA, 171 bp, Homo sapiens
  source 1..171: mol_type = unassigned DNA
atgatgccgtcccgtaccaacctggctactggaatccccagtagtaaagtgaaatattcaaggctctccagcacagacgatggctacattgaccttcagtttaagaaaacccctcctaagatcccttataaggccatcgcacttgccactgtgctgtttttgattggcgcc

SEQ ID NO: 73 - DNA, 108 bp, Homo sapiens
  source 1..108: mol_type = unassigned DNA
atggccctgccccagatgtgtgacgggagccacttggcctccaccctccgctattgcatgacagtcagcggcacagtggttctggtggccgggacgctctgcttcgct

SEQ ID NO: 74 - DNA, 63 bp, unidentified
  misc_feature 1..63: note = source = /note="Description of Unknown: Bacterial signal sequence"
  source 1..63: mol_type = unassigned DNA
tgaaaaagtggttcgttgctgccggcatcggcgctgccggactcatgctctccagcgccgcca

SEQ ID NO: 75 - DNA, 63 bp, unidentified
  misc_feature 1..63: note = source = /note="Description of Unknown: Bacterial signal sequence"
  source 1..63: mol_type = unassigned DNA
atgaaacagagcaccattgcgctggcgctgctgccgctgctgtttaccccggtgaccaaagcg

SEQ ID NO: 76 - DNA, 63 bp, unidentified
  misc_feature 1..63: note = source = /note="Description of Unknown: Bacterial signal sequence"
  source 1..63: mol_type = unassigned DNA
atgaaaaaaaccgcgattgcgattgcggtggcgctggcgggctttgcgaccgtggcgcaggcg

SEQ ID NO: 77 - DNA, 63 bp, unidentified
  misc_feature 1..63: note = source = /note="Description of Unknown: Bacterial signal sequence"
  source 1..63: mol_type = unassigned DNA
atgaaaaaactgatgctggcgattttttttagcgtgctgagctttccgagctttagccagagc

SEQ ID NO: 78 - DNA, 69 bp, unidentified
  misc_feature 1..69: note = source = /note="Description of Unknown: Bacterial signal sequence"
  source 1..69: mol_type = unassigned DNA
atgaaaaaaaacattgcgtttctgctggcgagcatgtttgtgtttagcattgcgaccaacgcgtatgcg

SEQ ID NO: 79 - DNA, 96 bp, Homo sapiens
  source 1..96: mol_type = unassigned DNA
atgtttgcgaaacgctttaaaaccagcctgctgccgctgtttgcgggctttctgctgctgtttcatctggtgctggcgggcccggcggcggcgagc

SEQ ID NO: 80 - DNA, 57 bp, Homo sapiens
  source 1..57: mol_type = unassigned DNA
atgcgctttccgagcatttttaccgcggtgctgtttgcggcgagcagcgcgctggcg

SEQ ID NO: 81 - DNA, 57 bp, Homo sapiens
  source 1..57: mol_type = unassigned DNA
atgcgctttccgagcatttttaccaccgtgctgtttgcggcgagcagcgcgctggcg

SEQ ID NO: 82 - DNA, 57 bp, Homo sapiens
  source 1..57: mol_type = unassigned DNA
atgcgctttccgagcatttttaccagcgtgctgtttgcggcgagcagcgcgctggcg

SEQ ID NO: 83 - DNA, 57 bp, Homo sapiens
  source 1..57: mol_type = unassigned DNA
atgcgctttccgagcatttttacccatgtgctgtttgcggcgagcagcgcgctggcg

SEQ ID NO: 84 - DNA, 57 bp, Homo sapiens
  source 1..57: mol_type = unassigned DNA
atgcgctttccgagcatttttaccattgtgctgtttgcggcgagcagcgcgctggcg

SEQ ID NO: 85 - DNA, 57 bp, Homo sapiens
  source 1..57: mol_type = unassigned DNA
atgcgctttccgagcatttttacctttgtgctgtttgcggcgagcagcgcgctggcg

SEQ ID NO: 86 - DNA, 57 bp, Homo sapiens
  source 1..57: mol_type = unassigned DNA
atgcgctttccgagcatttttaccgaagtgctgtttgcggcgagcagcgcgctggcg

SEQ ID NO: 87 - DNA, 57 bp, Homo sapiens
  source 1..57: mol_type = unassigned DNA
atgcgctttccgagcatttttaccggcgtgctgtttgcggcgagcagcgcgctggcg

SEQ ID NO: 88 - DNA, 63 bp, Homo sapiens
  source 1..63: mol_type = unassigned DNA
atgcgttcctcccccctcctccgctccgccgttgtggccgccctgccggtgttggcccttgcc

SEQ ID NO: 89 - DNA, 66 bp, Homo sapiens
  source 1..66: mol_type = unassigned DNA
atgggcgcggcggccgtgcgctggcacttgtgcgtgctgctggccctgggcacacgcgggcggctg

SEQ ID NO: 90 - DNA, 53 bp, synthetic construct
  misc_feature 1..53: note = source = /note="Description of Artificial Sequence: Synthetic signal sequence"
  source 1..53: mol_type = other DNA
atgaggagctcccttgtgctgttctttgtctctgcgtggacggccttggccag

SEQ ID NO: 91 - DNA, 96 bp, Homo sapiens
  source 1..96: mol_type = unassigned DNA
atgctcaggggtccgggacccgggcggctgctgctgctagcagtcctgtgcctggggacatcggtgcgctgcaccgaaaccgggaagagcaagagg

SEQ ID NO: 92 - DNA, 69 bp, Homo sapiens
  source 1..69: mol_type = unassigned DNA
atgcttaggggtccggggcccgggctgctgctgctggccgtccagctggggacagcggtgccctccacg

SEQ ID NO: 93 - DNA, 93 bp, Homo sapiens
  source 1..93: mol_type = unassigned DNA
atgcgccggggggccctgaccgggctgctcctggtcctgtgcctgagtgttgtgctacgtgcagccccctctgcaacaagcaagaagcgcagg

SEQ ID NO: 94 - protein, 24 aa, Homo sapiens
MMPSSVSWGILLAGLCCLVPVSLA

SEQ ID NO: 95 - protein, 30 aa, Homo sapiens
MAGPATQSPMKLMALQLLLWHSALWTVQEA

SEQ ID NO: 96 - protein, 46 aa, Homo sapiens
MQRVNMIMAESPSLITICLLGYLLSAECTVFLDHENANKILNRPKR

SEQ ID NO: 97 - protein, 21 aa, Homo sapiens
MKGSLLLLLVSNLLLCQSVAP

SEQ ID NO: 98 - protein, 24 aa, Homo sapiens
MKWVTFISLLFLFSSAYSRGVFRR

SEQ ID NO: 99 - protein, 19 aa, Homo sapiens
MWWRLWWLLLLLLLLPMWA

SEQ ID NO: 100 - protein, 32 aa, Homo sapiens
MLFNLRILLNNAAFRNGHNFMVRNFRCGQPLQ

SEQ ID NO: 101 - protein, 29 aa, Homo sapiens
MSVLTPLLLRGLTGSARRLPVPRAKIHSL

SEQ ID NO: 102 - protein, 29 aa, Homo sapiens
MSVLTPLLLRGLTGSARRLPVPRAKIHSL

SEQ ID NO: 103 - protein, 59 aa, unidentified
  REGION 1..59: note = source = /note="Description of Unknown: Bacterial signal sequence"
VTKITLSPQNFRIQKQETTLLKEKSTEKNSLAKSILAVKNHFIELRSKLSERFISHKNT

SEQ ID NO: 104 - protein, 23 aa, unidentified
  REGION 1..23: note = source = /note="Description of Unknown: Viral signal sequence"
MLSFVDTRTLLLLAVTSCLATCQ

SEQ ID NO: 105 - protein, 32 aa, unidentified
  REGION 1..32: note = source = /note="Description of Unknown: Viral signal sequence"
MGSSQAPRMGSVGGHGLMALLMAGLILPGILA

SEQ ID NO: 106 - protein, 17 aa, unidentified
  REGION 1..17: note = source = /note="Description of Unknown: Viral signal sequence"
MAGIFYFLFSFLFGICD

SEQ ID NO: 107 - protein, 22 aa, unidentified
  REGION 1..22: note = source = /note="Description of Unknown: Viral signal sequence"
MENRLLRVFLVWAALTMDGASA

SEQ ID NO: 108 - protein, 27 aa, unidentified
  REGION 1..27: note = source = /note="Description of Unknown: Viral signal sequence"
MARQGCFGSYQVISLFTFAIGVNLCLG

SEQ ID NO: 109 - protein, 19 aa, unidentified
  REGION 1..19: note = source = /note="Description of Unknown: Bacterial signal sequence"
MSRLPVLLLLQLLVRPGLQ

SEQ ID NO: 110 - protein, 29 aa, unidentified
  REGION 1..29: note = source = /note="Description of Unknown: Bacterial signal sequence"
MKQQKRLYARLLTLLFALIFLLPHSSASA

SEQ ID NO: 111 - protein, 22 aa, Homo sapiens
MATPLPPPSPRHLRLLRLLLSG

SEQ ID NO: 112 - protein, 18 aa, Homo sapiens
MKAPGRLVLIILCSVVFS

SEQ ID NO: 113 - protein, 13 aa, Homo sapiens
MLQLWKLLCGVLT

SEQ ID NO: 114 - protein, 13 aa, Homo sapiens
MLYLQGWSMPAVA

SEQ ID NO: 115 - protein, 48 aa, Homo sapiens
MDNVQPKIKHRPFCFSVKGHVKMLRLDIINSLVTTVFMLIVSVLALIP

SEQ ID NO: 116 - protein, 32 aa, Homo sapiens
MPCLDQQLTVHALPCPAQPSSLAFCQVGFLTA

SEQ ID NO: 117 - protein, 46 aa, Homo sapiens
MKTLFNPAPAIADLDPQFYTLSDVFCCNESEAEILTGLTVGSAADA

SEQ ID NO: 118 - protein, 19 aa, Homo sapiens
MKPLLVVFVFLFLWDPVLA

SEQ ID NO: 119 - protein, 21 aa, Homo sapiens [sequence omitted]

SEQ ID NO: 120 - protein, 70 aa, Homo sapiens
MVLTKPLQRNGSMMSFENVKEKSREGGPHAHTPEEELCFVVTHTPQVQTTLNLFFHIFKVLTQPLSLLWG

SEQ ID NO: 121 - protein, 32 aa, Homo sapiens
MATPPFRLIRKMFSFKVSRWMGLACFRSLAAS

SEQ ID NO: 122 - protein, 29 aa, Homo sapiens
MSFFQLLMKRKELIPLVVFMTVAAGGASS

SEQ ID NO: 123 - protein, 41 aa, Homo sapiens
MVSALRGAPLIRVHSSPVSSPSVSGPAALVSCLSSQSSALS

SEQ ID NO: 124 - protein, 20 aa, Homo sapiens
MMGSPVSHLLAGFCVWVVLG

SEQ ID NO: 125 - protein, 23 aa, Homo sapiens
MASMAAVLTWALALLSAFSATQA

SEQ ID NO: 126 - protein, 45 aa, Homo sapiens
MVLMWTSGDAFKTAYFLLKGAPLQFSVCGLLQVLVDLAILGQATA

SEQ ID NO: 127 - protein, 68 aa, Homo sapiens
MDFVAGAIGGVCGVAVGYPLDTVKVRIQTEPLYTGIWHCVRDTYHRERVWGFYRGLSLPVCTVSLVSS

SEQ ID NO: 128 - protein, 49 aa, Homo sapiens
MEKPLFPLVPLHWFGFGYTALVVSGGIVGYVKTGSVPSLAAGLLFGSLA

SEQ ID NO: 129 - protein, 15 aa, Homo sapiens
MGLLLPLALCILVLC

SEQ ID NO: 130 - protein, 26 aa, Homo sapiens
MGIQTSPVLLASLGVGLVTLLGLAVG

SEQ ID NO: 131 - protein, 25 aa, Homo sapiens
MSDLLLLGLIGGLTLLLLLTLLAFA

SEQ ID NO: 132 - protein, 29 aa, Homo sapiens
METVVIVAIGVLATIFLASFAALVLVCRQ

SEQ ID NO: 133 - protein, 35 aa, Homo sapiens
MAGSVECTWGWGHCAPSPLLLWTLLLFAAPFGLLG

SEQ ID NO: 134 - protein, 57 aa, Homo sapiens
MMPSRTNLATGIPSSKVKYSRLSSTDDGYIDLQFKKTPPKIPYKAIALATVLFLIGA

SEQ ID NO: 135 - protein, 36 aa, Homo sapiens
MALPQMCDGSHLASTLRYCMTVSGTVVLVAGTLCFA

SEQ ID NO: 136 - protein, 21 aa, Homo sapiens
MKKWFVAAGIGAGLLMLSSAA

SEQ ID NO: 137 - protein, 21 aa, Homo sapiens
MKQSTIALALLPLLFTPVTKA

SEQ ID NO: 138 - protein, 21 aa, Homo sapiens
MKKTAIAIAVALAGFATVAQA

SEQ ID NO: 139 - protein, 21 aa, unidentified
  REGION 1..21: note = source = /note="Description of Unknown: Bacterial signal sequence"
MKKLMLAIFFSVLSFPSFSQS

SEQ ID NO: 140 - protein, 23 aa, unidentified
  REGION 1..23: note = source = /note="Description of Unknown: Bacterial signal sequence"
MKKNIAFLLASMFVFSIATNAYA

SEQ ID NO: 141 - protein, 32 aa, Homo sapiens
MFAKRFKTSLLPLFAGFLLLFHLVLAGPAAAS

SEQ ID NO: 142 - protein, 19 aa, Homo sapiens
MRFPSIFTAVLFAASSALA

SEQ ID NO: 143 - protein, 19 aa, Homo sapiens
MRFPSIFTTVLFAASSALA

SEQ ID NO: 144 - protein, 19 aa, Homo sapiens
MRFPSIFTSVLFAASSALA

SEQ ID NO: 145 - protein, 19 aa, Homo sapiens
MRFPSIFTHVLFAASSALA

SEQ ID NO: 146 - protein, 19 aa, Homo sapiens
MRFPSIFTIVLFAASSALA

SEQ ID NO: 147 - protein, 19 aa, Homo sapiens
MRFPSIFTFVLFAASSALA

SEQ ID NO: 148 - protein, 19 aa, Homo sapiens
MRFPSIFTEVLFAASSALA

SEQ ID NO: 149 - protein, 19 aa, Homo sapiens
MRFPSIFTGVLFAASSALA

SEQ ID NO: 150 - protein, 21 aa, Homo sapiens
MRSSPLLRSAVVAALPVLALA

SEQ ID NO: 151 - protein, 22 aa, Homo sapiens
MGAAAVRWHLCVLLALGTRGRL

SEQ ID NO: 152 - protein, 17 aa, synthetic construct
  REGION 1..17: note = source = /note="Description of Artificial Sequence: Synthetic signal sequence"
MRSSLVLFFVSAWTALA

SEQ ID NO: 153 - protein, 32 aa, Homo sapiens
MLRGPGPGRLLLLAVLCLGTSVRCTETGKSKR

SEQ ID NO: 154 - protein, 26 aa, Homo sapiens
MLRGPGPGLLLLAVQCLGTAVPSTGA

SEQ ID NO: 155 - protein, 31 aa, Homo sapiens
MRRGALTGLLLVLCLSVVLRAAPSATSKKRR

SEQ ID NO: 156 - DNA, 949 bp, Homo sapiens
  source 1..949: mol_type = genomic DNA
acggcggggcgaagcgcccaggggcctgtgcgtccctccctgctgagcgagggggcctgtcattgccgtgggcgtgacccagaccccaaccacagtgcatcccgccctggcccagccagagaaggaagctgagtctggggtctgctgggccagcaggaagtcccagcagggtgtgaagcaagactttccgggccactcctggaatcccccagcagataaaggcggcccctccaccgggcgctcctagcggtctcccggaccctgccgccctgccactatgtcccgccgctctatgctgcttgcctgggctctccccagcctccttcgactcggagcggctcaggagacagaagacccggcctgctgcagccccatagtgccccggaacgagtggaaggccctggcatcagagtgcgcccagcacctgagcctgcccttacgctatgtggtggtatcgcacacggcgggcagcagctgcaacacccccgcctcgtgccagcagcaggcccggaatgtgcagcactaccacatgaagacactgggctggtgcgacgtgggctacaacttcctgattggagaagacgggctcgtatacgagggccgtggctggaacttcacgggtgcccactcaggtcacttatggaaccccatgtccattggcatcagcttcatgggcaactacatggatcgggtgcccacaccccaggccatccgggcagcccagggtctactggcctgcggtgtggctcagggagccctgaggtccaactatgtgctcaaaggacaccgggatgtgcagcgtacactctctccaggcaaccagctctaccacctcatccagaattggccacactaccgctccccctgaggccctgctgatccgcaccccattcctcccctcccatggccaaaaaccccactgtctccttctccaataaagatgtagctc

SEQ ID NO: 157 - DNA, 1213 bp, Homo sapiens
  source 1..1213: mol_type = genomic DNA
ggctgcaggtgggcgcgcgttgcctaacgaccttccgcgcggacggtgggcaggcgacggcggcgtgtggatggaggccttcgcccttggcccagcgcggcggggcaggcggcggacccgggccgccggctccctgctctctcgggccgccatcctcctctttatctccgccttcctggtgcgggtgccctcatcagttggacacttggttcgattaccaagagcttttcgcttgaccaaagattcagtgaaaatagtgggatcaacaagttttccagtgaaagcgtatgtcatgctccatcaaaagagtccacacgtgttatgtgtaacgcaacaactgcgaaatgctgaactgatagacccatcattccaatggtatgggcctaaaggaaaagttgtttcagtagaaaaccgcactgcacaaataacatccacaggaagccttgtattccaaaattttgaggagagtatgagtggaatttatacatgtttcctcgaatataaacctactgtggaagaaattgttaaacgtcttcaactaaaatatgctatatatgcttatcgtgagcctcattattattatcagttcacagctcgatatcatgcagctccctgcaatagcatttataatatttcttttgagaagaaacttcttcagattttaagcaaactgcttcttgacctttcatgtgaaatttccttacttaagtctgaatgccatcgcgttaaaatgcaaagagctggtttgcaaaatgaattgttctttgcattttcagtttcatctctagacactgaaaaaggacccaagcgatgtacagaccataactgtgaaccttacaaaagactttttaaggctaaaaatctcatagagagattttttaatcaacaagtagaaattcttggcagacgtgcagaacaattacctcaaatatactatattgaaggtactctccaaatggtttggattaatcgctgctttccaggatatggaatgaatgtccagcaacatccaaaatgtcctgagtgctgtgtgatctgcagccctggatcatataacccccgtgatggaattcattgccttcaatgcaatagcagcctggtgtatggagcaaaaacgtgcttataagccattatcttcagttattcagtggtttattaaatgcaaagtatatatttgaaatattaacataataaattattatgccaaaattaa

SEQ ID NO: 158 - DNA, 420 bp, Homo sapiens
  source 1..420: mol_type = genomic DNA
atggaaaccaacgtatttcatcttatgctctgcgtcacttctgctcggactcataaatccacgtctctttgctttggccacttcaactcatatccaagccttcctttaattcatgatttattgctggaaatatcctttcaactctcagcacctcatgaagacgcgcgcttaactccggaggagctagaaagagcttcccttctacagatactgccagagatgctgggtgcagaaagaggggatattctcaggaaagcagactcaagtaccaacatttttaacccaagaggaaatttgagaaagtttcaggatttctctggacaagatcctaacattttactgagtcatcttttggccagaatctggaaaccatacaagaaacgtgagactcctgattgcttctggaaatactgtgtctga

SEQ ID NO: 159 - DNA, 3024 bp, Homo sapiens
  source 1..3024: mol_type = genomic DNA
ggggcgggctcccggccaggcgcggtcgggacgcccgccggtccccaggttcggggcagcgcgcagcgcgggtccgcggcggcttatcctttttcgcgacccggcctggcagcgccgcgctccgcttggagggcactcggcggcagagttccgcgctgggaggggtgaggggaccagccgcctcctctgcggactcagatcgagcaggagagagtgggcgcggagctggggccagcgcagggccgtgggctcctctctgggcacgcatcctttacgccacgggctttcaggggctgaggggcctcgaaccttgccaatcaccagtgctgtgcgccccgcttgctttggggtgcgttaaacgtcaggagagagctgctcagatggggtcaccagacgccttctcccccttttctcggagcccgcgggttgcgcgataagccaacccagccggacgctgcgctcctataaatagagcgcgtgtgcccgcttcgcgctctccgggctgcacgagggacgagaaagttgtgcgcagggactgggggcgggcggccaggcaggagaggaccccgccggaccagccgccctgaacgctgcgcccggcgccctggacctgatcctgcgaatccgcgctttcggtgcgagggacctggctagccgctgcctccctccctacctctgggtgacaccaggtttgggggatttttttgaccaggcgaaagtgggagtcgctggcgtcctggccatgaacacagcctcgcgttcttctcagcctgggaaggaccttctgcctctgtaactcgtccctgccgcaagccagacaggactggcacccgcgccgctgggcacccgccacccttgtggcttctctttgagtcccctctttttgttcctgctccgtggtttagctggtggtgcttgagtttggggtgagaatttattattattattattttttgccttgaggtgtgaatgtgagggtttgatgactttcagatgtctaggaaccagagtgggtgcaggggccccaggcagggctgattcttgggcggaggagagtagggtaaagggtgctgcatgagctccttaaaggacaaaggtaacagagccagcgagagagctcgaggggagactttgacttcaagccacagaattggtggaagtgtgcgcgccgccgccgccgtcgctcctgcagcgctgtcgacctagccgctagcatcttcccgagcaccgggatcccggggtaggaggcgacgcgggcgagcaccagcgccagccggctgcggctgcccacacggctcaccatgggctccgggcgccgggcgctgtccgcggtgccggccgtgctgctggtcctcacgctgccggggctgcccgtctgggcacagaacgacacggagcccatcgtgctggagggcaagtgtctggtggtgtgcgactcgaacccggccacggactccaagggctcctcttcctccccgctggggatatcggtccgggcggccaactccaaggtcgccttctcggcggtgcggagcaccaaccacgagccatccgagatgagcaacaagacgcgcatcatttacttcgatcagatcctggtgaatgtgggtaattttttcacattggagtctgtctttgtagcaccaagaaaaggaatttacagtttcagttttcacgtgattaaagtctaccagagccaaactatccaggttaacttgatgttaaatggaaaaccagtaatatctgcctttgcgggggacaaagatgttactcgtgaagctgccacgaatggtgtcctgctctacctagataaagaggataaggtttacctaaaactggagaaaggtaatttggttggaggctggcagtattccacgttttctggctttctggtgttccccctataggattcaatttctccatgatgttcatccaggtgagggatgacccactcctgagttattggaagatcattttttcatcattggattgatgtcttttattggtttctcatgggtggatatggattctaaggattctagcctgtctgaaccaatacaaaatttcacagattatttgtgtgtgtctgtttcagtatatttggattgggactctaagcagataatacctatgcttaaatgtaacagtcaaaagctgtctgcaagacttattctgaatttcatttcctgggattactgaattagttacagatgtggaattttatttgtttagttttaaaagactggcaaccaggtctaaggattagaaaactctaaagttctgacttcaatcaacggttagtgtgatactgccaaagaactgtatactgtgttaatatattgattatatttgtttttattcctttggaattagtttgtttggttcttgtaaaaaacttggattttttttttcagtaactggtattatgttttctcttaaaataaggtaatgaatggcttgcccacaaatttaccttgactacgatatcatcgacatgacttctctcaaaaaaaaagaatgcttcatagttgtattttaattgtatatgtgaaagagtcatattttccaagttatattttctaagaagaagaatagatcataaatctgacaaggaaaaagttgcttacccaaaatctaagtgctcaatccctgagcctcagcaaaacagctcccctccgagggaaatcttatactttattgctcaactttaattaaaatgattgataataaccactttattaaaaacctaaggttttttttttttccgtagacatgaccactttattaactggtggtgggatgctgttgtttctaattatacctatttttcaaggcttctgttgtatttgaagtatcatctggttttgccttaactctttaaattgtatatatttatctgtttagctaatattaaattcaaatatcccatatctaaatttagtgcaatatcttgtcttttgtataggtcatatgaattcataaaattatttatgtctgttatagaataaagattaatatatgtta

SEQ ID NO: 160 - DNA, 264 bp, Homo sapiens
  source 1..264: mol_type = genomic DNA
atgaaggtgctgagggcctggctcctgtgcctgctgatgctgggcctggccctgcggggagctgcaagtcgtacccatcggcactccatggagatccgcacccctgacatcaatcctgcctggtacgccagtcgcgggatcaggcctgtgggccgcttcggtcggaggagggcaaccctgggggacgtccccaagcctggcctgcgaccccggctgacctgcttccccctggaaggcggtgctatgtcgtcccaggatggctga

SEQ ID NO: 161 - DNA, 5724 bp, Homo sapiens
  source 1..5724: mol_type = genomic DNA
gctcccggccagctgcgagtcttggctcccggacttgtctcgtcgcgtcggagaaatcgccccccagcgccgctctcccgcccgggggtcttggttccgagctcgcgcggccgggagtcgcctcggtcttccttggggcgcgcgcagatgtgagcgtgcgagagttgtgtaggggattttgttccctccgaaactgagacccagggcgcccagtgggcacccgtgccttgactctgtcctttctgcagccgctggtccgagctgtctggcctcagtttccctccgacttttctccgctctgccagccctcactgctgcccgtcattgttctcgcagttagatgggggtgctttgtgacggctgccaagttggggtgtgttctctttattccgtttttcaaacagaacaaggcctccaaggctgaccccagacaacccaccccctcggaccctaattcaccttattgcactgattttttttatcaagtcgtattttattgtacaggagccacgccctgatttcttaaaggcgccttgcactctggccatgtgttatctctgcagccggtgtgtgggaggcctcttgtgagccagttgttttcccgcctccaccacccccctcgaagatttagggatgccaggggggaagaaggtggctgggggtggcagcagcggtgccactccaacgtccgctgcggccaccgccccctctggggtcaggcgtttggagaccagcgaaggaacctcagcccagagagatgaggagccagaagaggaaggggaagaggacctgcgagacggaggcgtccccttctttgtcaaccggggtgggctacctgtggatgaggccacctgggaaaggatgtggaaacacgtggccaagatccaccccgatggagagaaggtggcgcaacggatccgtggggccacagacctgcccaagatccccataccgagtgtgcctacgttccagccgtctacacctgtccctgagcgcctggaagctgtgcagcgctacatcagagagctgcagtacaatcacacagggacacagttctttgaaattaagaagagcagacctctgacagggctgatggacctggccaaggaaatgaccaaagaggccctgccaatcaaatgcctggaagccgtgatcctgggaatttacctcaccaacagcatgcccaccctggagcgcttccccatcagcttcaagacctacttctcagggaactacttccgccacatcgtgctgggggtgaacttcgcgggccgctacggtgcgctgggcatgagtcggcgcgaggacctgatgtacaagccgcccgccttccgcacgctcagcgagctcgtgctggacttcgaggccgcctacggccgctgctggcacgtgctcaagaaggtgaagctgggccagagcgtgtcacacgacccgcacagcgtggagcagatcgagtggaagcactcggtgctggacgtggagcgcctgggccgcgatgacttccgcaaggagctggagcgccacgcccgcgacatgcggctcaagattggcaaagggacgggccctccctctcccaccaaggaccggaagaaggatgtttcttccccgcagcgggcccagtccagcccccaccgcaggaacagccgcagtgaaagacggccctcgggtgacaagaagacttccgagcccaaagccatgccagaccttaacgggtaccagatccgggtctgaggcggatgccagcaccccaggccccacccactcttgggggccaggatccacctgctggaaccagccttatgcatggggaaggcggggctggtgacaaggcagggcaagaggctgcaggaagagtgtgttccagctcagccccccaagctgctctcgctcccactgagccaagccccctaactttgggcctagaggccgttagtattttatttggagtttttaactctacaactgaagtttaaggtatttggggaaaacttagtccaaatggatctgctgatggtgggaaggccagtgcttaacaaatccatgtgtcatggggccaggtgagggaaactgctggttctgctggtgcctctgcccctggcttctctctgggagttgggtgcatcttatcagtgggaaatctcccagccttaccaggcctgtgatggggggtgggggtggggtggagatgtttctccagttctgcctgccctggcagaatcttgacccagggaaagggaagcagggtaggagtccttctgagaaaggtctgtgtagcccattaaccaggagcttggcacaggccacatctgccccaagagcatgagctcgtggctcaggagagccttcaggcccttgaggcccccatgggcagtgctgtgtgggcagaggaggggtgatatgagagcgagcccagggaaggacctctgggcaaaaagttcccaggccctaactgcgtctacttgctcagtcccagctctgcctgttgctctagcccacaggctccctgcggagggtctgggcttggcggaggacccagaatggcactgaggccagcatggctgtgggagttgagcaaaccctgggtgccagtccaggagctgtggctggacatggggtgatggggcgggatgcttgggcctgggtctctccgccagcagtgccaggagcccttgctggggaaatcaagaccagactaggatgcttctgccccaggcctgccttccattctttaacagcccatcttggcttggggttgcaatgatggctgggccagtcacttgtggcagggcatcagggccctggcagggaagaacctaggcacctggggttgtccccagcctgcccgtcagcatgagatacccagtgggaaagtgagaggatgcggagaggttggcagagccaggggtaggttctggaggctcaagcaacaaggaggtgcaggtaaagggtgcagtgcagccactgagggacagctgggaactgggggatgcaagtgagaaagggatgtgggggagagttcaggatcaggctgcttgaggagtaatgggttacctacagcagagacgagatggctgtttgtcaggaggcggtagaaaggtagaaaggattcagattgtggaagggtaaacggatgagatgaccattaaggttttgttttactgagaggctgtaagtctgccagggacagctgtcagtaaggctgcagaagggctggggggctacacaaggaagagcagaactagggttgtaagctcaaatgacgagcaaacggtgagaaggaggcctgaagggctgtgtggggactatggctacctgaagagggcacaccctgttaaaggggccacagctgctcagctgttcttacagtgccggccctgtgttgccagattgtctgctttgtcagaggccagaattctgactttttatgtgaaataggatttttaaatgctggtgatcacttaaaaaaaacttaaaaacccaatactggcaaaagaggatgccagtttgcaatccctgaagtagagagagctcgtgctggggagaagtccaccaagatgctttgaggcgggctgtagcaaagtcctgtttctcagagctgggctgggctggggtaggatccttgcagctgaggaggaggaaaagccactgagtctcctcccagagcgggacaaaccagaggccctttgcagttgctgggtcaccagcgggggtggcgcatggagtacagacagtgtagctcttggcctgccagggagacggatggtgcctttgaagcaaagaggaagggaaggcagaaccagggatgcctttgctgatgagagtgcctgtcagggaaggcgccacaggctggcagctcttcaaaccagcagcgcttgacccagagccagatccagcatggcctggccagaggcaccctgggaggccagctggtcagtcccttgcctccccaagttccccctggggtcaatgagccctgggaggatgcctaacctaactccagccagactaataggggcatggtgacccttgactcaccatcccatcccagctttcagggagtgggggtagtgtggtctccatgttcctactatgcctaagaagagatggctcaccttgggaggtgccaggctgaaactaggtcctttccgggtctggatgctgccgctcaggagcaggggcgtggcctcagctgcctctgggagcttcccgggaatgacagggtttgaggggagtagatatgagagggagccgctcctggttctggagtcttaggaggttccaacttgcaggatcctttcccagagccctccatggagaaaacagcaaaatgaagcccttacctgcttgctgtctgcaagggagggagccgagccccagctgataatcccccagcactcacccttcctgagctgagacttcggggctgtggagaccagcacaggacatagtggtgctttttaaatttatttttaactgtttctcatatgtagcaacccctcctcccctcctgggcatgtttacacaggctctgctctgggggctggcctggctgtgaggtttctggggaggcagagaggcagggactttggggccttagtcaccatccatggtatcacctcatctcacttcctgtgagggacagggcctggctgatgtgatcccagctccccccagttcaggactgtctttcagctcctttgcccctggaggtgggggctgctggctgaggaggggtcaaggtgagttcaagaaagctacctgtggaaaatggaccaggttgggggggtgattgcaaagtctccccaaagcctggctcctcatgctcagtgccaggggcagaacactggggagccaggtatagagagccttcctgtcataactgccagtcctcttcctccaaggcctctgcatattctcatgttcccctcacccatcatgccagccacccctatccctcttctagcagggccaagatggggacagcagcagccctctggccttgggatgtgatgataaagcaagcctagggccagggtttggggagcagagagagccaagaagttgaccacgtgtgatttccagcccttcccactgggacttgacttcccaggtcaaggagtccgtctcattctggctggtcgagtgaccagaggcctgtgtgaatgtgtgcacctgcttttcctgcctggaatgttttctggctcagctgcagcaacatctgtgagcccagtgtctgccctgtgtccctgggctcgctccaagtgcaggaacatacatgcagggcccaacatgatgatggtgtgaagggcaggaaacagtcctctgaaggagtggggaggtgggcagtctgcccccgccaggtaccatcgcctcctgccagcttccttagaccaggcagggctgccatggtgctagctgcaagtccatcagtattgaccgtctcgctccatcttggtcctccggagtcccaagtttccttttcatcaaatctgacaagagagaagaaacatgggtgtgcttggcccacagggcctggtggtgatggacctccccgctccctcaagctctggatggctgcagtgttgtactagactttgttcaggctgttctcatctcagtattgccccttcctttcactttcacacttcatctcattcctgttgtcactttccccgaaacgaataaagtctccccagctcctgctgtgtaggctgggcagaaacc

SEQ ID NO: 162 - DNA, 1898 bp, Homo sapiens
  source 1..1898: mol_type = genomic DNA
aaaacacttgcaaccacaagcaaactcgccgctccctgggtcccttcccagtggactctgcacattgggagccttataaagtagcctctgcatctgcctgcctcgggcagaggagggctaccctggggctgagagttcacctgtctcaggaaccacctgagcccacagatcctgtgggcagcggccagggcagccatggcttgggcaagtaggctgggcctgctgctggcactgctgctgcccgtggtcggtgcctccacgccaggcaccgtggtccgactcaacaaggcagcattgagctacgtgtctgaaattgggaaagcccctctccagcgggccctgcaggtcactgtccctcatttcctggactggagtggagaggcgcttcagcccaccaggatccggattctgaatgtccatgtgccccgcctccacctgaaattcattgctggtttcggagtgcgcctgctggcagcagctaattttactttcaaggtctttcgcgccccagagcccctggagctgacgctgcctgtggaactgctggctgacacccgcgtgacccagagctccatcaggacccctgtggtcagcatctctgcctgctctttattctcgggccacgccaacgagtttgatggcagtaacagcacctcccacgcgctgctggtcctggtgcagaagcacattaaagctgtcttgagtaacaagctgtgcctgagcatctccaacctggtgcagggtgtcaatgtccacctgggcaccttaattggcctcaaccccgtgggtcctgagtcccagatccgctattccatggtcagtgtgcccactgtcaccagtgactacatttccctggaagtcaatgctgttctcttcctgctgggcaagcccatcatcctgcccacggatgccaccccttttgtgttgccaaggcatgtgggtaccgagggctccatggccaccgtgggcctctcccagcagctgtttgactctgcgctcctgctgctgcagaaggccggtgccctcaacctggacatcacagggcagctgaggtcggatgacaacctgctgaacacctctgctctgggccggctcatcccggaggtggcccgccagtttcccgagcccatgcctgtggtgctcaaggtgcggctgggtgccacacctgtggccatgctccacacaaacaacgccaccctgcggctgcagcccttcgtggaggtcctggccacagcctccaactcggctttccagtccctcttctccctggatgtggtagtgaacttgagactccagctctctgtgtccaaggtgaagcttcaggggaccacgtctgtgctgggggatgtccagctcacggtggcctcctccaacgtgggcttcattgatacagatcaggtgcgcacactgatgggcaccgtttttgagaagcccctgctggaccatctcaatgctctcttggccatgggaattgccctccctggtgtggtcaacctccactatgtcgcccctgagatctttgtctatgagggctacgtggtgatatccagtggactcttctaccagagctgaggcaagaccactgggaggcctgagagtgggccagctcgctgctcaggcgaatttctcatttcaagccactggggaaactgaggcaaaaccatacttagtcatcaccaacaagctggactgcttagctgggctgttttatcttccctgagtgcctgggtctccctccctcacttctgccctttcccttcctcctcctcttctcctccctcttccctcatctcccccctccttcctctgccccaccccagcggggagcagactgctcctccaggctgtatagacctgccctcttgcattaaacaacttctcttgagctgcaactttca

SEQ ID NO: 163 - DNA, 5954 bp, Homo sapiens
  source 1..5954: mol_type = genomic DNA
cttcgggggcgagcgcgcgtgtgtgtgagtgcgcgccggccagcgcgccttctgcggcaggcggacagatcctcggcgcggcagggccggggcaagctggacgcagcatgatgcgcgcagtgtgggaggcgctggcggcgctggcggcggtggcgtgcctggtgggcgcggtgcgcggcgggcccgggctcagcatgttcgcgggccaggcggcgcagcccgatccctgctcggacgagaacggccacccgcgccgctgcatcccggactttgtcaatgcggccttcggcaaggacgtgcgcgtgtccagcacctgcggccggcccccggcgcgctactgcgtggtgagcgagcgcggcgaggagcggctgcgctcgtgccacctctgcaacgcgtccgaccccaagaaggcgcacccgcccgccttcctcaccgacctcaacaacccgcacaacctgacgtgctggcagtccgagaactacctgcagttcccgcacaacgtcacgctcacactgtccctcggcaagaagttcgaagtgacctacgtgagcctgcagttctgctcgccgcggcccgagtccatggccatctacaagtccatggactacgggcgcacgtgggtgcccttccagttctactccacgcagtgccgcaagatgtacaaccggccgcaccgcgcgcccatcaccaagcagaacgagcaggaggccgtgtgcaccgactcgcacaccgacatgcgcccgctctcgggcggcctcatcgccttcagcacgctggacgggcggccctcggcgcacgacttcgacaactcgcccgtgctgcaggactgggtcacggccacagacatccgcgtggccttcagccgcctgcacacgttcggcgacgagaacgaggacgactcggagctggcgcgcgactcgtacttctacgcggtgtccgacctgcaggtgggcggccggtgcaagtgcaacggccacgcggcccgctgcgtgcgcgaccgcgacgacagcctggtgtgcgactgcaggcacaacacggccggcccggagtgcgaccgctgcaagcccttccactacgaccggccctggcagcgcgccacagcccgcgaagccaacgagtgcgtggcctgtaactgcaacctgcatgcccggcgctgccgcttcaacatggagctctacaagctttcggggcgcaagagcggaggtgtctgcctcaactgtcgccacaacaccgccggccgccactgccattactgcaaggagggctactaccgcgacatgggcaagcccatcacccaccggaaggcctgcaaagcctgtgattgccaccctgtgggtgctgctggcaaaacctgcaaccaaaccaccggccagtgtccctgcaaggacggcgtgacgggtatcacctgcaaccgctgcgccaaaggctaccagcagagccgctctcccatcgccccctgcataaagatccctgtagcgccgccgacgactgcagccagcagcgtggaggagcctgaagactgcgattcctactgcaaggcctccaaggggaagctgaagattaacatgaaaaagtactgcaagaaggactatgccgtccagatccacatcctgaaggcggacaaggcgggggactggtggaagttcacggtgaacatcatctccgtgtataagcagggcacgagccgcatccgccgcggtgaccagagcctgtggatccgctcgcgggacatcgcctgcaagtgtcccaaaatcaagcccctcaagaagtacctgctgctgggcaacgcggaggactctccggaccagagcggcatcgtggccgataaaagcagcctggtgatccagtggcgggacacgtgggcgcggcggctgcgcaagttccagcagcgtgagaagaagggcaagtgcaagaaggcctagcgccgaggcagcgggcgggcgggcgggcgggcgccagggcggggccgagcgagagcgggcgccttggcccggccgccgcggacttggcccgcgagggctttcccaggtggggggagggagggggcggggccgcacggcgcggggggcgggaccctcggcggcccctccccctacccccaccctgcgcgctctgggcgggagccgcgtgcacgcggggcggggtgcgccgccggccgggccctggagaaatgacgagacgtagctacctcacggggctccttccagagcagagacgcgcttccctgggcctgggcgcggccgccgtggaggggctgggggcagcctgccctggggcccgggggcgggcgcagaatcgcacaactggggccccaggcgcggggcgtggatggcgcggagacgtggacgggaggagaactgtgaattctcaagcccgtagtgtgggcggggcgcggagcacccaccaaaccaccacccgacacgcagccgacgggatccccccctttctccccggccccttctagcagttccccgcgggccacctggctgtcacagcctggactcctccatctgaaggggcctggcagcatttggggagtggacagctcctgtccagccagcatgccccaggcggcctctgtctccactgctacctgctgagtgggtcctactgggtgggggcttggggtcggtgagtggttcacctgtggagagaggagaggaagcccctgctgctgcctgtctctgcccctgcccctgcccctgcccagcgtggggctggcccatccggaaggcagtgggcccagggacacccctgagaagcccaagccgggtggtcaccgcctcatgctggagctgcctgttggaggaggcatcgcaaacgcaaaacctcccagagagtttccttttggaaacttggaaccagccctttttatgacgttttccagggggagggggaggggcactggctgggtttacggcagtgacactatttatgtaaatgacatcagctcccgcaaggcccctcagcaatgtcaacagctggaaagggcctgaacgggcttggagtctgcaggctgcgaaggcacttgggcctggcttggggccgggggcttgtttgagctgggatggggtttgctggctcagtgaagtaccagagtgcctgagccatgggtgggcaggggcacaggaatgaccaggttcctgggggccaaggaggccatgctggcttctccaagggaaggcacagaggctgccggcctgccccctacagctgtcttgggtctggcctgggccacaccttgaccgtgcctttccagacggtctttgtggagtctgcccgtgccctccactgtgccccagccctccttccaaaatctcctagagacacggtcctcaagcaggcagccccttttgttctgacctcctcacacagggtccattcctgtgccctggggcctcctggctccctgccttcctgggctctctgcactgcccgggcctctggcccacatcctcacacccggcgcactgaattaagaggcctggctcccctcacagtcaggaaattggtttcactttcccggccagagtttggctgctcaaaagggtcataccaagtatgaagctcggcccccggtggtctggcttccctccgccttccccacatttacccgcatcacggctgccatttattgagcacctgctgtgtgccaggcactttacccacatgctcccagtgtgtactcatgacaaccctgtgggacagggactcattatcaccagcaaggagactggagtacacgtgcccaaggtcatgctgcaaattggtggcaggactggggctcaaactccagagcccgactttctgaccaggggccacgctggccctcactgcactccagctctgcagcctacccgcccaatccctgtgcaggctgggagggtgctcttgggggagtggccaccgagcccctggccctggttactgcctcttgaggacactggcatctgggctggagaacaggagcccggggtggggtagggcatggggacaatcacatcttcagaggaggcagcaaagtggtgcgggatgcagggacggacttgccagatggcagctccaggttccaggaaggcaggccttggatgctccgaagaggtggtagaaaggtgtttttagaaaggtgttttggctgcctcagggtggttggagagactccaggagagactggcagaggtgcctcaggggcagggagcagacagacctgccctgggaaggggcatttggcttccctgaatccagcccaaggctagaagacagggcccctctccaagctgtcagcgcccctcggatgcccagtgtggtgtgctgggcgccatcagcatcacaaggcactacgctgctggggcggttgtcctatttctgtctatgccagtgtggtttcttcaccctgcccagaagggctgtggcagccccacgatatcccaccctgggtctgggtctcacgggtgtcctgtgaggggcttgcatttgtggtggtctctgaggccacctcagcaacggagctggcgacacgccaagcaacaaggcatcttgcggaaaattcagccagtgtcctgcccctcccttcggctcagcaccccgcagggcacaggctgtccgcccggtggtctggcccttggggaatgcgtcagggtgaccagatccaccatgctagcagccaggtcactgttgggattgcacggtcgtcacgagctgcctttcctatccacacacccagccaggacccagcccaccactcccgactgcagccccggcctctgcggtgagcaccatccttgggaaagcacccctcctccactccggtgccccactccaaggagcagagggaaatgggaattgaggtgtcccggtttgtacagttaggaagggatgtaaaacggaactagattttgattttgaagagtgtattaaccagaattgtgctatgtaggtgtttgtttgaagaaaaacataccagattagtctttgtttttgaaacagcttccccagttgtcctttttcttaccagctgggtggtctggtgcccctgacagctgagtgcctgctttacggacacgcagtaatgccgaagatttgcgggggaggacatagggctgtccccgggattcacctgctggctgtggtctctgcccactgcttctgtccttggaaagcagggcaggaggcagcatccccaggggcctctatgtgggagggagggacacctggggtcacaacccagggagggagggtcacagcccagggaggctgggagctgctccaaggccctggaactctgcctcagtcgcggcatgctggagaggggtacggacttactttcttggagttgtcccaggttggaatgagactgaactcaagaagagaccctaagggactggggaatggttcctgccttcaggaaagtgaaagacgcttaggctgtcaacacttaaaggaagtccccttgaagcccagagtggacagactagacccattgatggggccactggccatggtccgtggacaagacattcctgtgggccatggcacaccgggggggatcaaaatgtgtacttgtggggtctcgccccttgccaaaagccaaaccagtcccactcctgtcattggacgtttcttcccattccctcctcccaaatgcacttcccctcctccctctgccccctcctgtgttttggatttctgttcactcagaattgtaaatgtttagttgtgaccatgacgtattgtttgggtcaatgtccctttccaatgcatactaatatattatggttattatatatgaatatatttaatgacatggaaaaagttgtggattttctttctttccttttttttgggggggggtggggggttggttagagttgtaatggacccagatggaacttgtaatgtgggccccacatgatagaactaaattcagatatcattaaataaactcttgtacacta

SEQ ID NO: 164 - DNA, 2599 bp, Homo sapiens
  source 1..2599: mol_type = genomic DNA
tcccccctcttaaaacacgatgcctcccaggatgctagtggcaccactgccactgcatttcctgttggcagcagtgagcagtgaaaaccgaagcggcagaaggcagtggcagcaggcagtggcagcaggcagtggcccaggcagaaatagctcccgcgcgattcactggagccttccccgggccctggtcccggctaccgggactcgcgcgtccggatctcaaaagcggcagaggccaccgaagggacaggaagcactttggtccagaccacactcccggcacagtgcggaaagagccggcgggagccactctgatcccggacgcctcagcgcccccttgggcttgggcttgccctcgggccggggaaggctgaccgcgatgccaggacgcgctcccctccgcaccgtcccgggcgccctgggtgcctggctgctgggcggcctctgggcctggaccctgtgcggcctgtgcagcctgggggcggtgggagccccgcgcccgtgccaggcgccgcagcagtgggaggggcgccaggttatgtaccagcaaagtagcgggcgcaacagccgcgccctgctctcctacgacgggctcaaccagcgcgtgcgggtgctggacgagaggaaggcgctgatcccctgcaagagattatttgaatatattttgctgtataaggatggagtgatgtttcagattgaccaagccaccaagcagtgctcaaagatgaccctgacacagccctgggatcctcttgacattcctcaaaactccacctttgaagaccagtactccatcggggggcctcaggagcagatcaccgtccaggagtggtcggacagaaagtcagctagatcctatgaaacctggattggcatctatacagtcaaggattgctatcctgtccaggaaacctttaccataaactacagtgtgatattgtctacgcggttttttgacatccagctgggtattaaagacccctcggtgtttacccctccaagcacgtgccagatggcccaactggagaagatgagcgaagactgctcctggtgagcctgtgcatagggaagcggcagcatcggatgtcagccccctgcggccccagctggagatggatatgagactagtcaagatgtgaatgctaattggagagaaatataattttaggaagatgcacattgatgtggggttttgatgtgtctgattttgactactcaagctctgtttacagaagaaaattgaatggcgagggtgtggccatatgaactgactagatggctaatatggacactttgggtatttctaatgcctgttcagggctggttttctgcatgcacgggtatacacataatgcagtgccatgcacatagggaagggtcagtaagagaagtttgccttggcagcaagtatttattgttgacattattcagaattagtgataataaaaagcagagtgattttggtcaattttattattaattcttaaattccctgcagagaatgccccctttattgctgcaccagggttggcattgctcccactgagccctactccaccctgtccctgcactcccttggttgccaaaaaaatgataacttaaatcccttccagacttaagaattttatggcatggcccaattgatataaacatttagaaggaaatgaaaagctaaaataggaagtaattattcctctaaagaaacattttgagcaaggcagtttagagaatcctaatgtctacactggcatagcacgagccatgtaagcttcttttttttctatgcaagagtattgatgtatgtgctgaatcttcacagacttgtcaatacacaggcagtattctaaaatagcactgaacagggagtcaggagactattgtctcctaaacccaggactagagttccctcgtactgtcactcctttggtcattaaatgcactgggcttgcccgcactttggccttcctagaacactgcttcataacctctctgtctgacttctgcatctccttccaggtcagctcattcacaagagttgctcccaagcctggatgagttgcaccttgcatcttgagcatgcatttctcacaataattattaagctgtgtgataatttctgctttcaggacactcatccattatcttggctgtgagctccttgggtacgggtaccttgtatgtttacttttatatccctagcacaaagcaagtgcctggcacatagtcagtgccctaagtattcgtagagtgaagaatgccagcctctcttgtccctggtttccttatgtgttgaatgtggttgagtttgtccattgctagggagagacttccagtaataaaatttactattctagatgcttctactgttatgttttatctgcccatttatctttcttagttaccaggagaaatgtgtgacacctatattataatgaaaacaatctcattacttatagtttatctatattaaacaaatttaattgcattttaaagcattctttgatactgttgcttttgcaataaatatggataatcttggttataagggagttaaaacaatgctgtaataaataaagtgcttcatgtgatcaaaatcaaa

SEQ ID NO: 165 - DNA, 6645 bp, Homo sapiens
  source 1..6645: mol_type = genomic DNA
atgggcttcttgcccaagcttctcctcctggcctcattcttcccagcaggccaggcctcatggggcgtctccagtccccaggacgtgcagggtgtgaaggggtcttgcctgcttatcccctgcatcttcagcttccctgccgacgtggaggtgcccgacggcatcacggccatctggtactacgactactcgggccagcggcaggtggtgagccactcggcggaccccaagctggtggaggcccgcttccgcggccgcaccgagttcatggggaaccccgagcacagggtgtgcaacctgctgctgaaggacctgcagcccgaggactctggttcctacaacttccgcttcgagatcagtgaggtcaaccgctggtcagatgtgaaaggcaccttggtcacagtaacagaggagcccagggtgcccaccattgcctccccggtggagcttctcgagggcacagaggtggacttcaactgctccactccctacgtatgcctgcaggagcaggtcagactgcagtggcaaggccaggaccctgctcgctctgtcaccttcaacagccagaagtttgagcccaccggcgtcggccacctggagaccctccacatggccatgtcctggcaggaccacggccggatcctgcgctgccagctctccgtggccaatcacagggctcagagcgagattcacctccaagtgaagtatgcccccaagggtgtgaagatcctcctcagcccctcggggaggaacatccttccaggtgagctggtcacactcacctgccaggtgaacagcagctaccctgcagtcagttccattaagtggctcaaggatggggtacgcctccaaaccaagactggtgtgctgcacctgccccaggcagcctggagcgatgctggcgtctacacctgccaagctgagaacggcgtgggctctttggtctcaccccccatcagcctccacatcttcatggctgaggtccaggtgagcccagcaggtcccatcctggagaaccagacagtgacactagtctgcaacacacccaatgaggcacccagtgatctccgctacagctggtacaagaaccatgtcctgctggaggatgcccactcccataccctccggctgcacttggccactagggctgatactggcttctacttctgtgaggtgcagaacgtccatggcagcgagcgctcgggccctgtcagcgtggtagtcaaccacccgcctctcactccagtcctgacagccttcctggagacccaggcgggacttgtgggcatccttcactgctctgtggtcagtgagcccctggccacactggtgctgtcacatgggggtcatatcctggcctccacctccggggacagtgatcacagcccacgcttcagtggtacctctggtcccaactccctgcgcctggagatccgagacctggaggaaactgacagtggggagtacaagtgctcagccaccaactcccttggaaatgcaacctccaccctggacttccatgccaatgccgcccgtctcctcatcagcccggcagccgaggtggtggaaggacaggcagtgacactgagctgcagaagcggcctaagccccacacctgatgcccgcttctcctggtacctgaatggagccctgcttcacgagggtcccggcagcagcctcctgctccccgcggcctccagcactgacgccggctcataccactgccgggcccgggacggccacagtgccagtggcccctcttcgccagctgttctcactgtgctctacccccctcgacaaccaacattcaccaccaggctggaccttgatgccgctggggccggggctggacggcgaggcctccttttgtgccgtgtggacagcgacccccccgccaggctgcagctgctccacaaggaccgtgttgtggccacttccctgccatcagggggtggctgcagcacctgtgggggctgttccccacgcatgaaggtcaccaaagcccccaacttgctgcgtgtggagattcacaaccctttgctggaagaggagggcttgtacctctgtgaggccagcaatgccctgggcaacgcctccacctcagccaccttcaatggccaggccactgtcctggccattgcaccatcacacacacttcaggagggcacagaagccaacttgacttgcaacgtgagccgggaagctgctggcagccctgctaacttctcctggttccgaaatggggtgctgtgggcccagggtcccctggagaccgtgacactgctgcccgtggccagaactgatgctgccctttacgcctgccgcatcctgactgaggctggtgcccagctctccactcccgtgctcctgagtgtactctatcccccggaccgtccaaagctgtcagccctcctagacatgggccagggccacatggctctgttcatctgcactgtggacagccgccccctggccttgctggccttgttccatggggagcacctcctggccaccagcctgggtccccaggtcccatcccatggtcggttccaggctaaagctgaggccaactccctgaagttagaggtccgagaactgggccttggggactctggcagctaccgctgtgaggccacaaatgttcttggatcatccaacacctcactcttcttccaggtccgaggagcctgggtccaggtgtcaccatcacctgagctccaagagggccaggctgtggtcctgagctgccaggtacacacaggagtcccagaggggacctcatatcgttggtatcgggatggccagcccctccaggagtcgacctcggccacgctccgctttgcagccataactttgacacaagctggggcctatcattgccaagcccaggccccaggctcagccaccacgagcctagctgcacccatcagcctccacgtgtcctatgccccacgccacgtcacactcactaccctgatggacacaggccctggacgactgggcctcctcctgtgccgtgtggacagtgaccctccggcccagctgcggctgctccacggggatcgccttgtggcctccaccctacaaggtgtggggggacccgaaggcagctctcccaggctgcatgtggctgtggcccccaacacactgcgtctggagatccacggggctatgctggaggatgagggtgtctatatctgtgaggcctccaacaccctgggccaggcctcggcctcagctgacttcgacgctcaagctgtgaatgtgcaggtgtggcccggggctaccgtgcgggaggggcagctggtgaacctgacctgccttgtgtggaccactcacccggcccagctcacctacacatggtaccaggatgggcagcagcgcctggatgcccactccatccccctgcccaacgtcacagtcagggatgccacctcctaccgctgcggtgtgggcccccctggtcgggcaccccgcctctccagacctatcaccttggacgtcctctacgcgccccgcaacctgcgcctgacctacctcctggagagccatggcgggcagctggccctggtactgtgcactgtggacagccgcccgcccgcccagctggccctcagccacgccggtcgcctcttggcctcctcgacagcagcctctgtccccaacaccctgcgcctggagctgcgagggccacagcccagggatgagggtttctacagctgctctgcccgcagccctctgggccaggccaacacgtccctggagctgcggctggagggtgtgcgggtgatcctggctccggaggctgccgtgcctgaaggtgcccccatcacagtgacctgtgcggaccctgctgcccacgcacccacactctatacttggtaccacaacggtcgttggctgcaggagggtccagctgcctcactctcattcctggtggccacgcgggctcatgcaggcgcctactcttgccaggcccaggatgcccagggcacccgcagctcccgtcctgctgccctgcaagtcctctatgcccctcaggacgctgtcctgtcctccttccgggactccagggccagatccatggctgtgatacagtgcactgtggacagtgagccacctgctgagctggccctatctcatgatggcaaggtgctggccacgagcagcggggtccacagcttggcatcagggacaggccatgtccaggtggcccgaaacgccctacggctgcaggtgcaagatgtgcctgcaggtgatgacacctatgtttgcacagcccaaaacttgctgggctcaatcagcaccatcgggcggttgcaggtagaaggtgcacgcgtggtggcagagcctggcctggacgtgcctgagggcgctgccctgaacctcagctgccgcctcctgggtggccctgggcctgtgggcaactccacctttgcatggttctggaatgaccggcggctgcacgcggagcctgtgcccactctcgccttcacccacgtggctcgtgctcaagctgggatgtaccactgcctggctgagctccccactggggctgctgcctctgctccagtcatgctccgtgtgctctaccctcccaagacgcccaccatgatggtcttcgtggagcctgagggtggcctccggggcatcctggattgccgagtggacagcgagccgctcgccagcctgactctccaccttggcagtcgactggtggcctccagtcagccccagggtgctcctgcagagccacacatccatgtcctggcttcccccaatgccctgagggtggacatcgaggcgctgaggcccagcgaccaaggggaatacatctgttctgcctcaaatgtcctgggctctgcctctacctccacctactttggggtcagagccctgcaccgcctgcatcagttccagcagctgctctgggtcctgggactgctggtgggcctcctgctcctgctgttgggcctgggggcctgctacacctggagctcattgatcctgatgcagccacatgtgagacctcaacctgtgccccacccctgggctgaccagtggtgttgcctgccctccggaggagaaagtggccagaatctgtgatgactccagcctatgaatgtgaatgaggcagtgttgagtcctgcccgcctctacgaaaacagctctgtgacatctgactttttatgacctggccccaagcctcttgcccccccaaaaatgggtggtgagaggtctgcccaggagggtgttgaccctggaggacactgaagagcactgagctgatctcgctctctcttctctggatctcctcccttctctccatttctccctcaaaggaagccctgccctttcacatccttctcctcgaaagtcaccctggactttggttggattgcagcatcctgcatcctcagaggctcaccaaggcattctgtattcaacagagtatcagtcagcctgctctaacaagagaccaaatacagtgacttcaacatgatagaattttatttttctctcccacgctagtctggctgttacgatggtttatgatgttggggctcaggatccttctatcttccttttctctatccctaaaatgatgcctttgattgtgaggctcaccatggccccgctttgtccacatgccctccagccagaagaaggaagagtggaggtagaagcacacccatgcccatggtggacgcaactcagaagctgcacaggacttttccactcacttcccattggctggagtattgtcacatggctactgcaagctacaagggagactgggaaatgtagtttttattttgagtccagaggacatttggaattggacttccaaaggactcccaactgtgagctcatccctgagacttttgacattgttgggaatgccaccagcaggccatgttttgtctcagtgcccatctactgagggccagggtgtgcccctggccattctggttgtgggcttcctggaagaggtgatcactctcacactaagactgaggaaataaaaaaggtttggtgttttcctagggagagagcatgccaggcagtggagttgcctaagcagacatccttgtgccagatttggcccctgaaagaagagatgccctcattcccaccaccaccccccctacccccagggactgggtactaccttactggcccttacaagagtggagggcagacacagatgttgtcagcatccttattcctgctccagatgcatctctgttcatgactgtgtgagctcctgtccttttcctggagaccctgtgtcgggctgttaaagagaatgagttaccaagaaggaatgacgtgcccctgcgaatcagggaccaacaggagagagctcttgagtgggctagtgactccccctgcagcctggtggagatggtgtgaggagcgaagagccctctgctctaggatttgggttgaaaaacagagagagaagtggggagttgccacaggagctaacacgctgggaggcagttgggggcgggtgaactttgtgtagccgaggccgcaccctccctcattccaggctcattcattttcatgctccattgccagactcttgctgggagcccgtccagaatgtcctcccaataaaactccatcctatgacgc

SEQ ID NO: 166 - DNA, 1221 bp, Homo sapiens
  source 1..1221: mol_type = genomic DNA
tgaccgtcacttcacgtgaccgcgcggcggccgctgcggcgcgatggcggcggggctggcgcggctcctgttgctcctcgggctctcggccggcgggcccgcgccggcaggtgcagcgaagatgaaggtggtggaggagcccaacgcgtttggggtgaacaacccgttcttgcctcaggccagtcgcctccaggccaagagggatccttcacccgtgtctggacccgtgcatctcttccgactctcgggcaagtgcttcagcctggtggagtccacgtacaagtatgagttctgcccgttccacaacgtgacccagcacgagcagaccttccgctggaacgcctacagtgggatcctcggcatctggcacgagtgggagatcgccaacaacaccttcacgggcatgtggatgagggacggtgacgcctgccgttcccggagccggcagagcaaggtggagctggcgtgtggaaaaagcaaccggctggcccatgtgtccgagccgagcacctgcgtctacgcgctgacgttcgagacccccctcgtctgccacccccacgccttgctagtgtacccaaccctgccagaggccctgcagcggcagtgggaccaggtagagcaggacctggccgatgagctgatcaccccccagggccatgagaagttgctgaggacactttttgaggatgctggctacttaaagaccccagaagaaaatgaacccacccagctggagggaggtcctgacagcttggggtttgagaccctggaaaactgcaggaaggctcataaagaactctcaaaggagatcaaaaggctgaaaggtttgctcacccagcacggcatcccctacacgaggcccacagaaacttccaacttggagcacttgggccacgagacgcccagagccaagtctccagagcagctgcggggtgacccaggactgcgtgggagtttgtgaccttgtggtgggagagcagaggtggacgcggccgagagccctacagagaagctggctggtaggacccgcagggaccagctgaccaggcttgtgctcagagaagcagacaaaacaaagattcaaggttttaattaattcccatactgataaaaataactccatgaattctgtaaaccattgcataaatgctatagtgtaaaaaaatttaaacaagtgttaactttaaacagttcgctacaagtaaatgattataaatacta

SEQ ID NO: 167 - DNA, 5857 bp, Homo sapiens
  source 1..5857: mol_type = genomic DNA
acatgccccgtttgctgcctgaacctctccacaaagactcccagatcctgaattgaatttaatcatctcctgacaaaagaatgcaatttcaactgaccctttttttgcaccttgggtggctcagttactcaaaagctcaagatgactgcaacaggggtgcctgtcatcccaccactggtgatctcctggtgggcaggaacacgcagcttatggcttcttctacctgtgggctgagcagagcccagaaatactgcatcctcagttacctggagggggaacaaaaatgcttcatctgtgactctagatttccatatgatccgtatgaccaacccaacagccacaccattgagaatgtcattgtaagttttgaaccagacagagaaaagaaatggtggcaatctgaaaatggtcttgatcatgtcagcatcagactggacttagaggcattatttcggttcagccaccttatcctgacctttaagacttttcggcctgctgcaatgttagttgaacgttccacagactatggacacaactggaaagtgttcaaatattttgcaaaagactgtgccacttcctttcctaacatcacatctggccaggcccagggagtgggagacattgtttgtgactccaaatactcggatattgaaccctcaacaggtggagaggttgttttaaaagttttggatcccagttttgaaattgaaaacccttatagcccctacatccaagaccttgtgacattgacaaacctgaggataaactttaccaagctccacacccttggggatgctttgcttggaaggaggcaaaatgattcccttgataaatactactatgctctgtacgagatgattgttcggggaagctgcttttgcaatggccatgctagcgaatgtcgccctatgcagaagatgcggggagatgttttcagccctcctggaatggttcacggtcagtgtgtgtgtcagcacaatacagatggtccgaactgtgagagatgcaaggacttcttccaggatgctccttggaggccagctgcagacctccaggacaacgcttgcagatcgtgcagctgtaatagccactccagccgctgtcactttgacatgactacgtacctggcaagcggtggcctcagcgggggcgtgtgtgaagactgccagcacaacactgaggggcagcactgcgaccgctgcagacccctcttctacagggacccgctcaagaccatctcagatccctacgcgtgcattccttgtgaatgtgaccccgatgggaccatatctggtggcatttgtgtgagccactctgatcctgccttagggtctgtggccggccagtgcctttgtaaagagaacgtggaaggagccaaatgcgaccagtgcaaacccaaccactacggactaagcgccaccgaccccctgggctgccagccctgcgactgtaacccccttgggagtctgccattcttgacctgtgatgtggatacaggccaatgcttgtgcctgtcatatgtcaccggagcacactgcgaagaatgcactgttggatactggggcctgggaaatcatctccatgggtgttctccctgtgactgtgatattggaggtgcttattctaacgtgtgctcacccaagaatgggcagtgtgaatgccgcccacatgtcactggccgtagctgctctgaaccagcccctggctacttctttgctcctttgaatttctatctctacgaggcagaggaagccacaacactccaaggactggcgcctttgggctcggagacgtttggccagagtcctgctgttcacgttgttttaggagagccagttcctgggaaccctgttacatggactggacctggatttgccagggttctccctggggctggcttgagatttgctgtcaacaacattccctttcctgtggacttcaccattgccattcactatgaaacccagtctgcagctgactggactgtccagattgtggtgaacccccctggagggagtgagcactgcatacccaagactctacagtcaaagcctcagtcttttgccttaccagcggctacgagaatcatgctgcttcccacacccatctgtttagaaccagatgtacaatattccatagatgtctatttttctcagcctttgcaaggagagtcccacgctcattcacatgtcctggtggactctcttggccttattccccaaatcaattcattggagaatttctgcagcaagcaggacttagatgagtatcagcttcacaactgtgttgaaattgcctcagcaatgggacctcaagtgctcccgggtgcctgtgaaaggctgatcatcagcatgtctgccaagctgcatgatggggctgtggcctgcaagtgtcacccccagggctcagtcggatccagctgcagccgacttggaggccagtgccagtgtaaacctcttgtggtcgggcgctgctgtgacaggtgctcaactggaagctatgatttggggcatcacggctgtcacccatgtcactgccatcctcaaggatcaaaggacactgtatgtgaccaagtaacaggacagtgcccctgccatggagaggtgtctggccgccgctgtgatcgctgcctggcaggctactttggatttcccagctgccacccttgcccttgtaataggtttgctgaactttgtgatcctgagacagggtcatgcttcaattgtggaggctttacaactggcagaaactgtgaaaggtgtattgatggttactatggaaatccttcttcaggacagccctgtcgtccttgcctgtgtccagatgatccctcaagcaatcagtattttgcccattcctgttatcagaatctgtggagctcagatgtaatctgcaattgtcttcaaggttatacgggtactcagtgtggagaatgctctactggtttctatggaaatccaagaatttcaggagcaccttgccaaccatgtgcctgcaacaacaacatagatgtaaccgatccagagtcctgcagccgggtaacaggggagtgccttcgatgtttgcacaacactcagggcgcaaactgccagctctgcaaaccaggtcactatggatcagccctcaatcagacctgcagaagatgctcctgccatgcttccggcgtgagtcccatggagtgtccccctggtgggggagcttgcctctgtgaccctgtcactggtgcatgtccttgtctgccgaatgtcacaggcctggcctgtgaccgttgtgctgatggatactggaatctggtccctggcagaggatgtcagtcatgtgactgtgaccctaggacctctcaaagtagccactgtgaccagcttacaggccagtgtccgtgtaaattaggttacggcgggaaacgttgcagtgagtgccaggaaaattattatggtgatccacctgggcgatgcattccatgtgattgtaacagggcaggtacccagaagcccatctgtgatccagacacaggcatgtgccgctgccgggagggtgtcagcggccagagatgtgatcgctgtgcccggggacacagccaggaattccctacttgtcttcaatgtcacttgtgctttgatcagtgggaccacaccatttcttccctctccaaagcggtgcaagggttaatgagactggctgctaacatggaagataaaagagagaccctgcctgtctgtgaggcagacttcaaagacctcagagggaacgtgtctgaaatagaaaggattttgaaacatcctgttttcccatctgggaaattcttaaaagtcaaggattatcatgactctgttagaagacaaatcatgcagctaaatgaacaactgaaagcagtgtatgaatttcaagatctgaaagatacaatagaaagagcaaagaatgaagcagacctcttacttgaagaccttcaggaagaaattgatttgcaatccagtgtccttaatgcaagcattgcggactcctcagaaaacatcaagaaatattatcacatatcatcatctgctgaaaagaaaattaatgaaactagttccaccattaatacctctgcaaatacaaggaatgacttacttaccatcttagatacactaacctcaaaaggaaacttgtcattggaaagattaaagcagattaagataccagatatccaaatattgaatgaaaaggtgtgcggagatccaggaaatgtgccatgtgtgcccttgccctgtggcggtgctctctgcacgggccggaaggggcacaggaagtgtaggggtcccggctgtcacggctccctgaccctctcaacgaatgccctccaaaaagcccaggaagcaaaatccattattcgtaatttggacaaacaggttcgtgggttgaaaaatcagatcgaaagtataagtgaacaggcagaagtctccaaaaacaatgccttacagctgagggaaaaactgggaaatataagaaaccaaagtgactctgaagaagaaaacatcaatcttttcatcaaaaaagtgaaaaactttttgttagaggaaaacgtgcctccagaagacatcgagaaggttgcgaatggtgtgcttgacattcacctaccaattccatcccaaaatctaaccgatgaacttgtcaaaatacagaaacatatgcaactctgtgaggattacaggacagatgaaaacaggttaaatgaagaagcagatggagcccaaaagcttttggtgaaggccaaagcagctgagaaagcagcaaatattctattaaatcttgacaaaacattgaaccagttacaacaagctcaaatcactcaaggacgggcaaactctaccattacacagctgactgccaatataacaaaaataaaaaagaatgtgctgcaggctgaaaatcaaaccagggaaatgaagagtgagctggagttagcaaagcagcgatcagggctggaggatggactttccctgctgcagaccaagttgcaaaggcatcaagaccacgctgtcaatgcgaaagttcaggctgaatctgcccaacaccaggctgggagtcttgagaaggaatttgttgagctgaaaaaacaatatgctattctccaacgtaagacaagcactacaggactaacaaaggagacattaggaaaagttaaacagctaaaagatgcggcagaaaaattggctggagatacagaggccaagataagaagaataacagatttagaaaggaaaatccaagatttgaatctaagtagacaagcaaaagctgatcaactgagaatattggaagatcaagttgttgccattaaaaatgaaattgttgaacaagaaaaaaaatatgctaggtgctatagctaggcagagttaaagagcaaaagcttgtgcctttgtttctggtttctgatgtacaagcccctggggctctgttgaacctgtgaaatactgacaatgtcttctaccttccttccccacaccctgtccttattagacacctgctcagtgtggctggaggttgaaatgccaccaggaaaatgccacttcataattgaaaggggaaagtaatgaaattgtctctggtttcagaaacttttcctcttaccttcctttctctttcctaacttaaaaataacagtttccatataacaagtagaaatttaagtaagtactctactaactaataatcatttcagtcagataaacctaaacattaaataaatatctccaatattaggatggaatacatatgtatggcatgtactagattgtcctatattttatgtttatttggatttgcttttatttgtaaaattattcttttctgaataaactgcatacaattcaaaatgcaa

SEQ ID NO: 168 - DNA, 4664 bp, Homo sapiens
  source 1..4664: mol_type = genomic DNA
gaacagactggaagagaagttaccccgatgacttggtttggaaggggttaaggcaccagtcatcctcttctaaagtgatttatgatgatgtgtggagtttaaaaactttaccccaccccaaagaacagccttctcactcctcactgagtccactctgaacgtgctaaaatgggaaggaggcggtgttttgctgatctgttaaattcttagtgaagtttccttgatttccagtggctgctgttgtttgagtttggtttggagcaaaactgaggtagtcctaacatttctgggactgaatccaggcaagagaaagaagaaaaagaagaagaaaaagaggaggaaaaaggtagggagaaataaagggaggagagaagcacagtgaaagaaaaaaaaagtcccttttcgacatcacattcctgtgttttccctcagcctggaaaacatattaatcccagtgcttttacgcccggaaacaaagagactaagccagactatgggggaaagggagataagaaggatcctggaactttaaagagggaaagagtgagattcagaaatcgccaggactggactttaagggacgtcctgtgtcagcacaagggactggcacacacagacacacgagaccgaggagaaactgcagacaaatggagatacaaagacttagaaggacagctcctttcacctcatcctacttgtccagaaggtaaaaagacacagccagaaagaaaaggcatcggctcagctctcagatcaggacaggctgtggatctgtggcggtactctgaaagctggagctgcagcacaccccttttgtattgctcaccctcggtaaagagagagagggctgggaggaaaagtagttcatctaggaaactgtcctgggaaccaaacttctgatttcttttgcaaccctctgcattccatctctatgagccaccattggattacacaatgacatggagaatgggaccccgtttcactatgctgttggccatgtggctagtgtgtggatcagaaccccacccccatgccactattagaggcagccacggaggacggaaagtgcctttggtttctccggacagcagtaggccagctcggtttctgaggcacactgggaggtctcgcggaattgagagatccactctggaggaaccaaaccttcagcctctccagagaaggaggagtgtgcccgtgttgagactagctcgcccaacagagccgccagcccgctcggacatcaatggggccgccgtgagacctgagcaaagaccagcagccaggggctctccgcgtgagatgatcagagatgaggggtcctcagctcggtcaagaatgttgcgtttcccttcggggtccagctctcccaacatccttgccagctttgcagggaagaacagagtatgggtcatctcagcccctcatgcctcggaaggctactaccgcctcatgatgagcctgctgaaggacgatgtgtactgtgagctggcggagaggcacatccaacagattgtgctcttccaccaggcaggtgaggaaggaggcaaggtgagaaggatcaccagcgagggccagatcctggagcagcccctggaccctagcctcatccctaagctgatgagcttcctgaagctggagaagggcaagtttggcatggtgctgctgaagaagacgctgcaggtggaggagcgctatccatatcccgttaggctggaagccatgtacgaggtcatcgaccaaggccccatccgtaggatcgagaagatcaggcagaagggctttgtccagaaatgtaaggcctctggtgtagagggccaggtggtggcggaggggaatgacggtggagggggagcaggaaggccaagcctgggcagcgagaagaagaaagaggacccaaggagagcacaagtcccaccaaccagagagagtcgggtgaaggtcctgagaaaactggccgccactgcaccagctttgccccaacctccctcaacccccagagccaccacccttcctcctgccccagccacaacagtgactcggtccacgtcccgggcggtaacagttgctgcaagacctatgaccaccactgcctttcccaccacgcagaggccctggaccccctcaccctcccacaggccccctacaaccactgaggtgatcactgccaggagaccctcagtttcagagaatctttaccctccatcccggaaggatcagcacagggagaggccacagacaaccaggaggcccagcaaggccaccagcttggagagcttcacaaatgcccctcccaccaccatctcagaacccagcacaagggctgctggcccaggccgtttccgggacaaccgcatggacaggcgggaacatggccaccgagacccaaatgtggtgccaggtcctcccaagccagcaaaggagaaacctcccaaaaagaaggcccaggacaaaattcttagtaatgagtatgaggagaagtatgacctcagccggcctactgcctctcagctggaggacgagctgcaggtggggaatgttccccttaaaaaagcaaaggagtctaaaaagcatgaaaagcttgagaaaccagagaaggagaagaaaaaaaagatgaagaatgagaacgcagacaagttacttaagagtgaaaagcaaatgaagaagtctgagaaaaagagcaagcaagagaaagagaagagcaagaagaaaaaaggaggtaaaacagaacaggatggctatcagaaacccaccaacaaacacttcacgcagagtcccaagaagtcagtggccgacctgctggggtcctttgaaggcaaacgaagactccttctgatcactgctcccaaggctgagaacaatatgtatgtgcaacaacgtgatgaatatctggaaagtttctgcaagatggctaccaggaaaatctctgtgatcaccatcttcggccctgtcaacaacagcaccatgaaaatcgaccactttcagctagataatgagaagcccatgcgagtggtggatgatgaagacttggtagaccagcgtctcatcagcgagctgaggaaagagtacggaatgacctacaatgacttcttcatggtgctaacagatgtggatctgagagtcaagcaatactatgaggtaccaataacaatgaagtctgtgtttgatctgatcgatactttccagtcccgaatcaaagatatggagaagcagaagaaggagggcattgtttgcaaagaggacaaaaagcagtccctggagaacttcctatccaggttccggtggaggaggaggttgctggtgatctctgctcctaacgatgaagactgggcctattcacagcagctctctgccctcagtggtcaggcgtgcaattttggtctgcgccacataaccattctgaagcttttaggcgttggagaggaagttgggggagtgttagaactgttcccaattaatgggagctctgttgttgagcgagaagacgtaccagcccatttggtgaaagacattcgtaactattttcaagtgagcccggagtacttctccatgcttctagtcggaaaagacggaaatgtcaaatcctggtatccttccccaatgtggtccatggtgattgtgtacgatttaattgattcgatgcaacttcggagacaggaaatggcgattcagcagtcactggggatgcgctgcccagaagatgagtatgcaggctatggttaccatagttaccaccaaggataccaggatggttaccaggatgactaccgtcatcatgagagttatcaccatggatacccttactgagcagaaatatgtaaccttagactcagccagtttcctctgcagctgctaaaactacatgtggccagctccattcttccacactgcgtactacatttcctgcctttttctttcagtgtttttctaagactaaataaatagcaaactttcacctattcatgagttattattgaaacctcaaatcataaagacatttaaaagaattgtttttctaactggaggggctctagtgctaaataatagtactgaaaattgatattattttccttttcttatatgaaggaccttatttggcatataaaattttataaaatatgtatttaaagctttttcttattttttgtattaattggtaagtgaaaactctgttaaagatcacaccacaatgttttcaagaaacatctgaaaagataaaacaaagaacaaataacttataatacttacttaaattgacactttttgaaatgccagtctgaaaataattaagatatctctgctttgtatgagtttcttttatgaaacttgataccacgggagtccagtaatattggccacaaaagccagagaaagtaccaagcccagctttgttatcatagccacttcctgccctgcttctgttatttttagtgttttttcagatataaatcggggtccaggaaatcctcaccagaatctggcactgcagccaaaggcgatacttccagagttctagtaggctgctatggaatttctggcatgaaaattcttgacccctcacactttaccccctgtacagcacaggcataccatggagatattacaggatcagttccagaccaccataataaagtggatatcgcaataaagtgagtcacacaaaa

SEQ ID NO: 169 - DNA, 2533 bp, Homo sapiens
  source 1..2533: mol_type = genomic DNA
gacagcctgtccctgcgctgcgcctccaggctggaccagcagttccaggcggcatggaggggccccggagctccacccatgtccccttggtgctgccgcttcttgtacttctgctgctggccccggctaggcaggccgccgcccagcgctgcccacaggcctgcatctgtgacaactccaggcgacacgttgcctgccggtaccagaacctcactgaggtgccagacgccatccctgagctgacccagcggctggacctgcagggcaatttgctgaaggtgatccccgcagccgccttccagggcgtgcctcacctcacacacctggacctgcgccactgcgaggtggagctggtggccgagggcgccttccgtggcctgggccgcctgctcctgctcaacctggcctccaaccacctgcgtgagctgccccaggaggcgctggacgggctgggctcgttgcggcggctggagctggaggggaacgcactggaggagctgcggccggggacgttcggggcactgggtgcgctggccacgctaaacctggcccacaacgccctggtttacctgcccgccatggccttccaggggctactgcgcgtccgctggctgcggctgtcgcacaacgcgctcagcgtgctggcccccgaggccctggctggcctgcccgccctgagacggctcagcctacaccacaacgagctccaggctctgcccgggcctgtcttgtcccaggcccgcggcctggcccgtctggagctgggccacaacccgctcacctacgcgggcgaggaggacgggctggcgctgcccggcctgcgggagctgctgctggacggcggggccctgcaggccctgggtcccagggccttcgcacactgtccgcgcctgcacaccctcgacctccgcgggaaccagctagacaccctgcccccgctgcagggcccgggccagctgcgccggctgcggctgcaggggaatccgctgtggtgcggctgccaggcgcggcccctactcgagtggctggcgcgggcgcgcgtgcgctcggacggcgcgtgccaggggccgcggcgcctgcggggcgaggctctggacgccctgcggccctgggacctgcgctgccctggggacgcggcgcaggaagaggaagagctggaagagcgggctgtggccgggccccgcgcccctccgcgcggccctccgcgcggccccggggaggagcgggcagtcgcgccttgccctcgcgcctgcgtgtgcgtccccgagtcccggcacagcagctgcgagggctgcggcctgcaggcggtgccccgcggcttccccagcgacacccagctcctggacctgaggcggaaccacttcccctcggtgccccgagcggccttccccggcctgggccacctggtgtcgctgcacctgcagcactgcggcatcgcggagctggaagcgggcgccctggccgggctgggccgcctgatctacctgtacctctccgacaaccagctcgcaggcctcagcgctgctgcccttgaaggggctccccgcctcggctacctgtacctagaacgcaaccgtttcctgcaggtgccaggggctgccctgcgcgccctgcccagcctcttctccctgcacctgcaggacaacgctgtggaccgcctggcacctggggacctggggagaacacgggccttgcgctgggtctacctgagtggaaaccgcatcaccgaagtgtcccttggggcgctgggcccagctcgggagctggagaagctgcacctggacaggaatcagctgcgagaggtgcccactggggccttggaggggctgcctgccctcctggagctgcagctctcgggcaacccactcagggccttgcgtgacggagccttccagcctgtgggcaggtcgctgcagcacctcttcctgaacagcagtggcctggagcagatttgtcctggggccttttcaggcctggggcccgggctccagagcctgcacctgcagaagaaccagcttcgggccctgcctgccctgcccagtctcagccagctggagctcatcgacctcagcagcaatcccttccactgtgactgccagctgcttccgctgcacaggtggcttactgggctgaacctgcgggtgggggccacctgcgccacccctcccaatgcccgtggccagagggtgaaggctgcagctgctgtctttgaagactgcccgggctgggctgccagaaaggccaagcggacaccagcctccaggcccagtgccaggagaacccccatcaaaggaagacagtgtggagcagataaggtggggaaggagaagggtcgtctctgagcacggagcaggctggtcctgccttgacccagcccggtggctcttactctcgccaggaacaggctccgacgagatcttcctggcaccctgagggtcgtcctccagcaggggcttcttggacccctgtctgaggggtcgcgtcttagtgggcgggattcttttccctttgaataaaaatggattcaaaccca

SEQ ID NO: 170 - DNA, 1377 bp, Homo sapiens
  source 1..1377: mol_type = genomic DNA
tgggcatctggaccagagctgcatctggaggtctttgccaagttcccaggaggcagcatcctctgggtcggcactgttggagaacgctcagggtctggtgctctcgtgcctgccccttccaggcagccggctctgattgcacaaggcagacctgtgactcctccatccagctatgcccctgctgcccagcaccgtgggcctggcaggcctgctcttctgggctggccaggcagtgaacgccttgataatgcctaatgctaccccagccccggcccagcccgagagcacggctatgcggctcctgagtggcctggaggtgcccaggtaccgccggaagcgccacatctctgtgagagacatgaatgccttactggattatcacaaccacatccgggccagtgtgtacccacctgccgccaacatggaatacatggtctgggacaagcggctggccagggctgccgaagcctgggccacccagtgcatctgggcacatgggccttcacagctgatgagatacgtgggccagaacctctccatccattctggccagtaccggtccgtagtggatctcatgaagtcctggtctgaggagaagtggcattacttgtttccggccccaagggactgtaacccacactgcccctggcgctgcgatggccccacctgctcccattatacccagatggtgtgggcatcctccaatcggctgggctgtgccatccacacctgtagtagcatcagtgtctggggcaacacctggcatcgggcggcatacctggtctgcaactatgccattaagggcaactggattggcgagtccccgtacaagatgggaaagccgtgctcctcctgtccccccagttatcaaggcagctgcaatagcaacatgtgcttcaaggggctgaaatccaacaagttcacgtggttctgaattttctctgggctttggtgcgcctccagctgggcctgaccctccatgtcctgccctcaaaaaactgggtggagaaataattgtttctttaaaggatatgagttagaatcaccccctgttgaattttccctcctagatccccttcttaaatgtccaacatgggtcaaaagaaaatgacctccttgccttccttctttcctagttgcatctttcttttcttgggcctctgggaaagagccctgcatctttcattaattcggttctcagagaaccaaggctggaaggcatagaactggcaccttgggaccaggcataatggctcacacctataatcccagtattttgggaggctgaggtgggagaatcacttgagtcctggagttggagaacagcctggaaagcctggcgataccccatctctatttagaaacaaacaaacaaac

SEQ ID NO: 171 - DNA, 9790 bp, Homo sapiens
  source 1..9790: mol_type = genomic DNA
ccgagctgcctcacccccggccccgggaagggcatggccccggcaaactcccggccgtgactcgcgcgccccggctcggtggatgctcccggcgcaccgctcccgtgtgcggcggcttcccaaggacaggtatccgagaatcaggcaccccgacaagatgcccaagcgcgcgcactggggggccctctccgtggtgctgatcctgctttggggccatccgcgagtggcgctggcctgcccgcatccttgtgcctgctacgtccccagcgaggtccactgcacgttccgatccctggcttccgtgcccgctggcattgctaaacacgtggaaagaatcaatttggggtttaatagcatacaggccctgtcagaaacctcatttgcaggactgaccaagttggagctacttatgattcacggcaatgagatcccaagcatccccgatggagctttaagagacctcagctctcttcaggttttcaagttcagctacaacaagctgagagtgatcacaggacagaccctccagggtctctctaacttaatgaggctgcacattgaccacaacaagatcgagtttatccaccctcaagctttcaacggcttaacgtctctgaggctactccatttggaaggaaatctcctccaccagctgcaccccagcaccttctccacgttcacatttttggattatttcagactctccaccataaggcacctctacttagcagagaacatggttagaactcttcctgccagcatgcttcggaacatgccgcttctggagaatctttacttgcagggaaatccgtggacctgcgattgtgagatgagatggtttttggaatgggatgcaaaatccagaggaattctgaagtgtaaaaaggacaaagcttatgaaggcggtcagttgtgtgcaatgtgcttcagtccaaagaagttgtacaaacatgagatacacaagctgaaggacatgacttgtctgaagccttcaatagagtcccctctgagacagaacaggagcaggagtattgaggaggagcaagaacaggaagaggatggtggcagccagctcatcctggagaaattccaactgccccagtggagcatctctttgaatatgaccgacgagcacgggaacatggtgaacttggtctgtgacatcaagaaaccaatggatgtgtacaagattcacttgaaccaaacggatcctccagatattgacataaatgcaacagttgccttggactttgagtgtccaatgacccgagaaaactatgaaaagctatggaaattgatagcatactacagtgaagttcccgtgaagctacacagagagctcatgctcagcaaagaccccagagtcagctaccagtacaggcaggatgctgatgaggaagctctttactacacaggtgtgagagcccagattcttgcagaaccagaatgggtcatgcagccatccatagatatccagctgaaccgacgtcagagtacggccaagaaggtgctactttcctactacacccagtattctcaaacaatatccaccaaagatacaaggcaggctcggggcagaagctgggtaatgattgagcctagtggagctgtgcaaagagatcagactgtcctggaagggggtccatgccagttgagctgcaacgtgaaagcttctgagagtccatctatcttctgggtgcttccagatggctccatcctgaaagcgcccatggatgacccagacagcaagttctccattctcagcagtggctggctgaggatcaagtccatggagccatctgactcaggcttgtaccagtgcattgctcaagtgagggatgaaatggaccgcatggtatatagggtacttgtgcagtctccctccactcagccagccgagaaagacacagtgacaattggcaagaacccaggggagtcggtgacattgccttgcaatgctttagcaatacccgaagcccaccttagctggattcttccaaacagaaggataattaatgatttggctaacacatcacatgtatacatgttgccaaatggaactctttccatcccaaaggtccaagtcagtgacagtggttactacagatgtgtggctgtcaaccagcaaggggcagaccattttacggtgggaatcacagtgaccaagaaagggtctggcttgccatccaaaagaggcagacgcccaggtgcaaaggctctttccagagtcagagaagacatcgtggaggatgaagggggctcgggcatgggagatgaagagaacacttcaaggagacttctgcatccaaaggaccaagaggtgttcctcaaaacaaaggatgatgccatcaatggagacaagaaagccaagaaagggagaagaaagctgaaactctggaagcattcggaaaaagaaccagagaccaatgttgcagaaggtcgcagagtgtttgaatctagacgaaggataaacatggcaaacaaacagattaatccggagcgctgggctgatattttagccaaagtccgtgggaaaaatctccctaagggcacagaagtacccccattgattaaaaccacaagtcctccatccttgagtctagaagtcacaccaccttttcctgctatttctcccccctcagcatctcctgtgcagacagtaaccagtgctgaagaatcctcagcagatgtacctctacttggtgaagaagagcacgttttgggtaccatttcctcagccagcatggggctagaacacaaccacaatggagttattcttgttgaacctgaagtaacaagcacacctctggaggaagttgttgatgacctttccgagaagactgaggagataacttccactgaaggagacctgaaggggacagcagcccctacacttatatctgagccttatgaaccatctcctactctgcacacattagacacagtctatgaaaagcccacccatgaagagacggcaacagagggttggtctgcagcagatgttggatcgtcaccagagcccacatccagtgagtatgagcctccattggatgctgtctccttggctgagtctgagcccatgcaatactttgacccagatttggagactaagtcacaaccagatgaggataagatgaaagaagacacctttgcacaccttactccaacccccaccatctgggttaatgactccagtacatcacagttatttgaggattctactataggggaaccaggtgtcccaggccaatcacatctacaaggactgacagacaacatccaccttgtgaaaagtagtctaagcactcaagacaccttactgattaaaaagggtatgaaagagatgtctcagacactacagggaggaaatatgctagagggagaccccacacactccagaagttctgagagtgagggccaagagagcaaatccatcactttgcctgactccacactgggtataatgagcagtatgtctccagttaagaagcctgcggaaaccacagttggtaccctcctagacaaagacaccacaacagcaacaacaacaccaaggcaaaaagttgctccgtcatccaccatgagcactcacccttctcgaaggagacccaacgggagaaggagattacgccccaacaaattccgccaccggcacaagcaaaccccacccacaacttttgccccatcagagactttttctactcaaccaactcaagcacctgacattaagatttcaagtcaagtggagagttctctggttcctacagcttgggtggataacacagttaatacccccaaacagttggaaatggagaagaatgcagaacccacatccaagggaacaccacggagaaaacacgggaagaggccaaacaaacatcgatataccccttctacagtgagctcaagagcgtccggatccaagcccagcccttctccagaaaataaacatagaaacattgttactcccagttcagaaactatacttttgcctagaactgtttctctgaaaactgagggcccttatgattccttagattacatgacaaccaccagaaaaatatattcatcttaccctaaagtccaagagacacttccagtcacatataaacccacatcagatggaaaagaaattaaggatgatgttgccacaaatgttgacaaacataaaagtgacattttagtcactggtgaatcaattactaatgccataccaacttctcgctccttggtctccactatgggagaatttaaggaagaatcctctcctgtaggctttccaggaactccaacctggaatccctcaaggacggcccagcctgggaggctacagacaggcatacctgttaccacttctggggaaaatcttacagaccctccccttcttaaagagcttgaggatgtggatttcacttccgagtttttgtcctctttgacagtctccacaccatttcaccaggaagaagctggttcttccacaactctctcaagcataaaagtggaggtggcttcaagtcaggcagaaaccaccacccttgatcaagatcatcttgaaaccactgtggctattctcctttctgaaactagaccacagaatcacacccctactgctgcccggatgaaggagccagcatcctcgtccccatccacaattctcatgtctttgggacaaaccaccaccactaagccagcacttcccagtccaagaatatctcaagcatctagagattccaaggaaaatgttttcttgaattatgtggggaatccagaaacagaagcaaccccagtgaacaatgaaggaacacagcatatgtcagggccaaatgaattatcaacaccctcttccgaccaggatgcatttaacttgtctacaaagctggaattggaaaagcaagtatttggtagtaggagtctaccacgtggcccagatagccaacgccaggatggaagagttcatgcttctcatcaactaaccagagtccctgccaaacccatcctaccaacagcaacagtgaggctgcctgaaatgtccacacaaagcgcttccagatactttgtaacttcccagtcacctcgtcactggaccaacaaaccggaaataactacatatccttctggggctttgccagagaacaaacagtttacaactccaagattatcaagtacaacaattcctctcccattgcacatgtccaaacccagcattcctagtaagtttactgaccgaagaactgaccaattcaatggctactccaaagtgtttggaaataacaacatccctgaggcaagaaacccagttggaaagcctcccagtccaagaattcctcattattccaatggaagactccctttctttaccaacaagactctttcttttccacagttgggagtcacccggagaccccagatacccacttctcctgccccagtaatgagagagagaaaagttattccaggttcctacaacaggatacattcccatagcaccttccatctggactttggccctccggcacctccgttgttgcacactccgcagaccacgggatcaccctcaactaacttacagaatatccctatggtctcttccacccagagttctatctcctttataacatcttctgtccagtcctcaggaagcttccaccagagcagctcaaagttctttgcaggaggacctcctgcatccaaattctggtctcttggggaaaagccacaaatcctcaccaagtccccacagactgtgtccgtcaccgctgagacagacactgtgttcccctgtgaggcaacaggaaaaccaaagcctttcgttacttggacaaaggtttccacaggagctcttatgactccgaataccaggatacaacggtttgaggttctcaagaacggtaccttagtgatacggaaggttcaagtacaagatcgaggccagtatatgtgcaccgccagcaacctgcacggcctggacaggatggtggtcttgctttcggtcaccgtgcagcaacctcaaatcctagcctcccactaccaggacgtcactgtctacctgggagacaccattgcaatggagtgtctggccaaagggaccccagccccccaaatttcctggatcttccctgacaggagggtgtggcaaactgtgtcccccgtggagggccgcatcaccctgcacgaaaaccggaccctttccatcaaggaggcgtccttctcagacagaggcgtctataagtgcgtggccagcaatgcagccggggcggacagcctggccatccgcctgcacgtggcggcactgccccccgttatccaccaggagaagctggagaacatctcgctgcccccggggctcagcattcacattcactgcactgccaaggctgcgcccctgcccagcgtgcgctgggtgctcggggacggtacccagatccgcccctcgcagttcctccacgggaacttgtttgttttccccaacgggacgctctacatccgcaacctcgcgcccaaggacagcgggcgctatgagtgcgtggccgccaacctggtaggctccgcgcgcaggacggtgcagctgaacgtgcagcgtgcagcagccaacgcgcgcatcacgggcacctccccgcggaggacggacgtcaggtacggaggaaccctcaagctggactgcagcgcctcgggggacccctggccgcgcatcctctggaggctgccgtccaagaggatgatcgacgcgctcttcagttttgatagcagaatcaaggtgtttgccaatgggaccctggtggtgaaatcagtgacggacaaagatgccggagattacctgtgcgtagctcgaaataaggttggtgatgactacgtggtgctcaaagtggatgtggtgatgaaaccggccaagattgaacacaaggaggagaacgaccacaaagtcttctacgggggtgacctgaaagtggactgtgtggccaccgggcttcccaatcccgagatctcctggagcctcccagacgggagtctggtgaactccttcatgcagtcggatgacagcggtggacgcaccaagcgctatgtcgtcttcaacaatgggacactctactttaacgaagtggggatgagggaggaaggagactacacctgctttgctgaaaatcaggtcgggaaggacgagatgagagtcagagtcaaggtggtgacagcgcccgccaccatccggaacaagacttacttggcggttcaggtgccctatggagacgtggtcactgtagcctgtgaggccaaaggagaacccatgcccaaggtgacttggttgtccccaaccaacaaggtgatccccacctcctctgagaagtatcagatataccaagatggcactctccttattcagaaagcccagcgttctgacagcggcaactacacctgcttggtcaggaacagcgcgggagaggataggaagacggtgtggattcacgtcaacgtccagccacccaagatcaacggtaaccccaaccccatcaccactgtgcgggagatagcagccgggggcagtcggaaactgattgactgcaaagctgaaggcatccccaccccgagggtgttatgggcttttcccgagggtgtggttctgccagctccatactatggaaaccggatcactgtccatggcaacggttccctggacatcaggagtttgaggaagagcgactccgtccagctggtatgcatggcacgcaacgagggaggggaggccaggttgatcctgcagctcactgtcctggagcccatggagaaacccatcttccacgacccgatcagcgagaagatcacggccatggcgggccacaccatcagcctcaactgctctgccgcggggaccccgacacccagcctggtgtgggtccttcccaatggcaccgatctgcagagtggacagcagctgcagcgcttctaccacaaggctgacggcatgctacacattagcggtctctcctcggtggacgccggggcctaccgctgcgtggcccgcaatgccgctggccacacggagaggctggtctccctgaaggtgggactgaagccagaagcaaacaagcagtatcataacctggtcagcatcatcaatggtgagaccctgaagctcccctgcacccctcccggggctgggcagggacgtttctcctggacgctccccaatggcatgcatctggagggcccccaaaccctgggacgcgtttctcttctggacaatggcaccctcacggttcgtgaggcctcggtgtttgacaggggtacctatgtatgcaggatggagacggagtacggcccttcggtcaccagcatccccgtgattgtgatcgcctatcctccccggatcaccagcgagcccaccccggtcatctacacccggcccgggaacaccgtgaaactgaactgcatggctatggggattcccaaagctgacatcacgtgggagttaccggataagtcgcatctgaaggcaggggttcaggctcgtctgtatggaaacagatttcttcacccccagggatcactgaccatccagcatgccacacagagagatgccggcttctacaagtgcatggcaaaaaacattctcggcagtgactccaaaacaacttacatccacgtcttctgaaatgtggattccagaatgattgcttaggaactgacaacaaagcggggtttgtaagggaagccaggttggggaataggagctcttaaataatgtgtcacagtgcatggtggcctctggtgggtttcaagttgaggttgatcttgatctacaattgttgggaaaaggaagcaatgcagacacgagaaggagggctcagccttgctgagacactttcttttgtgtttacatcatgccaggggcttcattcagggtgtctgtgctctgactgcaatttttctttttttgcaaatgccactcgactgccttcataagcgtccataggatatctgaggaacattcatcaaaaataagccatagacatgaacaacacctcactaccccattgaagacgcatcacctagttaacctgctgcagtttttacatgatagactttgttccagattgacaagtcatctttcagttatttcctctgtcacttcaaaactccagcttgcccaataaggatttagaaccagagtgactgatatatatatatattttaattcagagttacatacatacagctaccattttatatgaaaaaagaaaaacatttcttcctggaactcactttttatataatgttttatatatatattttttcctttcaaatcagacgatgagactagaaggagaaatactttctgtcttattaaaattaataaattattggtctttacaagacttggatacattacagcagacatggaaatataattttaaaaaatttctctccaacctccttcaaattcagtcaccactgttatattaccttctccaggaaccctccagtggggaaggctgcgatattagatttccttgtatgcaaagtttttgttgaaagctgtgctcagaggaggtgagaggagaggaaggagaaaactgcatcataactttacagaattgaatctagagtcttccccgaaaagcccagaaacttctctgcagtatctggcttgtccatctggtctaaggtggctgcttcttccccagccatgagtcagtttgtgcccatgaataatacacgacctgttatttccatgactgctttactgtatttttaaggtcaatatactgtacatttgataataaaataatattctccc

SEQ ID NO: 172 - DNA, 4968 bp, Homo sapiens
  source 1..4968: mol_type = genomic DNA
gaacaacagatccaggccagaggtggcatcatgtctgggtggaggtacctcatctgtgtcagctttttgctgaccattcttcttgaactgacataccagggaccccctgtccccgcttcatcaagcacaaagttgttaatgacaagctattctatgcgctccacggtggtgtctcgctatgcccacaccttggtcacctctgtcctgtttaatccacatgctgaagcccatgaagccatctttgacctggatctgcctcatcttgcctttatctccaatttcactatgaccatcaacaataaagtctacattgcagaagtcaaagagaagcaccaggcaaagaaaatctatgaagaagcccatcagcagggaaagacagctgctcatgtaggcatcagggaccgggaatcagagaagttccgcatctccaccagcctggcagcaggcacagaggtgactttttccctggcctatgaggaactgcttcagcggcaccagggccagtaccagctggtggtgagcctgaggcctggccaattggtgaagaggctgagcatagaggttacagtgtcagaaaggacaggcatctcctatgtgcacataccacccctgaggaccggccgtctgcgcaccaatgcccatgcaagtgaggtggattcacccccatccaccaggatcgagaggggagagacctgtgtccgaatcacctactgcccgacattgcaagaccagtcgtccatctctgggtcaggcatcatggctgacttcctggttcagtacgatgtggtcatggaggacatcattggagacgtgcagatttacgatgactatttcattcactactttgcccccagaggccttccacctatggagaagaatgtggtttttgttattgacgtaagcagctccatgtttggtaccaagatggaacagactaaaacggccatgaatgtgatcctcagtgaccttcaagccaatgactacttcaacatcatctccttttctgacacagttaatgtttggaaagctggaggctcaatccaggccaccatccagaatgtccacagtgccaaggactacctgcattgcatggaagccgatggctggacagacgtcaactcagctctgctggcagctgcttcagtgctgaaccatagcaaccaggagcctgggaggggccccagtgtggggaggatccctcttatcatcttcctgacggatggggagcccacggccggcgtgacgacccccagtgtgatcctctccaatgtccgtcaggcgctaggccacagggtatcccttttcagcttggcctttggggatgatgctgactttacactgctgcgccgcctgtccctggaaaaccggggaatagcccggcgcatatatgaggacactgatgcggccctacagctgaagggcctctatgaggagatctccatgcctctgctggcagatgtgcgtctgaactacctgggtggcttggttggggcctccccttgggccgttttccccaactactttggtggctctgagctggtggtggcaggacaggtgcagccaggcaaacaggaactgggcatccacctggcagcccgtggccccaaggatcagcttcttgtggcccaccacagtgaaggggccaccaacaacagccagaaggcctttggttgcccaggggagccagcccccaatgtggcccacttcatccgccgcctctgggcctatgtcaccattggagaactgctggatgcacacttccaagctcgtgacaccaccactcgccacctgctggctgccaaagtcctcaacctgtcccttgaatacaactttgtcacacctctgacttcactggtcatggtgcaacccaaacaggccagtgaggagaccaggagacagacttccacctctgctgggccagacaccatcatgccctcatccagcagcaggcatggcctaggggtaagcacagctcagccagccttggtgcccaaggtcatctcccccaaatcaaggcctgtgaaaccaaagttctacttatcctcaactactactgcctctaccaagaagatgctaagttccaaagagctggagccattgggagagagccctcataccctgtcaatgcccacatacccaaaggccaaaattccagcacaacaggattctggcaccttggcccagccaactctcaggacaaaacctaccattcttgtgccctcaaattctggtactctgttgcctctgaagcccggctctctatcacaccagaatcctgatatattacccacgaactccaggacacaagtcccacctgtgaaacctggcatcccagcctcgcccaaagctgacactgtgaaatgtgttactccactgcattccaaacctggtgctccatcgcacccccaacttggggcactcacatcacaggcacctaaaggcctgccacagtcaagacctggagtctctacacttcaggttcccaagtacccactacacaccagacctagggttcctgctcccaagacccgaaacaacatgccacacctggggcctggaatcctcttgtccaagacccctaaaatcttattatctcttaaaccgagtgccccaccacaccaaatttccacaagcatatcactttccaagcctgagaccccaaacccccatatgcctcaaaccccactacctcctagacctgacagaccaaggcccccacttcctgagagcctaagcacattcccaaatacaatctcaagttccacaggtcccagcagtaccacaaccacctctgtccttggagaacccctccccatgccctttactcccactctgccccctggaaggttctggcatcagtatgacctcctcccgggtccccagaggaccaggcaagttctgggaccatctaggccaggagttccaacaatgagcctactcaacagctccaggcctacaccagaaggcagccctccaaacctgccaatcttgctgccttctagcatcctccctgaggccatcagtctgctccttctccctgaggagctagagctgctgtctgaatcaatggtggaatccaagttcgtggagtccttgaacccaccagctttctataccttcctcactcctgatgaagatggaagtccaaactgggatggcaattctgaggagatcctgggaggagctggaggcagcatggaatctcaaggaagttctgtggggttagcaaaaggcacattgcctagcatcttcaccttctcctcctcagtggacggggacccccactttgtgatccaaatcccacactcagaagagaagatctgcttcacactgaatgggcaccctggggacttgctgcagctcatagaggacccaaaggcagggctgcatgtgagtgggaagctgcttggcgcaccaccaaggccgggccacaaggaccagactcgcacctacttccagatcatcacagtcactacagacaaaccccgggcctatactatcaccatcagccgcagttctatatctttgcgaggcgagggtaccttgcgcctgtcctgggaccaacctgccctgctgaagaggccccagctggagctctatgtggctgctgcagcccgccttaccctccgccttgggccctaccttgagttcctagtcctccgacaccgctacaggcatcccagtaccctgcaactaccccacctggggttctacgtggccaatggctcaggcctcagcccctcagcccgtggcctgatagggcagttccagcacgcagacatccgactggtgacaggacctatggggccatgcttacgaaggcaccatggcccagatgtgcctgtgattctaggcaagaggctgctgaaggactcaccaaggctgctgccccgctgggcttcctgctggctggtgaagcgctctcatgtagagctgcttctgggccacccctacctctcctatgtcctgtgatggcttctgaattccagagccaggagacctgaatttgggagatccagaaaccagggcatggggtgagccagggacagagacccaaggacatggaagcacacacagggacacacagactcacgcatgttctaaggaacacatatacaagggtatacaaacacatagacatgcagagacatagagtcagggactcctgcatcttcatggtccttcacatctccagtctcaccctctccaaatccatgctcctcaccagccctacaagccacttttgtaaaacgaaaaaatgatcagtagttctgctcacagctttccctaactcctatggcatattcaaggctctcagagtttccctaacaaaccatgctcactcctaccactggaccattgcatgtgcttttccttctgcatgaaacactcttcctttgttcctgtaggtgagtataattcatccttcaaatcctagttgttacctcttctaggaggcctttcctgatgcctgccctagattgagtttggtcctgtcctctgggttcctatagcccacccccaaccctccacgctcacagtatttatactgtgtagtaatcatctgtttacttgtctggatccctgacttagactgtgagatctttgagggcaaggaccttttctgaatcatctatgtatccccagtgcctctcacataataggtgcttagtaaatatttgttaaaagaatgaattaattaattaacaaaaaaggatcccataacatagcaatagacacacatatatacatactcacaaccaaagacacaggatcacacccggaaaaacagtgacaagggcacagatatggatggatagagggacagacatttatggaaacacaggaatcacaaaacaaacatggacataggggtatagagacataaaaagatggggacagggagccagagtggcagaatcagggacataaactcagagaaaaaggaacagatgctctctggctgca

SEQ ID NO: 173 - DNA, 1828 bp, Homo sapiens
  source 1..1828: mol_type = genomic DNA
cgctccggctgcagcgccggctgcatcaataattcagagcggcggcggcggcggcagcggcgggtgcgggcaggaggcggcggcagcagcgggaccgagcagcagcggctatgcatccaagtgcggctgggcagccgcggcacccctgaggcccgggaggggctccgggaacacagcgcggaggggacgctagtcgcggaggggacgctagtcccggagtgcgaggaagaggtgtagtgtccagagcggcggcggcggagctgcgcacggagctgaggagggggcttcggagcgggactgggacggggggggcggctggcgcgagcagccctgggggtggggggcggggtgggcgccggcggcgcgatgctgggcgtcctggagctgctgctgctgggggctgcgtggctggcgggcccggcccgcgggcagaatgagacggagcccatcgtgctggagggcaagtgcctggtggtgtgcgactccaaccccacgtccgaccccacgggcactgccctgggcatctctgtgcgctctggcagcgccaaggtggctttctctgccatcaggagcaccaaccacgagccgtccgagatgagtaatcgcaccatgatcatctacttcgaccaggtactagtgaacattgggaacaactttgattcagaacgcagcactttcatcgccccgcgcaaagggatctacagttttaacttccacgtggtaaaagtctacaacagacaaaccatacaggtgagcctcatgctaaacgggtggccggtgatttcagccttcgctggtgaccaggacgtgacccgggaggccgccagcaacggagtcctaatccaaatggagaaaggcgaccgagcatacctcaagctggagcggggaaacttgatggggggctggaagtactcgaccttctccggattcctggtgtttcctctctgactggctcgtagccggaagggaggcagggagagggcgaaggcaggaaggggagtgagaaagaggctgaaattaagagggcgagaaagcagcacgacttgaaacttcctacatgttctctaactgtatctgggtaaaaaggtgcgcgccagctgtgggacaactttgtccatttccttattaggagaaataaatttcgcttagctctgcgcactcccatttccaaaaataaactcgcctcccccattccagttgcagtaatcaagaaagagactgccttgtcattgtttcttatcccccaacttcatgttccctgcaatttatttaaagaaactttgtatttcactacataatctgaaatctttctccctagccccctctgaatccttctgcctactgaaatctgatatattacacacccccaaccttttttttttcagtttggaaaggggtaaagttttgttgttgttgttgttttgttttggatggggaaggtagttttaatttggcaagtgttgctcttcttaaaacactgctcaaattaattagctgaagatacttagtatcctcggctgcttgttagcagagaaaggactcaccttagtggtgactggtttaaaaaatataaatatatatcatttgtatacgaagaactcttcccagtggaaactggctgtgtttccgtatttctatgttctattcggagtgatcgtgaaatctaaggctgcttgatgttctgatgcttgtcaatgccgtcgtgctctgtgactccacgaaacgccaaggagcttcttccggacgcctcctcttcctctgtaacatacgtgtgaatagtcaaggtttaattttgctttaatctaataaagtcgaagtgggactttta

SEQ ID NO: 174 - DNA, 1810 bp, Homo sapiens
  source 1..1810: mol_type = genomic DNA
aatggaacattcttcccaaggcagtagaagaaatccttctgttgaactctactgtgtcaggccagcctgagttcatttctccttgagcaggaacagttcatggacgaactctgaggaccattctgaggacaagaggcatccagtgtcatgagtggaacatgcagcattttatggctacagagttaaggcaagggttgaattccacgagtcaaaaagcagcccttttcagagacccaactctctggggtgctcaggggcttgggctggattgagaagaaaactgacaagagtaagctgccctctcttctctggccatctcacaaaccacagtgcgggccaactggtcctgcctctttaccacacagaaccaagcactagggataagacagctgcccatggtgtccgcggcgggtctctctggggatggcaagatgcgaggggtgctcctggtgctgctcggccttctctattcttccaccagttgtggcgtccagaaagcttccgttttctacggtcctgaccccaaggagggcttggtcagcagcatggagttcccgtgggtggtgtcgctgcaggactcccagtacacacacctggctttcggctgcatcctgagcgagttctgggtcctcagcatcgcatccgccattcagaacaggaaggacattgtcgttatagtgggtataagtaacatggatcctagcaagattgctcacacagagtatccagtcaataccatcatcatccatgaggactttgataacaactccatgagcaacaacatagccctcctgaagacagacacagcgatgcattttggcaacctggtccagtccatctgcttcctcggcagaatgctgcatacaccaccagtcttgcagaactgctgggtgtcaggatggaatcccacatctgcaacaggaaatcacatgacgatgagtgtcctgaggaaaatcttcgtgaaagatcttgacatgtgtcccctatacaaactccagaagacagaatgcggcagccacacgaaagaggaaaccaagactgcctgcttgggggacccaggaagcccaatgatgtgccagctacagcagttcgatctgtgggttctgagaggagtcctgaacttcggtggtgagacgtgccctggcctgtttctgtacaccaaggtggaagactacagcaaatggatcacatccaaggctgagagggccggccctcccctgtcctcactccaccactgggaaaagttgatttctttctcccaccatggaccaaatgccaccatgacacagaagacatattctgattctgaactgggccatgttggatcatacttgcagggacaaagaaggaccatcacgcattcacgactaggaaacagctctagagatagtctagatgttagggagaaggatgtaaaggaatcaggcaggtctcctgaggcgtctgtacaacccttatactatgactattacggtggggaggtgggggaaggtaggatttttgcaggtcagaacaggttgtatcagcccgaagaaatcatcttggtttccttcgtgcttgttttcttttgcagcagtatctagtccaggagctaccccaccaaactgaagagtaaactgagaatgctgagtgccaggcattcaccatgctgttttgatgtctgtttttgatagttgcacactggggctgccacggataagcccatggcatacactgggctggctctccctcctctatccctctcccaggtgtgggaaggtcactttcactatgcttgtgaactaaatgctggctaacaagtgtcaaacca

SEQ ID NO: 175 - DNA, 2727 bp, Homo sapiens
  source 1..2727: mol_type = genomic DNA
aagcgcgtcgccaccgcccccgcctaggcgagagcccagagagctgaacctgcatcccggacctgcggcgaccgtcgtacaccatgggcctccacctccgcccctaccgtgtggggctgctcccggatggcctcctgttcctcttgctgctgctaatgctgctcgcggacccagcgctcccggccggacgtcaccccccagtggtgctggtccctggtgatttgggtaaccaactggaagccaagctggacaagccgacagtggtgcactacctctgctccaagaagaccgaaagctacttcacaatctggctgaacctggaactgctgctgcctgtcatcattgactgctggattgacaatatcaggctggtttacaacaaaacatccagggccacccagtttcctgatggtgtggatgtacgtgtccctggctttgggaagaccttctcactggagttcctggaccccagcaaaagcagcgtgggttcctatttccacaccatggtggagagccttgtgggctggggctacacacggggtgaggatgtccgaggggctccctatgactggcgccgagccccaaatgaaaacgggccctacttcctggccctccgcgagatgatcgaggagatgtaccagctgtatgggggccccgtggtgctggttgcccacagtatgggcaacatgtacacgctctactttctgcagcggcagccgcaggcctggaaggacaagtatatccgggccttcgtgtcactgggtgcgccctgggggggcgtggccaagaccctgcgcgtcctggcttcaggagacaacaaccggatcccagtcatcgggcccctgaagatccgggagcagcagcggtcagctgtctccaccagctggctgctgccctacaactacacatggtcacctgagaaggtgttcgtgcagacacccacaatcaactacacactgcgggactaccgcaagttcttccaggacatcggctttgaagatggctggctcatgcggcaggacacagaagggctggtggaagccacgatgccacctggcgtgcagctgcactgcctctatggtactggcgtccccacaccagactccttctactatgagagcttccctgaccgtgaccctaaaatctgctttggtgacggcgatggtactgtgaacttgaagagtgccctgcagtgccaggcctggcagagccgccaggagcaccaagtgttgctgcaggagctgccaggcagcgagcacatcgagatgctggccaacgccaccaccctggcctatctgaaacgtgtgctccttgggccctgactcctgtgccacaggactcctgtggctcggccgtggacctgctgttggcctctggggctgtcatggcccacgcgttttgcaaagtttgtgactcaccattcaaggccccgagtcttggactgtgaagcatctgccatggggaagtgctgtttgttatcctttctctgtggcagtgaagaaggaagaaatgagagtctagactcaagggacactggatggcaagaatgctgctgatggtggaactgctgtgaccttaggactggctccacagggtggactggctgggccctggtcccagtccctgcctggggccatgtgtcccccctattcctgtgggcttttcatacttgcctactgggccctggccccgcagccttcctatgagggatgttactgggctgtggtcctgtacccagaggtcccagggatcggctcctggcccctcgggtgacccttcccacacaccagccacagataggcctgccactggtcatgggtagctagagctgctggcttccctgtggcttagctggtggccagcctgactggcttcctgggcgagcctagtagctcctgcaggcaggggcagtttgttgcgttcttcgtggttcccaggccctgggacatctcactccactcctacctcccttaccaccaggagcattcaagctctggattgggcagcagatgtgcccccagtcccgcaggctgtgttccaggggccctgatttcctcggatgtgctattggccccaggactgaagctgcctcccttcaccctgggactgtggttccaaggatgagagcaggggttggagccatggccttctgggaacctatggagaaagggaatccaaggaagcagccaaggctgctcgcagcttccctgagctgcacctcttgctaaccccaccatcacactgccaccctgccctagggtctcactagtaccaagtgggtcagcacagggctgaggatggggctcctatccaccctggccagcacccagcttagtgctgggactagcccagaaacttgaatgggaccctgagagagccaggggtcccctgaggcccccctaggggctttctgtctgccccagggtgctccatggatctccctgtggcagcaggcatggagagtcagggctgccttcatggcagtaggctctaagtgggtgactggccacaggccgagaaaagggtacagcctctaggtggggttcccaaagacgccttcacgctggactgagctgctctcccacagggtttctgtgcagctggattttctctgttgcatacatgcctggcatctgtctccccttgttcctgagtggccccacatggggctctgagcaggctgtatctggattctggcaataaaagtactctggatgctgtaaggtg

SEQ ID NO: 176 - DNA, 1947 bp, Homo sapiens
  source 1..1947: mol_type = genomic DNA
aggtctttgccccgcctctcggccccgcggcctggccggcaagcagggctgcagtcacggggcggcgcggagggccccagcccagtcaggggtgtggccgccgccaccgtaaggctaggccgcgagcttagtcctgggagccgcctccgtcgccgccgtcagagccgccctatcagattatcttaacaagaaaaccaactggaaaaaaaaatgaaattccttatcttcgcatttttcggtggtgttcaccttttatccctgtgctctgggaaagctatatgcaagaatggcatctctaagaggacttttgaagaaataaaagaagaaatagccagctgtggagatgttgctaaagcaatcatcaacctagctgtttatggtaaagcccagaacagatcctatgagcgattggcacttctggttgatactgttggacccagactgagtggctccaagaacctagaaaaagccatccaaattatgtaccaaaacctgcagcaagatgggctggagaaagttcacctggagccagtgagaataccccactgggagaggggagaagaatcagctgtgatgctggagccaagaattcataagatagccatcctgggtcttggcagcagcattgggactcctccagaaggcattacagcagaagttctggtggtgacctctttcgatgaactgcagagaagggcctcagaagcaagagggaagattgttgtttataaccaaccttacatcaactactcaaggacggtgcaataccgaacgcagggggcggtggaagctgccaaggtgggggctttggcatctctcattcgatccgtggcctccttctccatctacagtcctcacacaggtattcaggaataccaggatggcgtgcccaagattccaacagcctgtattacggtggaagatgcagaaatgatgtcaagaatggcttctcatgggatcaaaattgtcattcagctaaagatgggggcaaagacctacccagatactgattccttcaacactgtagcagagatcactgggagcaaatatccagaacaggttgtactggtcagtggacatctggacagctgggatgttgggcagggtgccatggatgatggcggtggagcctttatatcatgggaagcactctcacttattaaagatcttgggctgcgtccaaagaggactctgcggctggtgctctggactgcagaagaacaaggtggagttggtgccttccagtattatcagttacacaaggtaaatatttccaactacagtctggtgatggagtctgacgcaggaaccttcttacccactgggctgcaattcactggcagtgaaaaggccagggccatcatggaggaggttatgagcctgctgcagcccctcaatatcactcaggtcctgagccatggagaagggacagacatcaacttttggatccaagctggagtgcctggagccagtctacttgatgacttatacaagtatttcttcttccatcactcccacggagacaccatgactgtcatggatccaaagcagatgaatgttgctgctgctgtttgggctgttgtttcttatgttgttgcagacatggaagaaatgctgcctaggtcctagaaacagtaagaaagaaacgttttcatgcttctggccaggaatcctgggtctgcaactttggaaaactcctcttcacataacaatttcatccaattcatcttcaaagcacaactctatttcatgctttctgttattatctttcttgatactttccaaattctctgattctagaaaaaggaatcattctcccctccctcccaccacatagaatcaacatatggtagggattacagtgggggcatttctttatatcacctcttaaaaacattgtttccactttaaaagtaaacacttaataaatttttggaagatctctga

SEQ ID NO: 177 - DNA, 16389 bp, Homo sapiens
  source 1..16389: mol_type = genomic DNA
ctgcagccatgggtgccctatggagctggtggatactctgggctggagcaaccctcctgtggggattgacccaggaggcttcagtggacctcaagaacactggcagagaggaattcctcacagccttcctgcagaactatcagctggcctacagcaaggcctacccccgcctccttatctccagtctgtcagagagccccgcttcagtctccatcctcagccaggcagacaacacctcaaagaaggtcacagtgaggcccggggagtcggtcatggtcaacatcagtgccaaggctgagatgataggcagcaagatcttccagcatgcggtggtgatccattctgactatgccatctctgtgcaggcactaaatgccaagcctgacacagcggagctgacactgctgcggcccatccaggccctaggcaccgagtattttgtgctcacaccccccggcacctcagccaggaatgtcaaggagtttgccgtggtggccggtgccgcaggtgcctcggtcagtgtcacgctgaaggggtcagtgacattcaatggcaagttctatccagcaggcgatgtcctaagagtgactctacagccctacaatgtggcccagctacagagctcagtggatctctcggggtcaaaggtcacagctagtagccccgtggctgtcctctctggccacagctgtgcgcagaaacatacgacctgcaaccatgtggttgagcagctgctacccacgtctgcctggggcacccactatgtagtacccacgctggcctcccaatctcgctatgatttggccttcgttgtggccagccaggccacaaagctgacctacaaccatgggggtatcactggctcccgtgggctccaggcaggtgatgtggtagagtttgaggtccggccatcctggccactctacctgtctgcaaatgtgggcatccaggtcctgttgtttggcacaggtgccataaggaatgaagtgacttatgacccctacctggtcctgatcccagatgtggcggcctactgcccagcctatgtggtcaagagtgtaccaggctgtgagggcgtggccctggtagtggcacagacgaaggctatcagcgggctgaccatagatgggcatgcagtgggggccaagctcacctgggaggctgtgccaggcagtgagttctcgtatgctgaagtggagctcggcacagctgacatgatccacacggccgaggccaccaccaacttgggactgctcaccttcgggctggccaaggctataggctacgcaacagctgctgattgcggccggactgtactgtccccagtggagccctcctgcgaaggcatgcagtgcgcagccgggcagcgctgccaggtggtaggcgggaaggccgggtgtgtggcggagtccaccgctgtctgccgcgcccagggcgacccccattacaccaccttcgacggccgtcgctacgacatgatgggcacctgttcgtacacgatggtggagctgtgcagcgaggacgacaccctgcccgccttcagcgtggaggccaagaacgagcaccggggcagccgccgcgtctcctacgtgggcctcgtcactgtgcgcgcctacagccactctgtgtcgctgacccgcggtgaagttggcttcgtcctggttgacaaccagcgctcgcgcctgccagtctccctgagtgagggtcgcctgcgtgtgtaccagagcggaccacgggccgtggtggagctggtctttgggctggtggtcacttatgactgggactgccagctggcactcagcctgcctgcacgcttccaagaccaggtgtgcgggctgtgtggcaactataatggtgacccagcagacgacttcctcacgcctgacggggctctggctcctgacgctgtggagttcgcaagtagctggaagctggatgatggggactacctgtgtgaggatggctgccagaacaactgtcccgcctgcaccccaggccaggcccaacactatgagggcgaccgactctgtggcatgctgaccaagctcgatggccccttcgctgtctgccatgacaccctggaccccaggcccttcctggagcagtgtgtatatgacctgtgtgtggtcggtggggagcggctcagcctgtgccgtggcctcagcgcctatgcccaggcctgtctggagcttggcatctcggttggggactggagatcaccagccaactgccccctgtcctgccctgccaacagccgctatgagctctgcggccctgcttgcccgacctcctgcaacggggctgcggcgccgtccaactgctccgggcgcccctgcgtggagggctgcgtgtgcctcccaggcttcgtggccagcggcggcgcctgcgtgccggcctcgtcgtgtggctgcaccttccagggtctccagctcgctccgggccaggaagtgtgggcggacgagttgtgccaaaggcgctgcacctgcaacggcgccacccatcaggtcacctgccgcgacaagcagagctgcccggcgggtgagcgctgcagcgtccagaacggcctcctgggctgctaccccgatcgcttcgggacctgccaggggtccggggacccacactatgtgagcttcgacggccggcgcttcgacttcatgggcacctgcacgtacctgctggtcggctcatgcggccagaacgcagcgctgcctgccttccgggtgctggtggaaaacgagcatcggggcagccagactgtgagctacacgcgcgccgtgcgggtggaggcccgcggggtgaaggtggccgtgcgccgggagtaccccgggcaagtgctggtggatgacgtccttcagtatctgcccttccaagcagcagatgggcaggtgcaggtgttccgacagggcagggatgccgtcgtgcgcacggactttggcctgactgtcacttatgactggaatgcacgagtgactgccaaggtgcccagcagctatgctgaggccctgtgtggactctgtgggaacttcaacggggacccagctgatgacctggctctgcggggtgggggtcaagctgccaatgcactggcctttgggaacagctggcaagaagagacgaggcccggctgtggagcaactgaaccgggtgactgtcccaagctggactccctggtggcccagcagctgcagagcaagaatgagtgtggaatccttgccgaccccaaggggcccttccgggagtgccatagcaagctggacccccagggtgccgtgcgcgactgtgtctatgaccgctgcctgctgccaggccagtctgggccactgtgtgacgcactggccacctatgctgctgcatgccaggctgctggagccacagtgcacccctggaggagtgaagaactttgcccactgagctgcccaccccacagccactatgaggcgtgttcctacggctgcccgctgtcctgtggagacctcccagtgcccgggggctgtggctcagaatgccatgagggctgcgtgtgcgatgagggctttgcgctcagtggtgagtcctgcctgcccctggcctcctgtggctgcgtacaccagggcacctaccacccaccaggccagaccttctaccctggccccggatgtgattccctttgccactgccaggagggcggcctggtgtcctgtgagtcctccagctgcggaccgcacgaggcctgccagccatccggtggcagcttgggctgtgtggccgtgggctctagcacctgccaggcgtcaggagacccccactacaccaccttcgatggccgccgcttcgacttcatgggcacctgcgtgtatgtgctggctcagacctgcggcacccggcctggcctgcatcggtttgccgtcctgcaggagaacgtggcctggggtaatgggcgagtcagtgtgaccagggtgatcacggtccaggtggcaaacttcaccctgcggctggagcagagacagtggaaggtcacggtgaacggtgtggacatgaagctgcccgtggtgctggccaacggccagatccgtgcctcccagcatggttcagatgttgtgattgagaccgacttcggcctgcgtgtggcctacgaccttgtgtactatgtgcgggtcaccgtccccggaaactactaccagcagatgtgtggcctgtgtgggaactacaacggcgaccccaaggatgacttccagaagcccaatggctcacaggcaggcaacgccaatgagttcggcaactcctgggaggaggtggtgcccgactctccctgcctgccgcccaccccttgcccgccggggagcgaggactgtatccccagccacaagtgtcctcccgagctggagaagaagtatcagaaggaggagttctgtgggctcctctccagccccacagggccactgtcctcctgccacaagctggtggatccccagggtcccttgaaagattgcatctttgatctctgcctgggtggtgggaacctgagcattctctgcagcaacatccatgcctacgtgagtgcttgccaggcggctggaggccacgtggagccctggaggactgaaactttctgtcccatggagtgccctccgaacagtcactacgagctctgtgcggacacctgctccctgggctgctcagctctcagtgcccctccacagtgccaggatgggtgtgctgagggctgccagtgtgactccggcttcctctacaatggccaagcctgcgtgcccatccagcaatgcggctgctaccacaatggtgtctactatgagccggagcagacagtcctcattgacaactgtcggcagcagtgcacgtgccatgcgggtaaaggcatggtgtgccaggaacacagctgcaagccggggcaggtgtgccagccctccggaggcatcctgagctgcgtcaccaaagacccgtgccacggcgtgacatgccggccacaggagacatgcaaggagcagggtggccagggcgtgtgcctgcccaactatgaggccacgtgctggctgtggggcgacccacactaccactccttcgatggccggaagtttgacttccagggcacctgtaactatgtgctggcaacaactggctgcccgggggtcagcacccagggcctgacacccttcaccgtcaccaccaagaaccagaaccggggcaaccctgctgtgtcctacgtgagagtcgtcaccgtggctgccctcggcaccaacatctccatccacaaggacgagatcggcaaagtccgggtgaacggtgtgctcacagccttgcctgtctctgtggccgacgggcggatttcagtgacccagggtgcatcgaaggcactgctggtggctgactttggactgcaagtcagctatgactggaactggcgggtagacgtgacgctgcccagcagctatcatggcgcagtgtgcgggctctgcggtaacatggaccgcaaccccaacaatgaccaggtcttccctaatggcacactggctccctccatacccatctggggcggcagctggcgagccccaggctgggacccactgtgttgggacgaatgtcgggggtcctgcccaacgtgccctgaggaccggttggagcagtacgagggccctggcttctgcggacccctggcccccggcacagggggccctttcaccacctgccatgctcatgtgccacctgagagcttcttcaagggctgtgttctggacgtctgcatgggtggtggggaccgtgacattctttgcaaggctctggcttcctatgtggccgcctgccaggctgctggggttgtcatcgaagactggcgggcacaggttggctgtgagatcacctgcccagaaaacagccactatgaggtctgtggctcaccctgcccggccagctgtccgtcccctgcaccccttacgacgccagccgtatgtgagggcccctgtgtggagggctgccagtgcgacgcgggtttcgtgttaagtgctgaccgctgtgttcccctcaacaacggctgcggctgctgggccaatggcacctaccacgaggcgggcagtgagttttgggctgatggcacctgctcccagtggtgtcgctgcgggcctgggggtggctcgctggtctgcacacctgccagctgtgggctgggtgaagtgtgtggcctcctgccatccggccagcacggctgccagcccgtcagcacagctgagtgccaggcgtggggtgacccccattacgtcactctggatgggcaccgattcaatttccaaggcacctgcgagtacctgctgagtgcaccctgccacggaccacccttgggggctgagaacttcactgtcactgtagccaatgagcaccggggcagccaggctgtcagctacacccgcagtgtcaccctgcaaatctacaaccacagcctgacactgagtgcccgctggccccggaagctacaggtggacggcgtgttcgtcactctgcccttccagctggactcgctcctgcacgcacacctgagcggcgccgacgtggtggtgaccacaacctcagggctctcgctggctttcgacggggacagcttcgtgcgcctgcgcgtgccggcggcgtacgcgggctctctctgtggcttatgcgggaactacaaccaggaccccgcagacgacctgaaggcggtgggcgggaagcccgccggatggcaggtgggcggcgcccagggctgcggggaatgtgtgtccaagccatgcccgtcgccgtgcaccccagagcagcaagagtccttcggcggcccggacgcctgcggcgtgatctccgccaccgacggcccgctggcgccctgccacggccttgtgccgcccgcgcagtacttccagggctgcttgctggacgcctgccaagttcagggccatcctggaggcctctgtcctgcagtggccacctacgtggcagcctgtcaggccgctggggcccagctccgcgagtggaggcggccggacttctgtcccttccagtgccctgcccacagccactacgagctctgcggtgactcctgtcctgggagctgcccgagcctgtcggcacccgagggctgtgagtcggcctgccgtgaaggctgtgtctgcgatgctggcttcgtgctcagtggtgacacgtgtgtacctgtgggccagtgtggctgcctccacgatgaccgctactacccactgggccagaccttctaccctggccctgggtgtgattccctttgccgctgccgggagggcggtgaggtgtcctgtgagccctccagctgcggcccgcatgagacctgccggccatccggtggcagcttgggctgcgtggccgtgggctctaccacctgccaggcgtcgggagatccccactacaccaccttcgatggccgccgcttcgacttcatgggcacctgcgtgtatgtgctggctcagacctgcggcacccggcctggcctacatcggtttgccgtcctgcaggagaacgtggcctggggtaatgggcgagtcagtgtgaccagggtgatcacggtccaggtggcaaacttcaccctgcggctggagcagagacagtggaaggtcacggtgaacggtgtggacatgaagctgcccgtggtgctggccaacggccagatccgtgcctcccagcatggttcagatgttgtgattgagaccgacttcggcctgcgtgtggcctacgaccttgtgtactatgtgcgggtcaccgtccctggaaactactaccagctgatgtgtggcctgtgtgggaactacaacggcgaccccaaggatgacttccagaagcccaatggctcgcaggcaggcaacgccaatgagttcggcaactcctgggaggaggtggtgcccgactctccctgcctgccgccgcccacctgcccgccggggagcgagggctgtatccccagcgaggagtgtcctcccgagctggagaagaagtatcagaaggaggagttctgtgggctcctctccagccccacagggccactgtcctcttgccacaagctggtggatccccagggtcccttgaaagattgcatctttgatctctgcctgggtggtgggaacctgagcattctctgcagcaacatccatgcctacgtgagtgcttgccaggcagctggaggccaggtggagccctggaggaatgaaactttctgtcccatggaatgccctcagaacagtcactacgagctctgtgcggacacctgctccctgggctgctcggctctcagtgcccctctgcagtgcccagatgggtgtgctgagggctgccagtgtgactccggcttcctctacaacggccaagcctgcgtgcccatccagcaatgtggctgctaccacaatggtgcctactatgagccggagcagacagtcctcattgacaactgtcggcagcagtgcacgtgccatgtgggtaaagtcgtggtgtgccaggaacacagctgcaagccggggcaggtgtgccagccctccggaggcatcctgagctgcgtcaacaaagacccgtgccacggcgtgacatgccggccacaggagacatgcaaggagcagggtggccagggcgtgtgcctgcccaactatgaggccacgtgctggctgtggggcgacccacactaccactccttcgatggccggaagtttgacttccagggcacctgtaactatgtgctggcaacaactggctgcccgggggtcagcacccagggcctgacacccttcaccgtcaccaccaagaaccagaaccggggcaaccctgctgtgtcctacgtgagagtcgtcaccgtggctgccctcggcaccaacatctccatccacaaggacgagatcggcaaagtccgggtgaacggtgtgctcacagccttgcctgtctctgtggccgacgggcggatttcagtgacccagggtgcatcgaaggcactgctggtggctgactttggactgcaagtcagctatgactggaactggcgggtagacgtgacgctgcccagcagctatcatggcgcagtgtgcgggctctgcggtaacatggaccgcaaccccaacaatgaccaggtcttccctaatggcacactggctccctccatacccatctggggcggcagctggcgagccccaggctgggacccactgtgttgggacgaatgtcgggggtcctgcccaacgtgccctgaggaccggttggagcagtacgagggccctggcttctgcggacccctggcccccggcacagggggccctttcaccacctgccatgctcatgtgccacctgagagcttcttcaagggctgtgttctggacgtctgcatgggtggtggggaccgtgacattctttgcaaggctctggcttcctatgtggccgcctgccaggctgctggggttgtcatcgaagactggcgggcacaggttggctgtgagatcacctgcccagaaaacagccactatgaggtctgtggcccaccctgcccggccagctgtccgtcccctgcaccccttacgacgccagccgtatgtgagggcccctgtgtggagggctgccagtgcgacgcgggtttcgtgttaagtgctgaccgctgtgttcccctcaacaacggctgcggctgctgggccaatggcacctaccacgaggcgggcagtgagttttgggctgatggcacctgctcccagtggtgtcgctgcgggcctgggggtggctcgctggtctgcacacctgccagctgtgggctgggtgaagtgtgtggcctcctgccatccggccagcacggctgccagcccgtcagcacagctgagtgccaggcgtggggtgacccccattacgtcactctggatgggcaccgattcgatttccaaggcacctgcgagtacctgctgagtgcaccctgccacggaccacccttgggggctgagaacttcactgtcactgtagccaatgagcaccggggcagccaggctgtcagctacacccgcagtgtcaccctgcaaatctacaaccacagcctgacactgagtgcccgctggccccggaagctacaggtggacggcgtgttcgtcactctgcccttccagctggactcgctcctgcacgcacacctgagcggcgccgacgtggtggtgaccacaacctcagggctctcgctggctttcgatggggacagcttcgtgcgcctgcgcgtgccggcggcgtacgcgggctctctctgtggcttatgcgggaactacaaccaggaccccgcagacgacctgaaggcggtgggcgggaagcccgccggatggcaggtgggcggcgcccagggctgcggggaatgtgtgtccaagccatgcccgtcgccgtgcaccccagagcagcaagagtccttcggcggcccggacgcctgcggcgtgatctccgccaccgacggcccgctggcgccctgccacggccttgtgccgcccgcgcagtacttccagggctgcttgctggacgcctgccaagttcagggccatcctggaggcctctgtcctgcagtggccacctacgtggcagcctgtcaggccgctggggcccagctccgcgagtggaggcggccggacttctgtcccttccagtgccctgcccacagccactacgagctctgcggtgactcctgtcctgggagctgcccgagcctgtcggcacccgagggctgtgagtcggcctgccgtgaaggctgtgtctgcgatgctggcttcgtgctcagtggtgacacgtgtgtacctgtgggccagtgtggctgcctccacgatgaccgctactacccactgggccagaccttctaccctggccctgggtgtgattccctttgccgctgccgggagggcggtgaggtgtcctgtgagccctccagctgcggcccgcatgagacctgccggccatccggtggcagcttgggctgcgtggccgtgggctctaccacctgccaggcgtcgggagatccccactacaccaccttcgatggccaccgcttcgacttcatgggcacctgcgtgtatgtgctggctcagacctgcggcacccggcctggcctgcatcggtttgccgtcctgcaggagaacgtggcctggggtaatgggcgagtcagtgtgaccagggtgatcacggtccaggtggcaaacttcaccctgcggctggagcagagacagtggaaggtcacggtgaacggtgtggacatgaagctgcccgtggtgctggccaacggccagatccgtgcctcccagcatggttcagatgttgtgattgagaccgacttcggcctgcgtgtggcctacgaccttgtgtactatgtgcgggtcaccgtccctggaaactactaccagctgatgtgtggcctgtgtgggaactacaacggcgaccccaaggatgacttccagaagcccaatggctcgcaggcaggcaacgccaatgagttcggcaactcctgggaggaggtggtgcccgactctccctgcctgccgccgcccacctgcccgccggggagcgcgggctgtatccccagcgacaagtgtcctcccgagctggagaagaagtatcagaaggaggagttctgtgggctcctctccagccccacagggccactgtcctcctgccacaagctggtggatccccagggtcccttgaaagattgcatctttgatctctgcctgggtggtgggaacctgagcattctctgcagcaacatccatgcctacgtgagtgcttgccaggcggctggaggccacgtggagccctggaggaatgaaactttctgtcccatggaatgccctcagaacagtcactacgagctctgtgcggacacctgctccctgggctgctcggctctcagtgcccctctgcagtgcccagatgggtgtgctgagggctgccagtgtgactccggcttcctctacaacggccaagcctgcgtgcccatccagcaatgtggctgctaccacaatggtgtctactatgagccggagcagacagtcctcattgacaactgtcggcagcagtgcacgtgccatgtgggtaaagtcgtggtgtgccaggaacacagctgcaagccggggcaggtgtgccagccctccggaggcatcctgagctgcgtcaccaaagacccgtgccacggcgtgacatgccggccacaggagacatgcaaggagcagggtggccagggcgtgtgcctgcccaactatgaggccacgtgctggctgtggggcgacccacactaccactccttcgatggccggaagtttgacttccagggcacctgtaactatgtgctggcaacaactggctgcccgggggtcagcacccagggcctgacacccttcaccgtcaccaccaagaaccagaaccggggcaaccctgctgtgtcctacgtgagagtcgtcaccgtggctgccctcggcaccaacatctccatccacaaggacgagatcggcaaagtccgggtgaacggtgtgctcacagccttgcctgtctccgtggccgacgggcggatttcagtggcccagggtgcatcgaaggcactgctggtggctgactttggactgcaagtcagctatgactggaactggcgggtagacgtgacgctccccagcagctatcatggcgcagtgtgcgggctctgcggtaacatggaccgcaaccccaacaatgaccaggtcttccctaatggcacactggctccctccatacccatctggggcggcagctggcgagccccaggctgggacccactgtgttgggacgaatgtcgggggtcctgcccaacgtgccctgaggaccggttggagcagtacgagggccctggcttctgcggacccctttcatctggcacagggggccccttcaccacctgccatgctcatgtgccacctgagagcttcttcaagggctgtgttctggacgtctgcatgggtggtggggaccgtgacattctttgcaaggctctggcttcctacgtggccgcctgccaggccgctggggttgtcatcgaagactggcgggcacaggttggctgtgagatcacctgcccagaaaacagccactatgaggtctgtggcccaccctgcccagccagctgtccgtcccctgcaccccttacgacgccagccgtatgtgagggcccctgtgtggagggctgccagtgcgacgcgggtttcgtgttaagtgctgaccgctgtgttcccctcaacaacggctgcggctgctgggccaatggcacctaccacgaggcgggcagtgagttttgggctgatggcacctgctcccagtggtgtcgctgcgggcctgggggtggctcgctggtctgcacacctgccagctgtgggctgggtgaagtgtgtggcctcctgccatccggccagcacggctgccagcccgtcagcacagctgagtgccaggcgtggggtgacccccattacgtcactctggatgggcaccgattcgatttccaaggcacctgcgagtacctgctgagtgcaccctgccacggaccacccttgggggctgagaacttcactgtcactgtagccaatgagcaccggggcagccaggctgtcagctacacccgcagtgtcaccctgcaaatctacaaccacagcctgacactgagtgcccgctggccccggaagctacaggtcgacggcgtgttcgtggctctgcctttccagctggactcgctcctgcacgcacacctgagcggcgccgacgtggtggtgaccacaacctcagggctctcgctggctttcgatggggacagcttcgtgcgcctgcgcgtgccggcggcgtacgcggcctctctctgtggcttatgcgggaactacaaccaggaccccgcagacgacctcaaggctgtgggcgggaagcccgctggatggcaggtgggcggggcccagggctgcggggaatgtgtgtccaagccatgcccgtcgccgtgcaccccagagcagcaggagtccttcggcggcccggacgcctgcggcgtgatctccgccaccgacggcccgctggcaccctgccacggccttgtgccgcccgcgcagtacttccagggctgcttgctggacgcctgccaagttcagggccatcctggaggcctctgtcctgcagtggctacctacgtggcagcctgtcaggccgctggggcccagctcggcgagtggaggcggccggacttctgtcccttgcagtgccctgcccacagccactatgagctctgcggtgactcctgccctgtgagctgcccgagcctctcagcacccgagggctgtgagtcggcctgccgtgaaggctgtgtctgcgatgctggcttcgtactcagtggtgacacctgcgtacccgtgggccagtgtggctgcctccatgatggccgctactacccactgggcgaggtcttctacccgggccctgagtgtgagcggcgctgtgagtgtgggccaggtggccatgtcacctgccaggagggcgcagcctgtgggccccatgaggagtgccggttagaggatggtgtccaggcctgtcatgccacaggctgtggccgctgcctggccaacgggggcatccactacatcacccttgatggccgtgtctacgacctgcatggctcctgctcctatgtcttggcccaagtctgccacccaaagcctggggacgaggacttttccatcgtgcttgagaagaatgcagctggagatctccaacgcctcctggttactgtggctggccaggttgtgagcctagctcaggggcagcaggtcaccgtggacggcgaggctgtggccctgcctgtggctgtgggccgcgtgcgggtgaccgccgagggccgaaacatggttctgcagacgaccaaggggctgcggcttctctttgatggcgatgcccacctcctcatgtccatccccagccccttccgtggacggctctgtggcctctgtgggaacttcaatggcaactggagtgacgactttgtcctgcccaatggctcagcagcgtccagtgtggagaccttcggggctgcatggcgggcgcccggctcctccaagggctgtggcgagggctgcgggccccaaggctgcccagtgtgcttggcagaggagactgcaccctatgagagcaacgaggcctgcgggcagctccggaacccccagggccccttcgcgacctgccaggcggtgctgagtccctctgagtacttccgccaatgcgtatacgacctgtgcgcgcaaaagggtgacaaagccttcctgtgccgcagcctggcagcctacacggcggcctgtcaggcagctggcgtggccgtgaagccctggaggacagacagcttctgcccgctccattgccccgcccacagccactactccatctgcactcgcacctgccagggatcctgtgcggctctctccggcctcacgggctgcaccacccgctgttttgagggctgtgagtgcgacgaccgcttcctgctttcccagggtgtctgcatccctgtccaagattgtggctgcacccataatggccgatacttgccggtaaactcctccctgctgacctcagactgcagcgagcgctgttcctgttcctcaagctctggcctgacatgccaggcagctggctgcccaccaggccgtgtatgtgaggtcaaggctgaagcccggaactgctgggccacccgtggtctctgtgtcctgtctgtgggtgccaacctcaccacctttgatggggcccgtggtgccaccacctctcctggtgtctatgagctctcttcccgctgcccaggactacagaataccatcccctggtaccgtgtagttgccgaagtccagatctgccatggcaaaacggaggctgtgggccaggtccacatcttcttccaggatgggatggtgacgttgactccaaacaagggtgtgtgggtgaatggtctccgagtggatctcccagctgagaagttagcatctgtgtccgtgagtcgtacacctgatggctccctgctagtccgccagaaggcaggggtccaggtgtggcttggagccaatgggaaggtggctgtgattgtcagcaatgaccatgctgggaaactgtgtggggcctgtggaaactttgacggggaccagaccaatgattggcatgactcccaggagaagccagcgatggagaaatggagagcgcaggacttctccccatgttatggctgatcagtcatccaccaggaacgaagatttcctgaagaagacctggtccctctggaggttgcagtggctgaaggatgcatcatgtgctcctaccctgctctaccgcttttctgggtcacagaggccaaatgtgagagcattgaataaatatcttaagctaagctgc

SEQ ID NO: 178 - DNA, 1378 bp, Homo sapiens
  source 1..1378: mol_type = genomic DNA
tggcaccatggcccccaaactcatcaccgtcctgtgtctgggattctgcctgaaccagaagatctgcccacatgcgggtgctcaggacaagttctccctgtcagcctggccgagccctgtggttcccctaggaggacgtgtgactctctcctgtcattcccatcttcggtttgtcatatggacaatattccaaacaactgggacccgaagccatgagttgcacactggcctttccaacaacatcaccatcagccctgtgaccccagaacacgcagggacctacagatgtgttggaatttacaagcacgcctcaaagtggtcagctgagagcaactccctgaagatcatcgtcacaggcttgttcacaaaaccctccatctcagcgcacccaagctccctggtgcatgcaggagccagggtgagcctgcgctgtcactcagaactggcctttgatgaatttatcttatacaaagaggggcacatacagcattcccagcagcttgaccaggggatggaggctgggatccattacgtcgaggctgtcttttccatgggtcctgtaacgcctgcccatgcaggagcctacagatgctgtggttgtttcagtcactcccgctatgagtggtcggctcccagtgaccccctggacattgtgatcacaggaaaatacaaaaagccttctctctccacccaggtggaccccatgatgaggctgggagagaagttgaccctcttctgcagctctgaaatctcatttgaccagtaccatctgttcagacacggggttgctcatggacagtggctcagtggagggcagagacacagggaagcattccaggccaacttttctgtgggccgtgcaacgccagtccctggcgggacctatagatgctatggttccttcaatgactctccctataagcccccagtgacccgctgcaactttacaccacaggaaacactaagagtactcctctgtcattcacagaatccacccctgaatctgacacacctcgccctcaaggacagtccagcaacctgcatatgctcactggactctcagtagccatcatctccattggcgtttgcctctctgcttttattggtttctggtgttacataaaatatcacaccaccatggcaaacacagagcccacggaaggccaacggacggatgaagaggagcctgcagcagaagagacacaggagatcatatatgcccagttaaaccaccaggccctctcacagacaggattccctcctgcctcccagtgtccccactacctctcggaggatcctagtatctacatcactgtccaccaagcccaggctgaggccagagctgcccccagtctttggcacaaagggcattaatacg

SEQ ID NO: 179 - DNA, 1810 bp, Homo sapiens
  source 1..1810: mol_type = genomic DNA
aggtgtttacctggcactcaggtgagtggtgcgctctggctgttttctgtcggagccgcccgcctcttccttcagcgcgtcccacaaatcccgacggcacggaggggccccaggccaagggcgatgggcccctgagccctgacaccgcttcgccgctgctgcaggtgcccctggccggcagcgccgccgtggtcccggagcgcggcgacatgccggagctggtggtgaccgcgctgctggcgccgtcgcgcctgtcgctgaagctgctgcgcgccttcatgtggagcctggtgttctcggtggcgctggtggccgcggcggtctacggctgcatagcgctcacgcacgtgctgtgccggccccggcgcggctgctgcgggcgccgtcggagcgcgtcccccgcctgcctgagcgacccctcgctgggtgagcacggtttcctgaacctcaagagctcgggcctgcgtctgcactatgtctcggctggacgaggtaacggacccctcatgctgtttctgcacggcttccctgagaactggttctcctggcgttaccagctccgggagttccagagccgcttccatgttgtggctgtggacttgcgaggctatggcccctcggatgcacctcgggatgtggactgctacacaatcgacctgctgctggtggacatcaaagatgtcatcctaggcctgggttactcgaagtgcatccttgtggcccatgactggggtgccctccttgcctggcatttctccatctactacccatccctggtcgagcggatggttgtggtcagtggtgcccccatgtcggtgtaccaagactattccctgcaccacatcagccagttcttccgttcccactacatgttcctgttccagctgccctggctgcccgagaagctgctgtctatgtctgactttcagattctgaagaccaccctcacccaccgcaagacaggcatcccatgcttgacccccagcgagctcgaggccttcctttataacttctcacagcctggtggcctcactgggcccctcaactactaccgaaacctcttcaggaacttccccctggaaccccaggagctgaccacacccacattgctgctgtggggggagaaggacacttacttggagctggggctggtggaagccatcggcagccgctttgtgccgggccgcttggaggcccacatcctgccaggcatagggcattggatcccacagagcaacccccaggagatgcaccagtacatgtgggccttcttgcaagacctgctggactagtggtccttgctggcctgcccaggaggcatggatactcaggaaggaacacacacccattatctgtgtgtgcctgggagtccatacaatgtccatacatgggtgaactcttgaatcgctcataggcatgggactcctggatcccacacaagcgcacctatgggtgcctcgggacacaccaacccctatactcacacacaggcatggatgcatgtgtgtgtaacaaacactttgaccctgggaactgggtatacctctcttccagtggagccagatgccgagaccgagtgtcccacctcctcccttcctggggcctcactctgcgctttgccaaagtcgcttctctgccatagctgcacagaccttaaaccctgaccttcctgtccctgccttcgacctcctgcctgggtcttcagctcagtgctactctgaatacaatactgctgaccacatttggctacttcagcttaaatgtatgttaattgaaatgaaatacaatgaaaatgcagtgctcagtccca

SEQ ID NO: 180 - DNA, 3147 bp, Homo sapiens
  source 1..3147: mol_type = genomic DNA
agaagtttctcacctaggaatgcgaggggcgctcccgcatctcctgcacatctccacccctgcgcaggaggagatccccaggctgctctctccatctctcctacagctccctgcaaacgagggggaagctgctgagagtccctatcactgctggccttttaatgttgtatgcaaggaggaagagggcgagggataacttggtgctggacaactgacctgcggcccgaagggcctctggggagggggtgcaaaagaggagcggctgggctgggggactccatgcgggggcgatggacagggcggcgctcctgggactggcccgcttgtgcgcgctgtgggcagccctgctcgtgctgttcccctacggagcccaaggaaactggatgtggttgggcattgcctccttcggggttccagagaagctgggctgcgccaatttgccgctgaacagccgccagaaggagctgtgcaagaggaaaccgtacctgctgccgagcatccgagagggcgcccggctgggcattcaggagtgcgggagccagttcagacacgagagatggaactgcatgatcaccgccgccgccactaccgccccgatgggcgccagccccctctttggctacgagctgagcagcggcaccaaagagacagcatttatttatgctgtgatggctgcaggcctggtgcattctgtgaccaggtcatgcagtgcaggcaacatgacagagtgttcctgtgacaccaccttgcagaacggcggctcagcaagtgaaggctggcactgggggggctgctccgatgatgtccagtatggcatgtggttcagcagaaagttcctagatttccccatcggaaacaccacgggcaaagaaaacaaagtactattagcaatgaacctacataacaatgaagctggaaggcaggctgtcgccaagttgatgtcagtagactgccgctgccacggagtttccggctcctgtgctgtgaaaacatgctggaaaaccatgtcttcttttgaaaagattggccatttgttgaaggataaatatgaaaacagtatccagatatcagacaaaacaaagaggaaaatgcgcaggagagaaaaagatcagaggaaaataccaatccataaggatgatctgctctatgttaataagtctcccaactactgtgtagaagataagaaactgggaatcccagggacacaaggcagagaatgcaaccgtacatcagagggtgcagatggctgcaacctcctctgctgtggccgaggttacaacacccatgtggtcaggcacgtggagaggtgtgagtgtaagttcatctggtgctgctatgtccgttgcaggaggtgtgaaagcatgactgatgtccacacttgcaagtaaccactccatccagccttgggcaagatgcctcagcaatatacaatggcattgcaaccagagaggtgcccatccctgtgcagcgctagtaaagttgactcttgcagtggaatccctagaaccttggacctgagagtttcccttacctgatcgacatattttcctttatctgatcaacccatcaatcatgtggatttcttgggattctaatgttgaaaaggtttatattcaccttttgatgatttggggaatatatattgacatacaaggaagataatctgtttcctaagcaagaaataacaggaaagatcccttatgccaggaggcctgccatactcaggataagatccttgaatatggaacttagttacaggactcaataatggtgggtgaacattagtcatttttaaaagacacctcttatagcaataaggagacattaacatgaatctcatttattctctcagtattttaactgaagaaattatactgtttgtgtgtggatagaagatgttgaaaagttaacataagcattgggtgctgacttaccctttcatgtacttccaaagaaaggtaatcaaaaagaatcttcttaagtgatataatatccctaaaaaaatgatcattacagatgtttagtgacaaagaatcaatatgtaaaaagtataatgaatgatttagattttaagtgccttttcactgggagaatctggaaaaacctccataaggtatatagcaatctttgatctttagattcatacttttatcacagatcagtttcaactgttaaaaacccacctctgagatactggggggaggatcctgaaacatgcgggaaaaggagaggtaaacagtggaggtaaaaatataatttcatacattgtaaagaaaagcaccctttaaatgtgtaaagacagtgttttgtaaagaattttgtttaaaaagtttctattttgtaaatacagtacttaagttatatgatttatattaaaacatttattgacaaagcctaagagctaaggcagtaaaattatctcataaataatattagcttattttttttcatactattaatgctatttttttggacatcgaagagaatttaacttagcagttagttatatggatgtgtatttcttgctaaaatgacagttttatatgttatagattaaaatatgttgcaaaatatcaaaaatttgtgttatttcagcagtaagattaattgaattctcttttcacattagttatgcttaactcataaggttattataataaattatattagtaaaagtcttaactggaaaaaagaatctaaatcagaatagtgatcaatttgtggatttgatatcctggatatttattatattttatgtaatgctgcatttctatttgaatgttaagtggtctttcttgtttttaatattcatgcatgtatattcatcatattttacaaggttcctggtaaaaattacagggctctatttaaggatgtattttaatgtaaatgcttatgttttttatgaattgttaaatatttcagtattatatagaaaaaaatagatttttaaaattcagaatggacaaagagaatattcattttcttattaataagataaagaaatgtttccctgccccacagtcttcattctatttctctttaattttattcactgaggcagagaaacaatttttgaaaaagagcaaacccatggaaaatgtctcagatctaatattaaaatcaagactaagcatttaactgtga

SEQ ID NO: 181 - DNA, 1190 bp, Homo sapiens
  source 1..1190: mol_type = genomic DNA
ataaacattgggctgcacatagagacttaattttagatttagacaaaatggaaattatttcatcaaaactattcattttattgactttagccacttcaagcttgttaacatcaaacattttttgtgcagatgaattagtgatctccaatcttcacagcaaagaaaattatgacaaatattctgagcctagaggatacccaaaaggggaaagaagcctcaattttgaggaattaaaagattggggaccaaaaaatgttattaagatgagtacacctgcagtcaataaaatgccacactccttcgccaacttgccattgagatttgggaggaacgttcaagaagaaagaagtgctggagcaacagccaacctgcctctgagatctggaagaaatatggaggtgagcctcgtgagacgtgttcctaacctgccccaaaggtttgggagaacaacaacagccaaaagtgtctgcaggatgctgagtgatttgtgtcaaggatccatgcattcaccatgtgccaatgacttattttactccatgacctgccagcaccaagaaatccagaatcccgatcaaaaacagtcaaggagactgctattcaagaaaatagatgatgcagaattgaaacaagaaaaataagaaacctggagcctgtccctaaagctgtggcctgtaatctacaaatggctctatagcgaagaccacacggaagagtagctacatacacttcatcagctatggatcatcaacggcaatttttccttgtcagtacagctataatagtatcttgaaagttgtaaaaaaattaaagcatatttgttacgtaaagttaaaatgatttttgtctgaataaaaaaaaagcattgcaaatgctttagaaatctctgataatggagagagagacagaggaccctcctcactaccctatataaaaatcattggcacagttacacttaataaaaaaaattaaacagaagagcaccctgaaaaacattatgatggaaattaaatagtatgccagaataacatggttgacaaataagtgaacaaggattaaaaatcacttacaaacgtgtttctgtacaccctttctatcgtgtcaaatgttaatgaatctgtgatcaattgaaatgtaaatgtctgtgtaaaactacaaaataaaaactcttagactttagggagaaaagaaaa

SEQ ID NO: 182 - DNA, 4081 bp, Homo sapiens
  source 1..4081: mol_type = genomic DNA
cggctatccgcgcgggagtgcgccacgcggggccggagcgcctattagccgccaggacctcggagcgccccgaccacccctgagcccctctggcttcggagccccccagcaccccttcccgggtcccctcgcccaccctaatccactctccctccctttcccggattccctcgctcaccccatcctctctcccgccccttcctggattccctcacccgtctcgatcccctctccgccctttcccagagacccagagcccctgaccccccgcgccctccccggagccccccgcgcgtgccgcggccatggcggccgtgcgcggggcgcccctgctcagctgcctcctggcgttgctggccctgtgccctggagggcgcccgcagacggtgctgaccgacgacgagatcgaggagttcctcgagggcttcctgtcagagctagaacctgagccccgggaggacgacgtggaggccccgccgcctcccgagcccaccccgcgggtccgaaaagcccaggcggggggcaagccagggaagcggccagggacggccgcagaagtgcctccggaaaagaccaaagacaaagggaagaaaggcaagaaagacaaaggccccaaggtgcccaaggagtccttggaggggtcccccaggccgcccaagaaggggaaggagaagccacccaaggccaccaagaagcccaaggagaagccacctaaggccaccaagaagcccaaggagaagccacccaaggccaccaagaagcccaaagagaagccacccaaggccaccaagaagcccccgtcagggaagaggccccccattctggctccctcagaaaccctggagtggccactgcccccaccccccagccctggccccgaggagctaccccaggagggaggggcgcccctctcaaataactggcagaatccaggagaggagacccatgtggaggcacgggagcaccagcctgagccggaggaggagaccgagcaacccacactggactacaatgaccagatcgagagggaggactatgaggactttgagtacattcggcgccagaagcaacccaggccacccccaagcagaaggaggaggcccgagcgggtctggccagagccccctgaggagaaggccccggccccagccccggaggagaggattgagcctcctgtgaagcctctgctgcccccgctgccccctgactatggtgatggttacgtgatccccaactacgatgacatggactattactttgggcctcctccgccccagaagcccgatgctgagcgccagacagacgaagagaaggaggagctgaagaaacccaaaaaggaggacagcagccccaaggaggagaccgacaagtgggcagtggagaagggcaaggaccacaaagagccccgaaagggcgaggagttggaggaggagtggacgcctacggagaaagtcaagtgtccccccattgggatggagtcacaccgtattgaggacaaccagatccgagcctcctccatgctgcgccacggcctgggggcacagcgcggccggctcaacatgcagaccggtgccactgaggacgactactatgatggtgcgtggtgtgccgaggacgatgccaggacccagtggatagaggtggacaccaggaggactacccggttcacaggcgtcatcacccagggcagagactccagcatccatgacgattttgtgaccaccttcttcgtgggcttcagcaatgacagccagacatgggtgatgtacaccaacggctatgaggaaatgacctttcatgggaacgtggacaaggacacacccgtgctgagtgagctcccagagccggtggtggctcgtttcatccgcatctacccactcacctggaatggcagcctgtgcatgcgcctggaggtgctggggtgctctgtggcccctgtctacagctactacgcacagaatgaggtggtggccaccgatgacctggatttccggcaccacagctacaaggacatgcgccagctcatgaaggtggtgaacgaggagtgccccaccatcacccgcacttacagcctgggcaagagctcacgaggcctcaagatctatgccatggagatctcagacaaccctggggagcatgaactgggggagcccgagttccgctacactgctgggatccatggcaacgaggtgctgggccgagagctgttgctgctgctcatgcagtacctgtgccgagagtaccgcgatgggaacccacgtgtgcgcagcctggtgcaggacacacgcatccacctggtgccctcactgaaccctgatggctacgaggtggcagcgcagatgggctcagagtttgggaactgggcgctgggactgtggactgaggagggctttgacatctttgaagatttcccggatctcaactctgtgctctggggagctgaggagaggaaatgggtcccctaccgggtccccaacaataacttgcccatccctgaacgctacctttcgccagatgccacggtatccacggaggtccgggccatcattgcctggatggagaagaaccccttcgtgctgggagcaaatctgaacggcggcgagcggctagtatcctacccctacgatatggcccgcacgcctacccaggagcagctgctggccgcagccatggcagcagcccggggggaggatgaggacgaggtctccgaggcccaggagactccagaccacgccatcttccggtggcttgccatctccttcgcctccgcacacctcaccttgaccgagccctaccgcggaggctgccaagcccaggactacaccggcggcatgggcatcgtcaacggggccaagtggaacccccggaccgggactatcaatgacttcagttacctgcataccaactgcctggagctctccttctacctgggctgtgacaagttccctcatgagagtgagctgccccgcgagtgggagaacaacaaggaggcgctgctcaccttcatggagcaggtgcaccgcggcattaagggggtggtgacggacgagcaaggcatccccattgccaacgccaccatctctgtgagtggcattaatcacggcgtgaagacagccagtggtggtgattactggcgaatcttgaacccgggtgagtaccgcgtgacagcccacgcggagggctacaccccgagcgccaagacctgcaatgttgactatgacatcggggccactcagtgcaacttcatcctggctcgctccaactggaagcgcatccgggagatcatggccatgaacgggaaccggcctatcccacacatagacccatcgcgccctatgaccccccaacagcgacgcctgcagcagcgacgcctacaacaccgcctgcggcttcgggcacagatgcggctgcggcgcctcaacgccaccaccaccctaggcccccacactgtgcctcccacgctgccccctgcccctgccaccaccctgagcactaccatagagccctggggcctcataccgccaaccaccgctggctgggaggagtcggagactgagacctacacagaggtggtgacagagtttgggaccgaggtggagcccgagtttgggaccaaggtggagcccgagtttgagacccagttggagcctgagtttgagacccagctggaacccgagtttgaggaagaggaggaggaggagaaagaggaggagatagccactggccaggcattccccttcacaacagtagagacctacacagtgaactttggggacttctgagatcagcgtcctaccaagaccccagcccaactcaagctacagcagcagcacttcccaagcctgctgaccacagtcacatcacccatcagcacatggaaggcccctggtatggacactgaaaggaagggctggtcctgcccctttgagggggtgcaaacatgactgggacctaagagccagaggctgtgtagaggctcctgctccacctgccagtctcgtaagagatggggttgctgcagtgttggagtaggggcagagggagggagccaaggtcactccaataaaacaagctcatggca

SEQ ID NO: 183 - DNA, 2458 bp, Homo sapiens
  source 1..2458: mol_type = genomic DNA
gccgactcgggctcggctcggctctgcgctgctccggacggctgtgaccgctggccgggggctcgggccgccggtacccacggaccgcgcgcccgggtgcctgctccgctaagcccctcgccccgcgcggacctcggtatccagcgccctgctgcccgggctctccccgcgcgccctactgccgcgaggtcagtccgcagcctccggtgcgccagcgctcgccttcctcctcctggacttcggccctttgccgccctcaccacgccatggctcatgtccccgctcggaccagcccgggacccgggccccagctgctgctgctgctgctgccgttgtttctgctgttgctccgggatgtggccggcagccacagggcccccgcctggtccgcactgcccgcggccgccgacggcctgcagggggacagggatctccagcggcaccctggggacgcggccgccacgttgggccccagcgcccaggacatggtcgctgtccacatgcacaggctctatgagaagtacagccggcagggcgcgcggccgggagggggcaacacggtccgcagcttcagggccaggctggaagtggtcgaccagaaggccgtgtatttcttcaacctgacttccatgcaagactcggaaatgatccttacggccactttccacttctactcagagccgcctcggtggcctcgagcgctcgaggtgctatgcaagccgcgggccaagaacgcttcaggccgcccgctgcccctgggcccgcccacacgccagcacctgctcttccgcagcctctcgcagaacacggccacacaggggctactccgcggggccatggccctggcgcccccaccgcgcggcctgtggcaggccaaggacatctcccccatcgtcaaggcggcccgccgggatggcgagctgctcctctccgcccagctggattctgaggagagggacccgggggtgccccggcccagcccctatgcgccctacatcctagtctatgccaacgatctggccatctcggagcccaacagcgtggcagtgacgctgcagagatacgaccccttccctgccggagaccccgagccccgcgcagcccccaacaactcagcggacccccgcgtgcgccgagccgcgcaggccactgggcccctccaggacaacgagctgccggggctggatgagaggccgccgcgcgcccacgcacagcacttccacaagcaccagctgtggcccagccccttccgggcgctgaaaccccggccagggcgcaaagaccgcaggaagaagggccaggaggtgttcatggccgcctcgcaggtgctggactttgacgagaagacgatgcagaaagcccggaggaagcagtgggatgagccgagggtgtgctcccggaggtacctgaaggtggacttcgcagacatcggctggaatgaatggataatctcaccgaaatcttttgatgcctactactgcgcgggagcatgtgagttccccatgcctaagatcgttcgtccatccaaccatgccaccatccagagcattgtcagggctgtgggcatcatccctggcatcccagagccctgctgtgttcccgataagatgaactcccttggggtcctcttcctggatgagaatcggaatgtggttctgaaggtgtaccccaacatgtccgtggacacctgtgcctgccggtgagaccactccagggtggaaagaagccacgcccagcagagctgccttctcggagccttctgcaaccaggacttgtggtgcagctgcagacacagagcacagctcatgggcaacatcactggggcccagagagagctgtccgccagtgcatcattagggggtctttcattgctagtgactagccccttaaatgccagcctgagtacctgaaggaatctgggaattagccctggcctgaaagtggcccatcattcatacccactgttctgaaggcttgaaaacaaaacatatccacaacattggcttgatgtgatcatcatctcataactgagcaagaagactatgcaaatcttagggcgctcgctccctgcacacggaaagaactctgtttaaatgctcagttcagaacactttgggccacatagtgattttggaaaacaggataatcgtggtgtaaatgagtgtttcctttcaaagtccactgcagagcttttatccatatggtatgcacatgtagccaatattggtttctttttcttaatatatatattttattttaaaacaacaaaaagggagggcgttgacaccattccccacagagatagtcatgctgagtgtgggttgtttaaacatgcatattgaaataacacatatagtaacgtgggaatactaaaaaataaccaagattttatatttttgtaaattatactttctatactgtagattgtgtatgttatgtgtttttatggaaagctaat

SEQ ID NO: 184 - DNA, 665 bp, Homo sapiens
  source 1..665: mol_type = genomic DNA
acctttattttctgtctttcaactggcaagagtcattttgaccagcaggttaatcaactctaagacagatcctcacgcaaagaggcaactgaaaggatgaaatcactgacttggatcttgggcctttgggctcttgcagcgtgtttcacacctggtgagagtcaaagaggccccaggggaccatatccacctggaccactggctcctcctcctccaccatgttttccttttggaacaggatttgttccaccaccccatcctccaccctatggtccagggagatttccaccacccctttctccaccctatggtccagggagaatcccaccatcccctcctccaccctatggtccagggagaattcaatcacactctcttcctcctccttatggcccaggttatccacagccaccttcccaaccaagaccctatccacctggacctccatttttccctgtaaattctccaactgatcctgccctccctactcctgcaccctaaatacagacaactgcaacaggtgccaccacccacaaaagacaacactaccctcgtaactactgcttctactacccaaaaataagaatttcaacactacttccaagagacttttagataaaatcacttccatttttggatgagaataaagatttccaaagcactga

SEQ ID NO: 185 - DNA, 1790 bp, Homo sapiens
  source 1..1790: mol_type = genomic DNA
cccgggcccgggtccccgcctcccctgcaggcggactcgcccgctcccaggccggacccgcgcccgggacagggacccggccgagtcgagccgtcgcgccagcgctgcgccgccggtcggtgcgcctagcggatcggagctgcgcgcggaaccgtgctgccccgccccgctccacccgtgagggtggcccgaggcagccgggatgacagctctccccaggaatcctgctgcctgctgagaaacatggtcagcaagtcccgctggaagctcctggccatgttggctctggtcctggtcgtcatggtgtggtattccatctcccgggaagacagtttttattttcccatcccagagaagaaggagccgtgcctccagggtgaggcagagagcaaggcctctaagctctttggcaactactcccgggatcagcccatcttcctgcggcttgaggattatttctgggtcaagacgccatctgcttacgagctgccctatgggaccaaggggagtgaggatctgctcctccgggtgctagccatcaccagctcctccatccccaagaacatccagagcctcaggtgccgccgctgtgtggtcgtggggaacgggcaccggctgcggaacagctcactgggagatgccatcaacaagtacgatgtggtcatcagattgaacaatgccccagtggctggctatgagggtgacgtgggctccaagaccaccatgcgtctcttctaccctgaatctgcccacttcgaccccaaagtagaaaacaacccagacacactcctcgtcctggtagctttcaaggcaatggacttccactggattgagaccatcctgagtgataagaagcgggtgcgaaagggtttctggaaacagcctcccctcatctgggatgtcaatcctaaacagattcggattctcaaccccttcttcatggagattgcagctgacaaactgctgagcctgccaatgcaacagccacggaagattaagcagaagcccaccacgggcctgttggccatcacgctggccctccacctctgtgacttggtgcacattgccggctttggctacccagacgcctacaacaagaagcagaccattcactactatgagcagatcacgctcaagtccatggcggggtcaggccataatgtctcccaagaggccctggccattaagcggatgctggagatgggagctatcaagaacctcacgtccttctgacctgggcaagagctgtagcctgtcggttgcctactctgctgtctgggtgacccccatgcgtggctgtgggggtggctggtgccagtatgacccacttggactcaccccctcttggggagggagttctgggcctggccaggtctgagatgaggccatgcccctggctgctcttatggagccgagatccagtcagggtgggggcgctggagccgtgggagcccggccagggcagggggctcgttgctgtggcaccccctctctgccagcaccaagagattatttaatgggctatttaattaaggggtaggaaggtgctgtgggctggtcccacacatccaggaaagaggccagtagagaattctgcccactttttataaaaacttacagcgatggccccaccaaggcctagacacggcactggcctcccaggagggcaggggcattgggaatgggtgggtgccctccagagaggggctgctacctcccagcaggcatgggaagagcactggtgtgggggttccaccgagaaggggacctcatctagaaaagaggttaca

SEQ ID NO: 186 - DNA, 2332 bp, Homo sapiens
  source 1..2332: mol_type = genomic DNA
cttcctgaaaggatctggagacaccagctccacaagtcctggtgtctttaaaaggatcagcttgaggaataaggctcgtctgagagctgtgacattcatctgactctagtgaaagtccaacagccactccctttttggcctccaactgggcaccatgagggcctgcatctccctggtattggccgtgctgtgtggcctggcctgggctgaggaccacaaagagtcagagccattgccacagctggaggaagagacagaagaggccctcgccagcaacttgtactcggcacccacctcctgccagggccgctgctacgaagcctttgacaagcaccaccaatgtcactgcaatgcccgctgccaagagtttgggaactgctgcaaggattttgagagcctgtgtagtgaccacgaggtctcccacagcagtgatgccataacaaaagaggagattcagagcatctctgagaagatctacagggcagacaccaacaaagcccagaaggaagacatcgttctcaatagccaaaactgcatctccccgtcagagaccagaaaccaagtggatcgctgcccaaagccactcttcacttatgtcaatgagaagctgttctccaagcccacctatgcagccttcatcaacctcctcaacaactaccagcgggcaacaggccatggggagcacttcagtgcccaggagctggccgagcaggacgccttcctcagagagatcatgaagacagcagtcatgaaggagctctacagcttcctccatcaccagaatcgctatggctcagagcaagagtttgtcgatgacttgaagaacatgtggtttgggctctattcaagaggcaatgaagagggggactcgagtggctttgaacatgtcttctcaggtgaggtaaaaaaaggcaaggttactggcttccataactggatccgcttctacctggaggagaaggagggtctggttgactattacagtcacatctacgatgggccttgggattcttaccccgatgtgctggcaatgcagttcaactgggacggctactataaggaagtgggctctgctttcatcggcagcagccctgagtttgagtttgcactctactccctgtgcttcatcgccaggccaggcaaagtgtgccagttaagcctgggaggatatcccttagctgtccggacatatacctgggacaagtccacctatgggaatggcaagaagtacatcgccacagcctacatagtgtcttccacctaatagaacttcgagccagaaaggggcatgagggctcttgcgagactgaagtgctatcttctctggactagagagaagagggagaggactggaagggatcaccaaatctcaaagcaatgagaagcattcctaaatcccaaagtgcccacatgggaaagagataaaatgtacaaattagaaaaatgtggataaacagtcaaacctttatcctctagaattttggcaatgttgactaagaaacagagtccaagcagagaaggtaggaaccctccatagctctctgccctgatgtgtgggggaactaggaagaagtcctttgacctcaccaggcctcatgcttccctttaatgtaaagggaaggggtttgcccactttcctctttttggggttggtgagagggcaaaccctgatatttttactgtgaaggtgttttcagttgttcttaggaagaacagctgatagaaattcaagattactataatggctgttattatacacagctctgtaaactaccactcagccctgtgttggggtcctcaaagaagtaaggccacagtaatcaagcaagggcctttggttttttccagagttagatcctctcagaacagagtctgggagaactccaatgctgaatggagaagggtaataggttggtgcagtgaatgggctgggggtggggtggccttctccaggcctgagtgtttttgtgtccagctcagtatctgcaacaagaagtttcccacttgtggatgtttagtgcagccacagacttgtattttgatccccaatttttttttgaaagagttctcctcataggaggatgattcagcatcagaagaagaaggaacccatagcttggtgtcattaacataattattttaagccttatccagcagccataatttgaataactctacgagaccagagagactgtagttccctattttaacctcaattatgcatttgtcccccaaccccactgagaactaaatgctgtaccacagagccgggtgtgaactatggtttagaaggttcaagtttccaattaaagtcattgaagaaaacttgaaa

SEQ ID NO: 187 - DNA, 1933 bp, Homo sapiens
  source 1..1933: mol_type = genomic DNA
gcgtgcgccccgccccgcgcctgcggctctctctgcggcttggcccgttagaggcggcttgtgtccacgggacgcgggcggatcttctccggccatgaggaagccagccgctggcttccttccctcactcctgaaggtgctgctcctgcctctggcacctgccgcagcccaggattcgactcaggcctccactccaggcagccctctctctcctaccgaatacgaacgcttcttcgcactgctgactccaacctggaaggcagagactacctgccgtctccgtgcaacccacggctgccggaatcccacactcgtccagctggaccaatatgaaaaccacggcttagtgcccgatggtgctgtctgctccaacctcccttatgcctcctggtttgagtctttctgccagttcactcactaccgttgctccaaccacgtctactatgccaagagagtcctgtgttcccagccagtctctattctctcacctaacactctcaaggagatagaagcttcagctgaagtctcacccaccacgatgacctcccccatctcaccccacttcacagtgacagaacgccagaccttccagccctggcctgagaggctcagcaacaacgtggaagagctcctacaatcctccttgtccctgggaggccaggagcaagcgccagagcacaagcaggagcaaggagtggagcacaggcaggagccgacacaagaacacaagcaggaagaggggcagaaacaggaagagcaagaagaggaacaggaagaggagggaaagcaggaagaaggacaggggactaaggagggacgggaggctgtgtctcagctgcagacagactcagagcccaagtttcactctgaatctctatcttctaacccttcctcttttgctccccgggtacgagaagtagagtctactcctatgataatggagaacatccaggagctcattcgatcagcccaggaaatagatgaaatgaatgaaatatatgatgagaactcctactggagaaaccaaaaccctggcagcctcctgcagctgccccacacagaggccttgctggtgctgtgctattcgatcgtggagaatacctgcatcataacccccacagccaaggcctggaagtacatggaggaggagatccttggtttcgggaagtcggtctgtgacagccttgggcggcgacacatgtctacctgtgccctctgtgacttctgctccttgaagctggagcagtgccactcagaggccagcctgcagcggcaacaatgcgacacctcccacaagactccctttgtcagccccttgcttgcctcccagagcctgtccatcggcaaccaggtagggtccccagaatcaggccgcttttacgggctggatttgtacggtgggctccacatggacttctggtgtgcccggcttgccacgaaaggctgtgaagatgtccgagtctctgggtggctccagactgagttccttagcttccaggatggggatttccctaccaagatttgtgacacagactatatccagtacccaaactactgttccttcaaaagccagcagtgtctgatgagaaaccgcaatcggaaggtgtcccgcatgagatgtctgcagaatgagacttacagtgcgctgagccctggcaaaagtgaggacgttgtgcttcgatggagccaggagttcagcaccttgactctaggccagttcggatgagctggcgtctattctgcccacaccccagcccaacctgcccacgttctctattgttttgagaccccattgctttcaggctgccccttctgggtctgttactcggcccctactcacatttccttgggttggagcaacagtcccagagagggccacggtgggagctgcgccctccttaaaagatgactttacataaaatgttgatcttca

SEQ ID NO: 188 - DNA, 2945 bp, Homo sapiens
  source 1..2945: mol_type = genomic DNA
aaggagggaggcggtggtagcggcggcggctgctgaggaggaggagggggagcggagggaggtgtttctgtcagttccggctgtttgttcgggaagtggatccgccgctgccggagcagcccgaagggagctgcggatcgcgaggccagtaccgaccccgcccgcccgcgcgcaccgcccccgcccgccatggcccgggactacgaccacctcttcaagctgctcatcatcggcgacagcggtgtgggcaagagcagtttactgttgcgttttgcagacaacactttctcaggcagctacatcaccacgatcggagtggatttcaagatccggaccgtggagatcaacggggagaaggtgaagctgcagatctgggacacagcggggcaggagcgcttccgcaccatcacctccacgtattatcgggggacccacggggtcattgtggtttacgacgtcaccagtgccgagtcctttgtcaacgtcaagcggtggcttcacgaaatcaaccagaactgtgatgatgtgtgccgaatattagtgggtaataagaatgacgaccctgagcggaaggtggtggagacggaagatgcctacaaattcgccgggcagatgggcatccagttgttcgagaccagcgccaaggagaatgtcaacgtggaagagatgttcaactgcatcacggagctggtcctccgagcaaagaaagacaacctggcaaaacagcagcagcaacaacagaacgatgtggtgaagctcacgaagaacagtaaacgaaagaaacgctgctgctaatggcacccagtccactgcagagactgcactgcggtccctcccccagcccgaggcccacggaggttcctcgggggacagtctcagtttcgtgccgttatttaaagaattctctccatgtttttgtatcgggaggtgccatcggcacttcctcccccgccctcctcgagtgccaagaaggtgttggaccagcccgcccttccctactggtgccccctcctccccggccaaggcgcctggacctggcgaggacgctgcccgccgagcggactgattcgcagagtctgtacatagtgtatattgctctacccggccgcacaccacgtcctgctctggcttttgccttcttgatgccagcctgctgcaacagaccctccccgcgcccctccccagcccatcttactgcaagcagcgtcctgaggagacagcggcacgttctagctgcgtctgcggccagcccgtgccagtggagtgggctccgcgttgctcattctctccgacaggttgtcagcctctgtccccgctgcacagggtcttgccccttctccggggcctgtgccagctcccttccctccccgttgtcctgtccccacagccattctgggagctggggaacctggtctcaaggcaggccctgcagttccacagaggtggcaggtcttgccctttggccaacagatttcttgtcctgccttctagatgcctctgagctccaaacccagggcagccatggcttctcatttacaccaacaggtttcagttccaacagaaaggtcggggtaggttcgtgcagagatggggctggcaggggggctatgggaggattattttaacagatcaagaaaatgaagccaaatcaagtgaattaaattcctcacaattattttctttccctgaggtttgattggcacagcagcaaaagttgaggccaccccacttgtgtccactgtttttagaaaaaaatgaatggcttcctgccattgtggggctggactcttgggctttcttggtgggagcggagaaggggcctcccacccttgtccgagttgcctcccactggaggtcaggagtctacactgcagcctcgggcactgtggggagtgcatgcctggggcctctgggtggggaccatggacaggccctggtcactgtcctaacctttgtcaggacaaaggtagcaagaggatttcctggcgggtgggaaggaatggctggggcggccagttttgacacgccccagtgccctggagaacaaccagggtcatctgcacttgatgactgctccccgacccccagcccggacacctcattcccctcccactacagggatcaagtgacctgggaagaaccgagtttaacaccaggatgtgtttccttagatttcctttcctaggcgatttccagggagagccctgattggacaatcacatcacagatcacactgcagtttccatgttagcactgtggatgggtttttaatcaataaaaactgggggtttcttctcaccgactctccacttgcccaaactgccaaaagctggtgattctgggacaggccttcactttggagccacgggatggggtgggggagccccatgggcctgggaaggagggtgctgtggagggggctgcagggctgaccagcaggcagcctcatctggtcgggggcgggggcggcaggagcagaagcggggtctccgtccttgggactgtcctggttggccacgggccctgaggatgcacggtgcctggggctcctgtgccggtgggcggggggcatgctggcctctgagcgatcaggcgaggccagcgagggtgtgcttgcaaattcaagcaataagaggggggttcctgggggcttccagcccaggctagaagcccccatggcttctggcagctggacatcagccccaggtattggggtgattttggtcatgacagtgtgcctgtcccactgttacacgcatgaatgggggttatggggtgggggtggggactcagggctggaccgacgtcctagtggacctgatgtgaaattcctgtcaaacaaacaccacttttcaatggtttgctaggagtatttctgtattgaaagtttctaattatgctttttaaaaaaatactaaaaataaaggttcaagctgccaaatttt

SEQ ID NO: 189 - DNA, 2544 bp, Homo sapiens
  source 1..2544: mol_type = genomic DNA
aggtgctccgctccagagttgagcgcaggtgagctcctgcgcgttccgggggcgttcctccagtcaccctcccgccgttacccgcggcgcgcccgagggagtctcctccagaccctccctcccgttgctccaaactaatacggactgaacggatcgctgcgaggattatcttacactgaactgatcaagtactttgaaaatgacttcgaaatttctcttggtgtccttcatacttgctgcactgagtctttcaaccaccttttctctccaaccagaccagcaaaaggttctactagtttcttttgatggattccgttgggattacttatataaagttccaacgccccattttcattatattatgaaatatggtgttcacgtgaagcaagttactaatgtttttattacaaaaacctaccctaaccattatactttggtaactggcctctttgcagagaatcatgggattgttgcaaatgatatgtttgatcctattcggaacaaatctttctccttggatcacatgaatatttatgattccaagttttgggaagaagcgacaccaatatggatcacaaaccagagggcaggacatactagtggtgcagccatgtggcccggaacagatgtaaaaatacataagcgctttcctactcattacatgccttacaatgagtcagtttcatttgaagatagagttgccaaaattattgaatggtttacgtcaaaagagcccataaatcttggtcttctctattgggaagaccctgatgacatgggccaccatttgggacctgacagtccgctcatggggcctgtcatttcagatattgacaagaagttaggatatctcatacaaatgctgaaaaaggcaaagttgtggaacactctgaacctaatcatcacaagtgatcatggaatgacgcagtgctctgaggaaaggttaatagaacttgaccagtacctggataaagaccactataccctgattgatcaatctccagtagcagccatcttgccaaaagaaggtaaatttgatgaagtctatgaagcactaactcacgctcatcctaatcttactgtttacaaaaaagaagacgttccagaaaggtggcattacaaatacaacagtcgaattcaaccaatcatagcagtggctgatgaagggtggcacattttacagaataagtcagatgactttctgttaggcaaccacggttacgataatgcgttagcagatatgcatccaatatttttagcccatggtcctgccttcagaaagaatttctcaaaagaagccatgaactccacagatttgtacccactactatgccacctcctcaatatcaccgccatgccacacaatggatcattctggaatgtccaggatctgctcaattcagcaatgccaagggtggtcccttatacacagagtactatactcctccctggtagtgttaaaccagcagaatatgaccaagaggggtcatacccttatttcataggggtctctcttggcagcattatagtgattgtattttttgtaattttcattaagcatttaattcacagtcaaatacctgccttacaagatatgcatgctgaaatagctcaaccattattacaagcctaatgttactttgaagtggatttgcatattgaagtggagattccataattatgtcagtgtttaaaggtttcaaattctgggaaaccagttccaaacatttgcagaaaccattaagcagttacatatttaggtatacacacacacacacacacacatacacacacacggaccaaaatacttacacctgcaaaggaataaagatgtgagagtatgtctccattgttcactgtagcatagggatagataagatcctgctttatttggacttggcgcagataatgtatatatttagcaactttgcactatgtaaagtaccttatgtattgcactttaaatttctctcctgatgggtactttaatttgaaatgcactttatgcacagttatgtcttataacttgattgaaaatgacaactttttgcacccatgtcacagaatacttgttacgcattgttcaaactgaaggaaatttctaataatcccgaataatgaacgtagaaatctatctccataaattgagagaagaagaaggtgataagtgttgaaaattaaatgtgataacctttgaaccttgaattttggagatgtattcccaacagcagaatgcaactgtgggcatttcttgtcttatttctttccagagaacgtggttttcatttatttttccctcaaaagagagtcaaatactgacagattcgttctaaatatattgtttctgtcataaaattattgtgatttcctgatgagtcatattactgtgattttcataataatgaagacaccatgaatatactttttttctatatagttcagcaatggcctgaatagaagcaaccaggcaccatctcagcaatgttttctcttgtttgtaattatttgctcctttgaaaattaaatcactattaattacattaa

SEQ ID NO: 190 - DNA, 883 bp, Homo sapiens
  source 1..883: mol_type = genomic DNA
ggccggttatttttctgtgtgtcccatacaggcccccaccatgaagggtttcacagccactctcttcctctggactctgatttttcccagctgcagtggaggcggcggtgggaaagcctggcccacacacgtggtctgtagcgacagcggcttggaagtgctctaccagagttgcgatccattacaagattttggcttttctgttgaaaagtgttccaagcaattaaaatcaaatatcaacattagatttggaattattctgagagaggacatcaaagagctttttcttgacctagctctcatgtctcaaggctcatctgttttgaatttctcctatcccatctgtgaggcggctctgcccaagttttctttctgtggaagaaggaaaggagagcagatttactatgctgggcctgtcaataatcctgaatttactattcctcagggagaataccaggttttgctggaactgtacactgaaaaacggtccaccgtggcctgtgccaatgctactatcatgtgctcctgactgtggcctgtagcaaaaatcacagccagctgcatctcgtgggacctccaagctcctctgactgaacctactgtgggaggagaagcagctgatgacagagagaggctctacaaagaagcgcccccaaagagtgcagctgctaattttagtcccaggaccagacatccccagactccacagatgtaatgaagtccccgaatgtatctgtttctaaggagcctcttggcagtccttaagcagtcttgagggtccatcctttttctctaattggtcgcctcccaccagactcacctgcttttcaactttttaggagtgcttcctcacagttaccaagaataaagaaagctggccacc

SEQ ID NO: 191 - DNA, 1509 bp, Homo sapiens
  source 1..1509: mol_type = genomic DNA
ttcagaatcttcttccttcatcacaggatcaacacatttcatctgggcttcttaaatctaaatctttaaaatgactaagttttcttccttttctctgtttttcctaatagttggggcttatatgactcatgtgtgtttcaatatggaaattattggagggaaagaagtgtcacctcattccaggccatttatggcctccatccagtatggcggacatcacgtttgtggaggtgttctgattgatccacagtgggtgctgacagcagcccactgccaatatcggtttaccaaaggccagtctcccactgtggttttaggcgcacactctctctcaaagaatgaggcctccaaacaaacactggagatcaaaaaatttataccattctcaagagttacatcagatcctcaatcaaatgatatcatgctggttaagcttcaaacagccgcaaaactcaataaacatgtcaagatgctccacataagatccaaaacctctcttagatctggaaccaaatgcaaggttactggctggggagccaccgatccagattcattaagaccttctgacaccctgcgagaagtcactgttactgtcctaagtcgaaaactttgcaacagccaaagttactacaacggcgacccttttatcaccaaagacatggtctgtgcaggagatgccaaaggccagaaggattcctgtaagggtgactcagggggccccttgatctgtaaaggtgtcttccacgctatagtctctggaggtcatgaatgtggtgttgccacaaagcctggaatctacaccctgttaaccaagaaataccagacttggatcaaaagcaaccttgtcccgcctcatacaaattaagttacaaataattttattggatgcacttgcttcttttttcctaatatgctcgcaggttagagttgggtgtaagtaaagcagagcacatatggggtccatttttgcacttgtaagtcattttattaaggaatcaagttctttttcacttgtatcactgatgtatttctaccatgctggttttattctaaataaaatttagaagactctctgtttgtcttttatcacatgaagtaatatctgcccccattgcacccacactcgccaaagggcaataaggtcactgaataaaacagtaatggtaccaccttcaactaggtgtaacttctgctggatcatcctaagttgttgggttgttttcttttcattgttgtgataacattgaacatgagataggcccttgcaacaaatgtttaagggtatgatacattattgttaactataggcatgatcttgcagtgcagatctctagaactgcttcatctcatataaatgaaactttatgccagttgaatagcagctctctatttccccaccacccccatcctctggcaaccccattctactctaagcttctatgagtttgtattttttaaatataaatcataaatataaatatcctaattcaagcaagcagcttatacaaa

SEQ ID NO: 192 - DNA, 1959 bp, Homo sapiens
  source 1..1959: mol_type = genomic DNA
agctccagtcctggcatctgcccgaggagaccacgctcctggagctctgctgtcttctcagggagactctgaggctctgttgagaatcatgctttggaggcagctcatctattggcaactgctggctttgtttttcctccctttttgcctgtgtcaagatgaatacatggagtctccacaaaccggaggactacccccagactgcagtaagtgttgtcatggagactacagctttcgaggctaccaaggcccccctgggccaccgggccctcctggcattccaggaaaccatggaaacaatggcaacaatggagccactggtcatgaaggagccaaaggtgagaagggcgacaaaggtgacctggggcctcgaggggagcgggggcagcatggccccaaaggagagaagggctacccggggattccaccagaacttcagattgcattcatggcttctctggcaacccacttcagcaatcagaacagtgggattatcttcagcagtgttgagaccaacattggaaacttctttgatgtcatgactggtagatttggggccccagtatcaggtgtgtatttcttcaccttcagcatgatgaagcatgaggatgttgaggaagtgtatgtgtaccttatgcacaatggcaacacagtcttcagcatgtacagctatgaaatgaagggcaaatcagatacatccagcaatcatgctgtgctgaagctagccaaaggggatgaggtttggctgcgaatgggcaatggcgctctccatggggaccaccaacgcttctccacctttgcaggattcctgctctttgaaactaagtaaatatatgactagaatagctccactttggggaagacttgtagctgagctgatttgttacgatctgaggaacattaaagttgagggttttacattgctgtattcaaaaaattattggttgcaatgttgttcacgctacaggtacaccaataatgttggacaattcaggggctcagaagaatcaaccacaaaatagtcttctcagatgaccttgactaatatactcagcatctttatcactctttccttggcacctaaaagataattctcctctgacgcaggttggaaatatttttttctatcacagaagtcatttgcaaagaattttgactactctgcttttaatttaataccagttttcaggaacccctgaagttttaagttcattattctttataacatttgagagaatcggatgtagtgatatgacagggctggggcaagaacaggggcactagctgccttattagctaatttagtgccctccgtgttcagcttagcctttgaccctttccttttgatccacaaaatacattaaaactctgaattcacatacaatgctattttaaagtcaatagattttagctataaagtgcttgaccagtaatgtggttgtaattttgtgtatgttcccccacatcgcccccaacttcggatgtggggtcaggaggttgaggttcactattaacaaatgtcataaatatctcatagaggtacagtgccaatagatattcaaatgttgcatgttgaccagagggattttatatctgaagaacatacactattaataaataccttagagaaagattttgacctggctttagataaaactgtggcaagaaaaatgtaatgagcaatatatggaaataaacacacctttgttaaagatactttctaaacttgtgtttaataaactttaatagtcatagaattgtaaatcactatggttaacagaaagtgaaaatattttcatgcagatgatgtgaacagccatgtgaataggtgacttgggcacacagcagggtcatatgacttcagaaaacttcgcttttcagttattccattgttataatgtcaaccctttaagacattgatgtttagagggctcacaaataaaatctgaatacctgtaa

SEQ ID NO: 193 - DNA, 4899 bp, Homo sapiens
  source 1..4899: mol_type = genomic DNA
atggccccctcggcctgggccatttgctggctgctagggggcctcctgctccatgggggtagctctggccccagccccggccccagtgtgccccgcctgcggctctcctaccgagacctcctgtctgccaaccgctctgccatctttctgggcccccagggctccctgaacctccaggccatgtacctagatgagtaccgagaccgcctctttctgggtggcctggacgccctctactctctgcggctggaccaggcatggccagatccccgggaggtcctgtggccaccgcagccaggacagagggaggagtgtgttcgaaagggaagagatcctttgacagagtgcgccaacttcgtgcgggtgctacagcctcacaaccggacccacctgctagcctgtggcactggggccttccagcccacctgtgccctcatcacagttggccaccgtggggagcatgtgctccacctggagcctggcagtgtggaaagtggccgggggcggtgccctcacgagcccagccgtccctttgccagcaccttcatagacggggagctgtacacgggtctcactgctgacttcctggggcgagaggccatgatcttccgaagtggaggtcctcggccagctctgcgttccgactctgaccagagtctcttgcacgacccccggtttgtgatggccgcccggatccctgagaactctgaccaggacaatgacaaggtgtacttcttcttctcggagacggtcccctcgcccgatggtggctcgaaccatgtcactgtcagccgcgtgggccgcgtctgcgtgaatgatgctgggggccagcgggtgctggtgaacaaatggagcactttcctcaaggccaggctggtctgctcggtgcccggccctggtggtgccgagacccactttgaccagctagaggatgtgttcctgctgtggcccaaggccgggaagagcctcgaggtgtacgcgctgttcagcaccgtcagtgccgtgttccagggcttcgccgtctgtgtgtaccacatggcagacatctgggaggttttcaacgggccctttgcccaccgagatgggcctcagcaccagtgggggccctatgggggcaaggtgcccttccctcgccctggcgtgtgccccagcaagatgaccgcacagccaggacggccttttggcagcaccaaggactacccagatgaggtgctgcagtttgcccgagcccaccccctcatgttctggcctgtgcggcctcgacatggccgccctgtccttgtcaagacccacctggcccagcagctacaccagatcgtggtggaccgcgtggaggcagaggatgggacctacgatgtcattttcctggggactgactcagggtctgtgctcaaagtcatcgctctccaggcagggggctcagctgaacctgaggaagtggttctggaggagctccaggtgtttaaggtgccaacacctatcaccgaaatggagatctctgtcaaaaggcaaatgctatacgtgggctctcggctgggtgtggcccagctgcggctgcaccaatgtgagacttacggcactgcctgtgcagagtgctgcctggcccgggacccatactgtgcctgggatggtgcctcctgtacccactaccgccccagccttggcaagcgccggttccgccggcaggacatccggcacggcaaccctgccctgcagtgcctgggccagagccaggaagaagaggcagtgggacttgtggcagccaccatggtctacggcacggagcacaatagcaccttcctggagtgcctgcccaagtctccccaggctgctgtgcgctggctcttgcagaggccaggggatgaggggcctgaccaggtgaagacggacgagcgagtcttgcacacggagcgggggctgctgttccgcaggcttagccgtttcgatgcgggcacctacacctgcaccactctggagcatggcttctcccagactgtggtccgcctggctctggtggtgattgtggcctcacagctggacaacctgttccctccggagccaaagccagaggagcccccagcccggggaggcctggcttccaccccacccaaggcctggtacaaggacatcctgcagctcattggcttcgccaacctgccccgggtggatgagtactgtgagcgcgtgtggtgcaggggcaccacggaatgctcaggctgcttccggagccggagccggggcaagcaggccaggggcaagagctgggcagggctggagctaggcaagaagatgaagagccgggtgcatgccgagcacaatcggacgccccgggaggtggaggccacgtagaagggggcagaggaggggtggtcaggatgggctggggggcccactagcagcccccagcatctcccacccacccagctagggcagaggggtcaggatgtctgtttgcctcttagagacaggtgtctctgcccccacaccgctactggggtctaatggaggggctgggttcttgaagcctgttccctgcccttctctgtgctcttagacccagctggagccagcaccctctggctgctggcagccccaagggatctgccatttgttctcagagatggcctggcttccgcaacacatttccgggtgtgcccagaggcaagagggttgggtggttctttcccagcctacagaacaatggccattctgagtgaccctcagagtgggtgtgtgggtgcgtctagggggtatcccggtagggggcctgcagggagccagagggtggaaatggcctctaagctagcaccccgtaagaagagcctacctgaccgacttggggagggaacacagaggtgttgggaaggtggagcaacaatgcacctcccctcctgtcgcgccgtgatatcttggtggctccctgccactgcccaccgcctcttctccatctgagaatcacggagaggtgtagataatctagaggcatagactgctagagcccccagggatctggggtggtcagggctcaggcttcactttgtaaaccaggtgggggcatctcacagcctgacttcccttccccaggccagggttgctgggatgcctgcccctcctgagaggaccccctccccattgtcaggctctccatgtccacgagcggggaggggtgggttctggggcattgttgtcccttgtgtctgtggactagagatagggtgggggagctggggaagggtgcaggcgggaagagtgggctgtctttcccagggtgatgcaagcatgccgcagccctggaggctgggaatgtggaggctctgtgagccctgcagccctcagaatcagggccagggatgcagaagattgagaggatatggagatggatagagggcaggagacccttaggatagattgtgggacccaggcaggaacaggtgtccacaagaactcaggatggcatcagttagctcagaagccacctggaagacccagtgtttccatctctggaatctctgttttatgctaaatggatttaggaagactgtttttcttttaagggggaaacaaggtagagaaaaggacgaagaagtgtaagtcccgctgattctcgggggtaaggctcggatggcaaggacgcgttctgcctgggcatgtaggggaggtgtttttgccatcaccagtttctcaggctggggagcacagaggggaggaggaggactaaatgaaaagttgttcccagcctgcacatgaacacattcatgacacacaaaactggctggaaggagataagagcactgggtttgagattccctccattaaaacaaccaagacaaagaaaggaggggaaaaaaagataaaaagcaagccagggttccctgccctattgaaactcaaacccagactgccttgggttttatctttcccttacccctggcacctccagagaactgggacctgaaatagtccctccgttctcccctttgaccatgtaataaatgaaccagaagcactgagattaacctatcaacgccctgagaagccttccagcctgcggtgctgtctgctgggaggtcagctggtcaaggcagaggaggagaggaggaaaggatgggggctgaagagcagaagggaggggagacagaggggattaaagaggggaggagagagtgcagagctccaggaaagggtatcagagctgcagccagctctgccctctaccctagggaggccagaaagacacaaacagccctccgggcctttacgctggactctggcttggcaggctccaggcagggtcctctgggaagttactctagaaaacgaagggaggaggagcacaagatcctcagcaacgaacacctgcacttagaaaaagtggacagcttctgccaaccacaccctacccatggtactgtatgctattaactcctggaaacgccccgtaaatgcgagttgtttttgtatttgtgtgttgagatgggccttgtggtttctctgtactcagagcacatttcttgtaattactattgttatttttattgtcatgactgcccctgagctctggtgagaaaagctgaatttacaaggaaagggatgaagttaatatttgcatcacataattatatcattactgtgtatctgtgtattgtactaaatggactgatgctgcgcacatgagctgaaaatgaagagccctcccatccattccatgagaaagaaggtcaccctgagtgacttctgtttcatgatttcccaaacaggttttagagctggaaaaggacttaaagaaagagactgggtggtgctttctagaaaggaggaagatgggtatcaggggaaggaaggagttagagggctttgtacaaagccgagattgctcattaaatgaggaacatcctggcc

SEQ ID NO: 194 - DNA, 2869 bp, Homo sapiens
  source 1..2869: mol_type = genomic DNA
tgatcttccaacccagtgaggggaagaggatgtgatcatgcgaccgccagcagaagggaaattgtgaaagcgacctgctgtagaaaaggcggcccacagccacctcagcatgcagaggaggcccagctgctgagaggagttgcctgagagtgacctttgcatctgcctgtccagccagcatggaaccaaagcggatcagagagggctaccttgtgaagaaggggagcgtgttcaatacgtggaaacccatgtgggttgtattgttagaagatggaattgaattctataagaagaaaagtgacaacagccccaaaggaatgatcccgctgaaagggagcactctgactagcccttgtcaagactttggcaaaaggatgtttgtgtttaagatcactacgaccaaacagcaggaccacttcttccaggcagccttcctggaggagagagatgcctgggttcgggatatcaagaaggccattaaatgcattgaaggaggccagaaatttgccaggaaatctaccaggaggtccattcgactgccagaaaccattgacttaggtgccttatatttgtccatgaaagacactgaaaaaggaataaaagaactgaatctagagaaggacaagaagatttttaatcactgcttcacaggtaactgcgtcattgattggctggtatccaaccagtctgttaggaatcgccaggaaggcctcatgattgcttcatcgctgctcaatgaggggtatctgcagcctgctggagacatgtccaagagtgcagtggatggaactgctgaaaaccctttcctggacaaccctgatgccttctactactttccagacagtgggttcttctgtgaagagaattccagtgatgatgatgtgattctgaaagaagaattcagaggggtcattatcaagcagggatgtttactgaagcaggggcatagaaggaaaaactggaaagtgaggaagttcatcttgagagaagaccctgcctacctgcactactatgaccctgctggggcagaagatcccctgggagcaattcacttgagaggctgtgtggtgacttcagtggagagcaactcaaatggcaggaagagtgaggaagagaacctttttgagatcatcacagcagatgaagtgcactatttcttgcaagcagccacccccaaggagcgcacagagtggatcagagccatccagatggcctcccgaactgggaagtaaagagactcctgcattcctcctcccctcctgagggaagcccatggacaagctcagtccaggacctgtccacttctgtgacaaatcaacgggaaacagcccaggggtgggaagttttcatttgcaggggggtctgaatgtaactcaccatgtggtgtgcaaggttcccctgcattgtattgctcactgcagcccctctgcccctatccatgacccccaagcagatataacaagctgtgcagcctcagtaggctgcttgccctctccaggcctcagggcctcttctggaaaatgaagaaattcaactagtagattcctgaggtccccctagcttaaaaaaaaaaaaaatctgccccatgattctaacactcgcagtagtgatagtgtatctagttgttctgctggtgtccttccttggctaagtcttggccttcagttatcttcaaatgtaccagaacctgagccaacgcctccctgtgaaactgttgctgatctgtagtacagtaccaggaagaaacctcttttgttctctttagacatcttctacttgctcttggccttgagatcgtgtaacaaaatgaaggagggctctcttctttcttcctcatcctactcaaaaacttcccgagagcagtggtggttttgagggttttgacttctattacttttggcagcctggaaagttgtgtcttctgggaaagagacctggggaggccaggagtagctgagggtcctttctgtgcccttaaaccgcccagaggagccctattccactctggttttaggctgatctgagagggtctccctttgttcctttctggagcatttctctaacgtttattacaattaggagggggaccccacatctgtgagattctgtttcatttgaggtttacagaaaaaaaaaagtggccagatgtgttccccccatgggtgagaggcctgggcaactgcctggtgaatgtgtcttgcggcagctgcagcaagtggaggggctgaactactggccagctcactggatgatgggttaatacaacaactgcactgtaaggactcagagccacacagaacttctgagaggggctgttagcattgcgcagcatcttcagttctccagtaaatgatattgcgttcgtgcctcagctttaagcacaagtagcagcagctcctgcttgagttctgagggcatcatggccctatgattaaccagagtgatctaacctagactaaaattgggaacttatttgcaatttttgaccctgaccactaactagtgattcttctccaaaattgagaaagacagcacccattgaagcagatatgtgtgtgaaagtatatttttcaattccagatttttaattttaaggctccaggaaagaaaggagagtagaacatttttcctcattttatcaaatcctctcttgccctccctcaattcccctgtaacattcctgaagctgttcccactcccagatggttttatcaatagcctagaggtaaagaactgtctttttctctgattctttaataaattatctttatagaatatgcacaagtttttctacactcagtgttaaagtatttattaatgggaagtcaacttaatgttttgaaataaatatatgactctgtttaatgca

SEQ ID NO: 195 - DNA, 3348 bp, Homo sapiens
  source 1..3348: mol_type = genomic DNA
gcagctggttactgcatttctccatgtggcagacagagcaaagccacaacgctttctctgctggattaaagacggcccacagaccagaacttccactatactacttaaaattacataggtggcttgtcaaattcaattgattagtattgtaaaaggaaaaagaagttccttcttacagcttggattcaacggtccaaaacaaaaatgcagctgccattaaagtcacagatgaacaaacttctacactgatttttaaaatcaagaataagggcagcaagtttctggattcactgaatcaacagacacaaaaagctggcaatatagcaactatgaagagaaaagctactaataaaattaacccaacgcatagaagacttttttttctcttctaaaaacaactaagtaaagacttaaatttaaacacatcattttacaacctcatttcaaaatgaagacttttacctggaccctaggtgtgctattcttcctactagtggacactggacattgcagaggtggacaattcaaaattaaaaaaataaaccagagaagataccctcgtgccacagatggtaaagaggaagcaaagaaatgtgcatacacattcctggtacctgaacaaagaataacagggccaatctgtgtcaacaccaaggggcaagatgcaagtaccattaaagacatgatcaccaggatggaccttgaaaacctgaaggatgtgctctccaggcagaagcgggagatagatgttctgcaactggtggtggatgtagatggaaacattgtgaatgaggtaaagctgctgagaaaggaaagccgtaacatgaactctcgtgttactcaactctatatgcaattattacatgagattatccgtaagagggataattcacttgaactttcccaactggaaaacaaaatcctcaatgtcaccacagaaatgttgaagatggcaacaagatacagggaactagaggtgaaatacgcttccttgactgatcttgtcaataaccaatctgtgatgatcactttgttggaagaacagtgcttgaggatattttcccgacaagacacccatgtgtctcccccacttgtccaggtggtgccacaacatattcctaacagccaacagtatactcctggtctgctgggaggtaacgagattcagagggatccaggttatcccagagatttaatgccaccacctgatctggcaacttctcccaccaaaagccctttcaagataccaccggtaactttcatcaatgaaggaccattcaaagactgtcagcaagcaaaagaagctgggcattcggtcagtgggatttatatgattaaacctgaaaacagcaatggaccaatgcagttatggtgtgaaaacagtttggaccctgggggttggactgttattcagaaaagaacagacggctctgtcaacttcttcagaaattgggaaaattataagaaagggtttggaaacattgacggagaatactggcttggactggaaaatatctatatgcttagcaatcaagataattacaagttattgattgaattagaagactggagtgataaaaaagtctatgcagaatacagcagctttcgtctggaacctgaaagtgaattctatagactgcgcctgggaacttaccagggaaatgcaggggattctatgatgtggcataatggtaaacaattcaccacactggacagagataaagatatgtatgcaggaaactgcgcccactttcataaaggaggctggtggtacaatgcctgtgcacattctaacctaaatggagtatggtacagaggaggccattacagaagcaagcaccaagatggaattttctgggccgaatacagaggcgggtcatactccttaagagcagttcagatgatgatcaagcctattgactgaagagagacactcgccaatttaaatgacacagaactttgtacttttcagctcttaaaaatgtaaatgttacatgtatattacttggcacaatttatttctacacagaaagtttttaaaatgaattttaccgtaactataaaagggaacctataaatgtagtttcatctgtcgtcaattactgcagaaaattatgtgtatccacaacctagttattttaaaaattatgttgactaaatacaaagtttgttttctaaaatgtaaatatttgccacaatgtaaagcaaatcttagctatattttaaatcataaataacatgttcaagatacttaacaatttatttaaaatctaagattgctctaacgtctagtgaaaaaaatatttttaaaatttcagccaaataatgcattttatttataaaaatacagacagaaaattagggagaaacctctagttttgccaatagaaaatgcttcttccattgaataaaagttatttcaaattgaatttgtgcctttcacacgtaatgattaaatctgaattcttaataatatatcctatgctgattttcccaaaacatgacccatagtattaaatacatatcatttttaaaaataaaaaaaaacccaaaaataatgcatgcataatttaaatggtcaatttataaagacaaatctatgaatgaatttttcagtgttatcttcatatgatatgctgaacaccaaaatctccagaaatgcattttatgtagttctaaaatcagcaaaatattggtattacaaaaatgcagaatatttagtgtgctacagatctgaattatagttctaatttattattactttttttctaatttactgatcttactactacaaagaaaaaaaaacccaaccaatctgcaattcaaatcagaaagtttggacagctttacaagtattagtgcatgctcagaacaggtgggactaaaacaaactcaaggaactgttggctgttttcccgatactgagaattcaacagctccagagcagaagccacaggggcatagcttagtccaaactgctaatttcattttacagtgtatgtaacgcttagtctcacagtgtctttaactcatctttgcaatcaacaactttactagtgactttctggaacaatttcctttcaggaatacatattcactgcttagaggtgaccttgccttaatatatttgtgaagttaaaattttaaagatagctcatgaaacttttgcttaagcaaaaagaaaacctcgaattgaaatgtgtgaggcaaactatgcatgggaatagcttaatgtgaagataatcatttggacaactcaaatccatcaacatgaccaatgtttttcatctgccacatctcaaaataaaacttctggtgaaacaaattaaacaaaatatccaaacctca

SEQ ID NO: 196 - DNA, 2341 bp, Homo sapiens
  source 1..2341: mol_type = genomic DNA
ggccagctggctatcagacaatgacatgctttgacaggcccctgagctctgtgagtaaattcttgaacagctgagagtgctaccattttgtcatagccctaagggtgcagatgatgctgaaagcgtgttggccaaatctgaatgatgaaagccaattacaaactagaaaatgaaaacagaccccagatgcaaggagatgagacagttaaatttacttcctcttttctaatctgagaggtttcatgttgaagaaaatcagtgttggggttgcaggagacctaaacacagtcaccatgaagctgggctgtgtcctcatggcctgggccctctacctttcccttggtgtgctctgggtggcccagatgctactggctgccagttttgagacgctgcagtgtgagggacctgtctgcactgaggagagcagctgccacacggaggatgacttgactgatgcaagggaagctggcttccaggtcaaggcctacactttcagtgaacccttccacctgattgtgtcctatgactggctgatcctccaaggtccagccaagccagtttttgaaggggacctgctggttctgcgctgccaggcctggcaagactggccactgactcaggtgaccttctaccgagatggctcagctctgggtccccccgggcctaacagggaattctccatcaccgtggtacaaaaggcagacagcgggcactaccactgcagtggcatcttccagagccctggtcctgggatcccagaaacagcatctgttgtggctatcacagtccaagaactgtttccagcgccaattctcagagctgtaccctcagctgaaccccaagcaggaagccccatgaccctgagttgtcagacaaagttgcccctgcagaggtcagctgcccgcctcctcttctccttctacaaggatggaaggatagtgcaaagcagggggctctcctcagaattccagatccccacagcttcagaagatcactccgggtcatactggtgtgaggcagccactgaggacaaccaagtttggaaacagagcccccagctagagatcagagtgcagggtgcttccagctctgctgcacctcccacattgaatccagctcctcagaaatcagctgctccaggaactgctcctgaggaggcccctgggcctctgcctccgccgccaaccccatcttctgaggatccaggcttttcttctcctctggggatgccagatcctcatctgtatcaccagatgggccttcttctcaaacacatgcaggatgtgagagtcctcctcggtcacctgctcatggagttgagggaattatctggccaccggaagcctgggaccacaaaggctactgctgaatagaagtaaacagttcatccatgatctcacttaaccaccccaataaatctgattctttattttctcttcctgtcctgcacatatgcataagtacttttacaagttgtcccagtgttttgttagaataatgtagttaggtgagtgtaaataaatttatataaagtgagaattagagtttagctataattgtgtattctctcttaacacaacagaattctgctgtctagatcaggaatttctatctgttatatcgaccagaatgttgtgatttaaagagaactaatggaagtggattgaatacagcagtctcaactgggggcaattttgccccccagaggacattgggcaatgtttggagacattttggtcattatacttggggggttgggggatggtgggatgtgtgtgctactggcatccagtaaatagaagccaggggtgccgctaaacatcctataatgcacagggcagtaccccacaacgaaaaataatctggcccaaaatgtcagttgtactgagtttgagaaaccccagcctaatgaaaccctaggtgttgggctctggaatgggactttgtcccttctaattattatctctttccagcctcattcagctattcttactgacataccagtctttagctggtgctatggtctgttctttagttctagtttgtatcccctcaaaagccattatgttgaaatcctaatccccaaggtgatggcattaagaagtgggcctttgggaagtgattagatcaggagtgcagagccctcatgattaggattagtgcccttatttaaaaaggccccagagagctaactcacccttccaccatatgaggacgtggcaagaagatgacatgtatgagaaccaaaaaacagctgtcgccaaacaccgactctgtcgttgccttgatcttgaacttccagcctccagaactatgagaaataaaattctgttgtttgtaa

SEQ ID NO: 197 - DNA, 2234 bp, Homo sapiens
  source 1..2234: mol_type = genomic DNA
aggtggctgtccccgcacggttcccagctaattccccgctaccgggttgcggccggaagccgggcgccgcggctctgcttccctcggggatctggcgacatggccagaaaggctctcaagcttgcttcgtggaccagcatggctcttgctgcctctggcatctacttctacagtaacaagtacttggaccctaatgactttggcgctgtcagggtgggcagagcagttgctacgacggctgtcatcagttacgactacctcacttccctgaagagtgtcccttatggctcagaggagtacttgcagctgagatctaaggtgcaccttcgctctgccaggcgtctctgtgagctctgctgtgccaaccggggcaccttcatcaaggtgggccagcacctgggggctctggactacctgttgccagaggagtacaccagcacgctgaaggtactgcacagccaggctccacagagcagcatgcaagagatccgccaggtcatccgagaagatctgggcaaggagatccatgatttgttccagagcttcgatgacacccctctggggacggcctccctggcccaggtccacaaggcagtgctgcatgatgggcggacggtggccgtgaaggtccagcacccaaaggtgcgggctcagagctcgaaggacattctcctgatggaggtgctcgttctggctgtgaagcagctgttcccagagtttgagtttatgtggcttgtggatgaagccaagaagaacctgcctttggagctggatttcctcaatgaagggaggaatgctgagaaggtgtcccagatgctcaggcattttgacttcttgaaggtcccccgaatccactgggacctgtccacggagcgggtcctcctgatggagtttgtggatggcgggcaggtcaatgacagagactacatggagaggaacaagatcgacgtcaatgagatctcacgccacctgggcaagatgtatagtgagatgatcttcgtcaatggcttcgtgcactgcgatccccaccccggcaatgtactggtgcggaagcaccccggcacgggaaaggcggagattgtcctgttggaccatgggctttaccagatgctcacggaagaattccgcctgaattactgccacctctggcagtctctgatctggactgacatgaagagagtgaaggagtacagccagcgactgggagccggggatctctaccccttgtttgcctgcatgctgacggcgcgatcgtgggactcggtcaacagaggcatcagccaagctcccgtcactgccactgaggacttagagattcgcaacaacgcggccaactacctcccccagatcagccatctcctcaaccacgtgccgcgccagatgctgctcatcttgaagaccaacgacctgctgcgtggcattgaggccgccctgggcacccgcgccagcgccagctcctttctcaacatgtcacgttgctgcatcagagcgctagctgagcacaagaagaagaatacctgttcattcttcagaaggacccagatctctttcagcgaggccttcaacttatggcagatcaacctccatgagctcatcctgcgtgtgaaggggttgaagctggctgaccgggtcttggccctaatatgctggctgttccctgctccactctgagtggaattgctctccctgccccattctggtgtctttccactcctcagcccctcatcttgcctccacccagctgctccatttttgccacatcgtggcccgcagccccagagtcactgtccatgtcaccatccttctcctcctttggaatcctctccgcacactgtggcccttgtctcagggcccacaagctgaactgtggcatagctctctcttcttctccaagaagactcagcagcctacattcccattcctggtatgtgccattgggttggatgtccccactacttccgttaacccttcccattgtcaagatgtgccacgggtgccactgggggcacactgaacttgtagggagtgtgattttgttggaggtgcacatggtctctgaatttgacagagaacaccttccctttccttgccatgtcaccctccagaggaagtcacacctcagcgaggtggtttggcatctggggccaactccattacagctatgagctcactgctgtcagtgacgtttggtgttttctgtactgtgtttcaataaaaactccttcaaggttgca

SEQ ID NO: 198 - DNA, 1376 bp, Homo sapiens
  source 1..1376: mol_type = genomic DNA
agagaaacagaatcctaactatttctgaggaaactgcaggtccaaaatgtggctgcttttaacaatggcaagtttgatatctgtactggggactacacatggtttgtttggaaaattacatcctggaagccctgaagtgactatgaacattagtcagatgattacttattggggatacccaaatgaagaatatgaagttgtgactgaagatggttatattcttgaagtcaatagaattccttatgggaagaaaaattcagggaatacaggccagagacctgttgtgtttttgcagcatggtttgcttgcatcagccacaaactggatttccaacctgccgaacaacagccttgccttcattctggcagatgctggttatgatgtgtggctgggcaacagcagaggaaacacctgggccagaagaaacttgtactattcaccagattcagttgaattctgggctttcagctttgatgaaatggctaaatatgaccttccagccacaatcgacttcattgtaaagaaaactggacagaagcagctacactatgttggccattcccagggcaccaccattggttttattgccttttccaccaatcccagcctggctaaaagaatcaaaaccttctatgctctagctcctgttgccactgtgaagtatacaaaaagccttataaacaaacttagatttgttcctcaatccctcttcaagtttatatttggtgacaaaatattctacccacacaacttctttgatcaatttcttgctactgaagtgtgctcccgtgagatgctgaatctcctttgcagcaatgccttatttataatttgtggatttgacagtaagaactttaacacgagtcgcttggatgtgtatctatcacataatccagcaggaacttctgttcaaaacatgttccattggacccaggctgttaagtctgggaaattccaagcttatgactggggaagcccagttcagaataggatgcactatgatcagtcccaacctccctactacaatgtgacagccatgaatgtaccaattgcagtgtggaacggtggcaaggacctgttggctgacccccaagatgttggccttttgcttccaaaactccccaatcttatttaccacaaggagattcctttttacaatcacttggactttatctgggcaatggatgcccctcaagaagtttacaatgacattgtttctatgatatcagaagataaaaagtagttctggatttaaagaattatccgtttgtttttccaaaatactttattctctcatacatagtattttcataatgtttgacatgcagtgcttctttctgtaattttgactttagaaatatattggcatcaacaaa

SEQ ID NO: 199 - DNA, 555 bp, Homo sapiens
  source 1..555: mol_type = genomic DNA
atgcggggccagggccgcaaggagagtttgtccgattcccgagacctggacggctcctacgaccagctcacggacagcgtggacgatgaatttgaattgtccaccgtgtgtcaccggcctgagggtctggagcagctgcaggagcaaaccaaattcacgcgcaaggagttgcaggtcctgtaccggggcttcaagaacgaatgtcccagcggaattgtcaatgaggagaacttcaagcagatttactcccagttctttcctcaaggagactccagcacctatgccacttttctcttcaatgcctttgacaccaaccatgatggctcggtcagttttgaggaaatgcttgacatcatgaagtccatctatgacatgatgggcaagtacacgtaccctgcactccgggaggaggccccaagggaacacgtggagagcttcttccagaagatggacagaaacaaggatggtgtggtgaccattgaggaattcattgagtcttgtcaaaaggtacagctccctgccctctacattaccctgacctggactcaggcctga

SEQ ID NO: 200 - DNA, 5008 bp, Homo sapiens
  source 1..5008: mol_type = genomic DNA
aagtaccaaggtctgcggcaggaggagaccggctcacaggagcagcagcattggaagaggcacccagcagcctcccaggcatcctggagggtctgctccctgtctttccaaggatgagtctccaggagatgttccgcttccctatggggctcctgcttggctctgtgctcctggtggcttcggccccagccactctggagcctcccggctgcagcaacaaggagcaacaggtcactgtcagccacacctacaagatcgatgtgcccaagtctgccttggttcaggttgacgctgaccctcagcccctcagtgacgatggggcttcgctcttggccctgggggaggccagggaggaacagaacatcatcttcaggcacaacatccgccttcagacgccacagaaggactgcgagttggcaggcagtgtccaggacctcctggcccgggtgaagaagctggaggaagagatggtggagatgaaggaacagtgtagtgcccagcgctgctgccagggagtcactgatctaagccgccactgcagcggccacgggaccttctccctggagacctgcagctgccactgcgaagagggcagggagggccccgcctgcgagcggctggcctgccccggggcgtgcagcggccacgggcgttgcgtggacgggcgctgcctgtgccatgagccctacgtgggtgccgactgcggctacccggcctgccctgagaactgcagcggacacggcgagtgcgtgcgcggcgtgtgccagtgccacgaagacttcatgtcggaggactgcagcgagaagcgctgtcccggcgactgcagcggccacggcttctgtgacacgggcgagtgctactgcgaggagggcttcacaggcctggactgtgcccaggtggtcaccccacagggcctgcagctgctcaagaacacggaggattctctgctggtgagctgggagccctccagccaggtggatcactacctcctcagctactaccccctggggaaggagctctctgggaagcagatccaagtgcccaaggagcagcacagctatgagattcttggtttgctgcctggaaccaagtacatagtcaccctgcgtaacgtcaagaatgaagtttctagcagcccacagcatctacttgccaccacagaccttgctgtgcttggcactgcctgggtgacagatgagactgagaactcccttgacgtggagtgggaaaacccctcaactgaggtggactactacaagctgcgatatggccccatgacaggacaggaggtagctgaggtcactgtgcccaagagcagtgaccccaagagccgatatgacatcactggtctgcacccggggactgagtataagatcacggtggtgcccatgagaggagagctggagggcaagccgatcctcctgaatggcaggacagaaattgacagtccaaccaatgttgtcactgatcgagtgactgaagacacagcaactgtctcctgggacccagtgcaggctgtcatagacaagtatgtagtgcgctacacttctgctgatggggacaccaaggaaatggcagtgcacaaggatgagagcagcactgtcctgacgggcctgaagccaggagaggcatacaaggtctacgtgtgggctgaaaggggcaaccaggggagcaagaaagctgacaccaatgccctcacagaaattgacagcccagcaaacctggtgactgaccgggtgactgagaataccgccaccatctcctgggacccggtacaggccaccattgacaagtacgtggtgcgctacacctctgctgacgaccaagagaccagagaggttctggtggggaaggagcagagcagcactgtcctgacaggcctgaggccaggtgtggagtacacagtgcatgtctgggcccagaagggggaccgagagagcaagaaggctgacaccaacgccccgacagatattgacagccccaaaaacctggtgactgaccgggtgacagagaatatggccacggtctcctgggacccggtgcaggccgccattgacaagtacgtggtgcgctacacctctgctggtggagagaccagggaggttccggtggggaaggagcagagcagcacagtcctgacaggcctgagaccgggtatggagtacatggtgcacgtgtgggcccagaagggggaccaggagagcaagaaggccgacaccaaggcccagacagacattgacagcccccaaaacctggtgaccgaccgggtgacagagaatatggccactgtctcctgggacccggtgcgggccaccattgacaggtatgtggtgcgctacacctctgccaaggacggagagaccagggaggttccggtggggaaggagcagagtagcactgtcctgacgggcctgaggccgggtgtggagtacacggtgcacgtgtgggcccagaagggggcccaggagagcaagaaggctgacaccaaggcccagacagacattgacagcccccaaaacctggtcactgactgggtgacagagaatacagccactgtctcctgggacccggtgcaggccaccattgacaggtatgtggtgcactacacgtctgccaacggagagaccagggaggttccagtggggaaggagcagagcagcactgtcctgacgggcctgaggccgggcatggagtacacggtgcacgtgtgggcccagaaggggaaccaggagagcaagaaggctgacaccaaggcccagacagaaattgacggccccaaaaacctagtgactgactgggtgacggagaatatggccactgtctcctgggacccggttcaggccaccattgacaagtacatggtgcgctacacctctgctgacggagagaccagggaggttccggtggggaaggagcacagcagcactgtcctgacgggcctgagaccaggcatggagtacatggtgcacgtgtgggcccagaagggggcccaggagagcaagaaggctgacaccaaggcccagacagaactcgaccctcccagaaaccttcgtccatctgctgtaacgcagtctggtggcatattgacctggacgcccccctctgctcagatccacggctacattctgacttaccagttcccagatggcacagttaaggagatgcagctgggacgggaagaccagaggtttgcgttgcaaggccttgagcaaggcgccacctaccctgtctcccttgttgcctttaagggtggtcgccggagcagaaatgtatccaccaccctctccacagttggtgcccgtttcccacacccttcggactgcagtcaggttcagcagaacagcaatgccgccagtggtctgtacaccatctacctgcatggcgatgccagccggcccctgcaggtgtactgtgacatggaaacggacggaggtggctggattgtcttccagaggcggaacactgggcagctggatttcttcaagcgatggaggagctatgtggaaggctttggggaccccatgaaggagttctggcttggacttgacaagctacacaacctcaccaccggcactccagcgcggtatgaggtgagagtggatttacagactgccaatgaatctgcctatgctatatatgatttcttccaagtggcctccagcaaggagcggtataagctgacagttgggaaatacagaggcacggcaggggatgctcttacttaccacaatggatggaagtttacaacttttgacagagacaatgatatcgcactcagcaactgtgccctgacacatcatggtggctggtggtataagaactgccacttggccaaccctaatggcagatatggggagaccaagcacagtgagggggtgaactgggagccttggaaaggacatgaattctccattccttacgtggagttgaaaatccgccctcatggctacagcagggagcctgtcctgggcagaaagaagcggacgctgagaggaaggctgcgaacgttctgatggcccgtgtgagcagtcctcgcaggagacaccaccagctgtggcagcttggggcggggtgggtagtggtcactgcggtctgggagtgctcagatagcccgcagaacaaatcatgtcaccaagcttcaagccatggaggttccttccctctcacctgcatttttgcccgtctttatgagggtcttgaaaatcaaaatagtagttgcacagtatgtgtaggaaagacagtactggaacggcaaggtttctcagcttatcttcagcaacatatatactggattagggcaagagaaggaatcacccagcacttcaccagttggaaatctctggaaatttacatctatgtatttaaagttctgctaatgcaaatcttttctctggaaagaagcacagaggaggagttctgatgacccaggggttagggctgagacaaccggacgtttgtcacctcctttcccattgggtttttaggaaaacagtgtgaacctcccccttttaatttctggtgttatgaggaagaataaaggggataaaaggggctaagatggactcatgtttagctaagttctgacttgtatccagcatgctggagaccaaagctgccgccttactgctatttttaagtgccctcttttcagtcatttgcataattgcgtccatagagctgcatatgttgtgaataaattctcactcatttcaactttgaataatttgactgtcttgataattggttcctcccaaagactcttctgcaactcccattcatgcccaccaggcctcagactccctcttttccccgccctgcactattggagccctgggttttgtgggagtgctcagcaccgtgagtcttactgtttgatcggacagttagcaagatcagatcctttttgcttattttctatcactttggagggttttctgtagcaaaatcagtgaccaatgaagtaacttaaattcctattgaagaaaaaaaataataaaccacttgattt

SEQ ID NO: 201 - DNA, 2426 bp, Homo sapiens
  source 1..2426: mol_type = genomic DNA
agtgtgtctagtgtcagccccgtctgaatcactctcctgtggtggctccagccaacgaagaggaagcaaaaaggataaaaaatctgagctacagcgcatggatttaggttaaacagcctgggaatgaggggtacgctaatcgctgaggaaaacgcacctgtggaggcctctccagaaacagcagaggatccgagctgcgtgtaggcagggcgcgcatgtcaccctggcccgggcgcctggtccgctgctggagataaatggtcgaccccggagggagaggctagtaggggtgttgatgtgaactgattcgcccaagccttgggccgcaaaactgcgaaagaaagcggcaggcagcctctgcatttcccagaagtgcagctggggaactttcccagaccggcccaggggttgctagagggtcagacgtaaaggatccgcctttcctaggcggggtgggccccaggccaccacgtgaagcgtcctcgcccctcagagcccggagcaggccgggctcaagaaagaggaaagttgaggacgccccacctcggagaggcggcgcccctgagtaggccaggagcctctcttgcaacttctgccaccgcgggccaccgcggccgcctgatcccgcagaggaaggtcgcggccgtggagcgatgacccgcggcggtccgggcgggcgcccggggctgccacagccgccaccgcttctgctgctgctgctgctgctgccgctgttgttagtcaccgcggagccgccgaaacctgcaggagtctactatgcaactgcatactggatgcctgctgaaaagacagtacaagtcaaaaatgtaatggacaagaatggggacgcctatggcttttacaataactctgtgaaaaccacaggctggggcatcctggagatcagagctggctatggctctcaaaccctgagcaatgagatcatcatgtttgtggctggctttttggagggttacctcactgccccacacatgaatgaccactacacaaacctctacccacagctgatcacgaaaccttccatcatggataaagtgcaggattttatggagaagcaagataagtggacccggaaaaatatcaaagaatacaagactgattcattttggagacatacaggctatgtgatggcacaaatagatggcctctatgtaggagcaaagaagagggctatattagaagggacaaagccaatgaccctgttccagattcagttcctgaatagtgttggagatctattggatctgattccctcactctctcccacaaaaaacggcagcctaaaggtttttaagagatgggacatgggacattgctccgctcttatcaaggttcttcctggatttgagaacatcctttttgctcactcaagctggtacacgtatgcagccatgctcaggatatataaacactgggacttcaacgtcatagataaagataccagcagtagtcgcctctctttcagcagttacccagggtttttggagtctctggatgatttttacattcttagcagtggattgatattgctgcagaccacaaacagtgtgtttaataaaaccctgctaaagcaggtaatacccgagactctcctgtcctggcaaagagtccgtgtggccaatatgatggcagatagtggcaagaggtgggcagacatcttttcaaaatacaactctggcacctataacaatcaatacatggttctggacctgaagaaagtaaagctgaaccacagtcttgacaaaggcactctgtacattgtggagcaaattcctacatatgtagaatattctgaacaaactgatgttctacggaaaggatattggccctcctacaatgttcctttccatgaaaaaatctacaactggagtggctatccactgttagttcagaagctgggcttggactactcttatgatttagctccacgagccaaaattttccggcgtgaccaagggaaagtgactgatacggcatccatgaaatatatcatgcgatacaacaattataagaaggatccttacagtagaggtgacccctgtaataccatctgctgccgtgaggacctgaactcacctaacccaagtcctggaggttgttatgacacaaaggtggcagatatctacctagcatctcagtacacatcctatgccataagtggtcccacagtacaaggtggcctccctgtttttcgctgggaccgtttcaacaaaactctacatcagggcatgccagaggtctacaactttgattttattaccatgaaaccaattttgaaacttgatataaaatgaaggagggagatgacggactagaagactgtaaataagataccaaaggcactattttagctatgtttttcccatcagaattatgcaataaaatatattaatttgtcactttca

SEQ ID NO: 202 - DNA, 3554 bp, Homo sapiens
  source 1..3554: mol_type = genomic DNA
gccggtcacacgcgcagccagccggccgcctcccgcgcccaagcgcgccgctctgctgtgccctgcgcccttgccccgcgccagcttctgcgcccgcagcccgcccggcgcccccggtgaccgtgaccctgccctgggcgcggggcggagcaggcatgtcccgcccggggaccgctaccccagcgctggccctggtgctcctggcagtgaccctggccggggtcggagcccagggcgcagccctcgaggaccctgattattacgggcaggagatctggagccgggagccctactacgcgcgcccggagcccgagctcgagaccttctctccgccgctgcctgcggggcccggggaggagtgggagcggcgcccgcaggagcccaggccgcccaagagggccaccaagcccaagaaagctcccaagagggagaagtcggctccggagccgcctccaccaggtaaacacagcaacaaaaaagttatgagaaccaagagctctgagaaggctgccaacgatgatcacagtgtccgtgtggcccgtgaagatgtcagagagagttgcccacctcttggtctggaaaccttaaaaatcacagacttccagctccatgcctccacggtgaagcgctatggcctgggggcacatcgagggagactcaacatccaggcgggcattaatgaaaatgatttttatgacggagcgtggtgcgcgggaagaaatgacctccagcagtggattgaagtggatgctcggcgcctgaccagattcactggtgtcatcactcaagggaggaactccctctggctgagtgactgggtgacatcctataaggtcatggtgagcaatgacagccacacgtgggtcactgttaagaatggatctggagacatgatatttgagggaaacagtgagaaggagatccctgttctcaatgagctacccgtccccatggtggcccgctacatccgcataaaccctcagtcctggtttgataatgggagcatctgcatgagaatggagatcctgggctgcccactgccagatcctaataattattatcaccgccggaacgagatgaccaccactgatgacctggattttaagcaccacaattataaggaaatgcgccagttgatgaaagttgtgaatgaaatgtgtcccaatatcaccagaatttacaacattggaaaaagccaccagggcctgaagctgtatgctgtggagatctcagatcaccctggggagcatgaagtcggtgagcccgagttccactacatcgcgggggcccacggcaatgaggtgctgggccgggagctgctgctgctgctggtgcagttcgtgtgtcaggagtacttggcccggaatgcgcgcatcgtccacctggtggaggagacgcggattcacgtcctcccctccctcaaccccgatggctacgagaaggcctacgaagggggctcggagctgggaggctggtccctgggacgctggacccacgatggaattgacatcaacaacaactttcctgatttaaacacgctgctctgggaggcagaggatcgacagaatgtccccaggaaagttcccaatcactatattgcaatccctgagtggtttctgtcggaaaatgccacggtggctgccgagaccagagcagtcatagcctggatggaaaaaatcccttttgtgctgggcggcaacctgcagggcggcgagctggtggtggcgtacccctacgacctggtgcggtccccctggaagacgcaggaacacacccccacccccgacgaccacgtgttccgctggctggcctactcctatgcctccacacaccgcctcatgacagacgcccggaggagggtgtgccacacggaggacttccagaaggaggagggcactgtcaatggggcctcctggcacaccgtcgctggaagtctgaacgatttcagctaccttcatacaaactgcttcgaactgtccatctacgtgggctgtgataaatacccacatgagagccagctgcccgaggagtgggagaataaccgggaatctctgatcgtgttcatggagcaggttcatcgtggcattaaaggcttggtgagagattcacatggaaaaggaatcccaaacgccattatctccgtagaaggcattaaccatgacatccgaacagccaacgatggggattactggcgcctcctgaaccctggagagtatgtggtcacagcaaaggccgaaggtttcactgcatccaccaagaactgtatggttggctatgacatgggggccacaaggtgtgacttcacacttagcaaaaccaacatggccaggatccgagagatcatggagaagtttgggaagcagcccgtcagcctgccagccaggcggctgaagctgcgggggcagaagagacgacagcgtgggtgaccctcctgggcccttgagactcgtctgggacccatgcaaattaaaccaacctggtagtagctccatagtggactcactcactgttgtttcctctgtaattcaagaagtgcctggaagagagggtgcattgtgaggcaggtcccaaaagggaaggctggaggctgaggctgttttcttttctttgttcccatttatccaaataacttggacagagcagcagagaaaagctgatgggagtgagagaactcagcaagccaacctgggaatcagagagagaaggagaaggaggggagcctgtccgttcagagcctctggctgcatagaaaaggattctggtgcttcccctgtttgcgtggcagcaagggttccacgtgcatttgcaatttgcacagctaaaattgcagcatttccccagctgggctgtcccaaatgttaccatttgagatgctcccaggcgtcctaagagaatccaccctctctggccctgggacattgcaagctgctacaaataaattctgtgttcttttgacaatagcgtcattgccaagtgcacatcagtgagcctcttgaatctgtttagtctcctttttcaacaaaggagtgtgttcagaaaaggagagagaggctgagatcattcaggagtttgttgggcagcaagcatggagcttcttgcacaaattctgggtccataaacaacccccaaagtccctgctgatccagtagccctggaggttccccaggtagggagagccagaggtgccagccttcctgaagggccagaaaatttagcctggatctcctcttttacctgctaggactggaaagagccagaagtggggtggcctgaagccctctctctgcttgaggtattgcccctgtgtggaattgagtgctcatgggttggcctcatatcagcctgggagttatttttgatatgtagaatgccagatcttccagattaggctaaatgtaatgaaaacctcttaggattatctgtggagcatcagtttgggaagaattattgaattatcttgcaagaaaaaagtatgtctcactttttgttaatgttgctgcctcattgacctgggaaaaatgaaaaaaaaaaataaagcaaatggtaagaccctt

SEQ ID NO: 203 - DNA, 1148 bp, Homo sapiens
  source 1..1148: mol_type = genomic DNA
aagtcaaagattgaagaggaactctttcaaacctttcaagtgccccctcctttccttaaagtcttttataggggtccccttcttggccatctccatcctgtgagtcaggactgaaagggcacagacaggtcactgccagcattgttggggcaagcctgcaagcacgcatcactggggatctgacatgacaatggccgcctgccccctctgagggctacaggacttaccccagtgggaagcagctaagcaggtctgaccagccgacctggacctggccaagggtcctgtcatccctcatggccaccccgccattccggctgataaggaagatgttttccttcaaggtgagcagatggatggggcttgcctgcttccggtccctggcggcatcctctcccagtattcgccagaagaaactaatgcacaagctgcaggaggaaaaggcttttcgcgaagagatgaaaatttttcgtgaaaaaatagaggacttcagggaagagatgtggactttccgaggcaagatccatgctttccggggccagatcctgggtttttgggaagaggagagacctttctgggaagaggagaaaaccttctggaaagaggaaaaatccttctgggaaatggaaaagtctttcagggaggaagagaaaactttctggaaaaagtaccgcactttctggaaggaggataaggccttctggaaagaggacaatgccttatgggaaagagaccggaaccttcttcaggaggacaaggccctgtgggaggaagaaaaggccctgtgggtagaggaaagagccctccttgagggggagaaagccctgtgggaagataaaacgtccctctgggaggaagagaatgccctctgggaggaagagagggccttctggatggagaacaatggccacattgccggagagcagatgctcgaagatgggccccacaacgccaacagagggcagcgcttgctggccttctcccgaggcagggcgtagccagcatgcaggtgcagggccctgtggtccagactcccctgggttgggattcaagtccagggtgagcccatgtgctggagaaaatacacactcattggtctccttgctttgaaagatccaataaagtcctgaggcaaggtttggaaaacc

SEQ ID NO: 204 - DNA, 1000 bp, Homo sapiens
  source 1..1000: mol_type = genomic DNA
gcgacgctggagctgcggggttaccatgggaaccgaaccgccgcgcctcgcccaggacagttacacttagaggccttcatcatcatgatgttaagctgcctctttcttctgaaggcacttcttgctcttgggtctctggaatcctggataactgcaggagaacatgcaaaagagggagaatgccctccccataagaacccatgcaaagagctgtgccagggtgatgaattgtgtccggctgaacagaagtgctgcaccacaggctgtggtcggatctgccgagacattcctaaggggaggaaaagagattgccctagggttattcggaaacaatcctgtttgaaaaggtgcatcactgatgagacatgtccaggtgtaaagaaatgctgcacgcttggctgcaacaagagctgtgtagtcccaatctctaaacagaagctggcagagtttggtggtgaatgtcccgctgacccccttccgtgtgaggagctgtgtgatggggatgcatcctgtccccaggggcataaatgctgcagcaccggctgtggccgcacctgcctcggagacattgagggagggcggggcggtgattgtccaaaagttctggtgggcctgtgcattgttggctgtgtgatggatgagaattgtcaagctggagaaaaatgttgcaagtcaggctgtggccgcttctgtgtcccaccagtcctgcccccaaaactgaccatgaaccccaactggactgtgaggtctgattccgaattagagatcccggtgccctagctgtgctgatttgtctggagcttctttggtaattctggaagcttttcctggcagtcaagagagggtgacatcctggggcttgtgacatttccaggggcactcatggccctctctgctctgcttctcctcctgccgctgaccagagcatgggaaatagccctggattgggtagtgggtgtgtggtgcttctctttcccgataaaggctggtgctgacctct

SEQ ID NO: 205 - DNA, 2305 bp, Homo sapiens
  source 1..2305: mol_type = genomic DNA
agcacaaaaggaggaaggacagcacagctgacagccgtgctcagaaagtttctggatcccaggctcatctccacagaggagaacacgcaggcagcagagaccatggggcccatctcagccccttcctgcagatggcgcatcccctggcaggggctcctgctcacagcctcacttttcaccttctggaacccgcccaccactgctcagctcactattgaagctgtgccatccaatgctgcagaggggaaggaggttcttctacttgtccacaatctgccccaggaccctcgtggctacaactggtacaaaggggaaacagtggatgccaaccgtcgaattataggatatgtaatatcaaatcaacagattaccccagggcctgcatacagcaatcgagagacaatataccccaatgcatccctgctgatgcggaacgtcaccagaaatgacacaggatcctacaccctacaagtcataaagctaaatcttatgagtgaagaagtaactggccagttcagcgtacatccggagactcccaagccctccatctccagcaacaactccaaccccgtggaggacaaggatgctgtggccttcacctgtgaacctgagactcagaacacaacctacctgtggtgggtaaatggtcagagtctcccggtcagtcccaggctgcagctgtccaatggcaacaggaccctcactctactcagtgtcacaaggaatgacgtaggaccctatgaatgtgaaatacagaacccagcgagtgcaaacttcagtgacccagtcaccctgaatgtcctctatggcccagatgcccccaccatttccccttcagacacctattaccatgcaggggtaaatctcaacctctcctgccatgcggcctctaatccaccctcacagtattcttggtctgtcaatggcacattccagcaatacacacaaaagctctttatccccaacatcactacaaagaacagcggatcctatgcctgccacaccactaactcagccactggccgcaacaggaccacagtcaggatgatcacagtctctgatgctttagtacaaggaagttctcctggcctctcagctagagccactgtcagcatcatgattggagtactggccagggtggctctgatatagtagctctggtgtagtttctgcatttcaagaagactggcagacagttgtttttattcttcctcaaagcatttgcaatcagctaccattcaaaattgcttcttcttcaagatttatggaaaatactctgacgagtactcttgaacacaagttcctgataactttaagatcacgccactggactgtctatgaacttgcaaacaggctgatacctttgtgaagttgcccaccaaaacacagaaggaaaaaaacatgaatttcattgaactaaataataatgaggataatgtttttaagatttttttttttttttttttgagatggaatctcgctctgtcgcccaggctggagtgcagtggcacgatctcaactcactgcaagctccgcctcctgggttcacaccattctcctgcctcagcctcctgagtagctgggactacaggcgcctgccacaacgcccggctaattttttgtatttttagtagagacggggtttcactgtggtctcaatctcctgacttcatggtccgcctgcctcagcctcccaaagttctgggattacaggtgtgagccaccgcgcccagcccgtttttaagattttttatttgaaaaattgccaattctttaagtgttttctttttcagatttatgaatttctttatcttttaagctatctataccttactgcaatttggtaaagcagacttttgtgaacaaaaattataacatttacttttgctccctacctgactgccacagaactgggcaactattcatgagtattcatatgtttatggtaattcagttatttgcacaagttcagtgagaatctgctgtctttataatgggatatagtttaaaacattggttatattaccaaggctttgattgggatgttatatttgagaaaatacagagaatgatagattaacggagtgtctaatctatcgtgtcaaccccaaatttttacgtatgagatcctttagtccacccaatggctgacagtaacagcatctttaacacaactctttgttcaaatgtactatggtctcttttagagtcagactcctagactcacttgttctcactgtctgttttaatttaacccaggcatgcaatgctagataataaaattgctccctattggctgatcaga

SEQ ID NO: 206 - DNA, 4619 bp, Homo sapiens
  source 1..4619: mol_type = genomic DNA
tcacttgcctgatatttccagtgtcagagggacacagccaacgtggggtcccttctaggctgacagccgctctccagccactgccgcgagcccgtctgctcccgccctgcccgtgcactctccgcagccgccctccgccaagccccagcgcccgctcccatcgccgatgaccgcggggaggaggatggagatgctctgtgccggcagggtccctgcgctgctgctctgcctgggtttccatcttctacaggcagtcctcagtacaactgtgattccatcatgtatcccaggagagtccagtgataactgcacagctttagttcagacagaagacaatccacgtgtggctcaagtgtcaataacaaagtgtagctctgacatgaatggctattgtttgcatggacagtgcatctatctggtggacatgagtcaaaactactgcaggtgtgaagtgggttatactggtgtccgatgtgaacacttctttttaaccgtccaccaacctttaagcaaagaatatgtggctttgaccgtgattcttattattttgtttcttatcacagtcgtcggttccacatattatttctgcagatggtacagaaatcgaaaaagtaaagaaccaaagaaggaatatgagagagttacctcaggggatccagagttgccgcaagtctgaatggcgccatcaaacttatgggcagggataacagtgtgcctggttaatattaatattcccattttattaataatatttatgttgggtcaagtgttaggtcaataacactgtattttaatgtacttgaaaaatgtttttatttttgttttatttttgacagactatttgctaatgtataatgtgcagaaaatatttaatatcaaaagaaaattgatatttttatacaagtaatttcctgagctaaatgcttcattgaaagcttcaaagtttatatgcctggtgcacagtgcttagaagtaagcaattcccaggtcatagctcaagaattgttagcaaatgacagatttctgtaagcctatatatatagtcaaatcgatttagtaagtatgttttttatgttcctcaaatcagtgataattggtttgactgtaccatggtttgatatgtagttggcaccatggtatcatatattaaaacaataatgcaattagaatttgggagaagcaaatataggtcctgtgttaaacactacacatttgaaacaagctaaccctggggagtctatggtctcttcactcaggtctcagctataattctgttatatgaggggcagtggacagttccctatgccaactcacgactcctacaggtactagtcactcatctaccagattctgcctatgtaaaatgaattgaaaaacaattttctgtaatcttttatttaagtagtgggcatttcatagcttcacaatgttccttttttgtatattacaacatttatgtgaggtaattattgctcaacagacaattagaaaaaagtccacacttgaagcctaaatttgtgctttttaagaatatttttagactatttctttttataggggctttgctgaattctaacattaaatcacagcccaaaatttgatggactaattattattttaaaatatatgaagacaataattctacatgttgtcttaagatggaaatacagttatttcatcttttattcaaggaagttttaactttaatacagctcagtaaatggcttcttctagaatgtaaagttatgtatttaaagttgtatcttgacacaggaaatgggaaaaaacttaaaaattaatatggtgtatttttccaaatgaaaaatctcaattgaaagcttttaaaatgtagaaacttaaacacaccttcctgtggaggctgagatgaaaactagggctcattttcctgacatttgtttattttttggaagagacaaagatttcttctgcactctgagcccataggtctcagagagttaataggagtatttttgggctattgcataaggagccactgctgccaccacttttggattttatgggaggctccttcatcgaatgctaaacctttgagtagagtctccctggatcacataccaggtcagggaggatctgttcttcctctacgtttatcctggcatgtgctagggtaaacgaaggcataataagccatggctgacctctggagcaccaggtgccaggacttgtctccatgtgtatccatgcattatataccctggtgcaatcacacgactgtcatctaaagtcctggccctggcccttactattaggaaaataaacagacaaaaacaagtaaatatatatggtcatatacatattgtatatatattcatatacaaacatgtatgtatacatgaccttaatggatcatagaattgcagtcatttggtgctctgctaaccatttatataaaacttaaaaacaagagaaaagaaaaatcaattagatctaaacagttatttctgtttcctatttaatacagctgaagtcaaaatatgtaagaacacattttaaatactctacttacagttggccctctgtggttagttccacatctgtggattcaaccaaccaaggacggaaaatgcttaaaaaataatacaacaacaacaaaaaatacattataacaactatttacttttttttttttctttttgagatggagtctcgctctgttgcccaggttggagtgcagtggcacgatctcggctcactgcaacctcacctcccgggttcaagagatcctcctgcctcagcctcctgagcagctgggactacaggcgcatgccaccatgcccagctaatttttgtatttttagtagaggcggggtttcaccatgttggccaggatggtctcaatctcctaaccttgagatccaccctccacagcctcccaaactgctgggattacaggtgtgagccaccgcacgtagcatttacattaggtattacaagtaatgtaaagatgatttaagtatacaggaggatgtgaataggttatatgcaagcactatgcccttttatataagtgacttgaacatctgtgcccgattttagtatgtgcaggggggcgatctgggaatcagtcccctgtggataccaaggtacaactgtatttattaacgcttactagatgtgaggagagtctgaatattttcagtgatcttggctgtttcaaaaaaatctattgacttttcaataaatcagctgcaatccatttatttcatttacaaaagatttattgtaagcatctcaatcttggtttgtcagtttatcttaagcatgtcaattcataaaaacaagtcatttttgtatttttcatctttaagaatgcttaaaaaagctaatccctaaaatagttagatctttgtaaatgcatattaaataataaagtatgacccacattactttttatgggtgaaaataagacaaaaataatagttttagtgaggatggtgctgagtaaacataaaaactgatttgctctcagctgatgtgtcctgtacacagtgggaagattttagttcacacttagtctaactcccccattttacagatttctcactatatatatttctagaaggggctatgcatattcaatgtattgagaaccaaagcaaccacaaatgcataaatgcataatttatggtcttcaaccaaggccacataataacccagttaacttactctttaaccaggaatattaagttctataactagtactcaaggtttaaccttaaaattaagatttccttaaccttaaccttaaaattgatattatattaaacatacataatacaatgtaactccactgttctcctgaatattttttgctctaatctctctgccgaaagtcaaagtgatgggagaattggtatactggtatgactacgtcttaagtcagatttttatttatgagtctttgagactaaattcaatcaccaccaggtatcaaatcaacttttatgcagcaaatatatgattctagtgtctgacttttgttaaattcagtaatgcagtttttaaaaacctgtatctgacccactttgtaatttttgctccaatatccattctgtagacttttgaaaaaaaagtttttaatttgatgcccaatatattctgaccgttaaaaaattcttgttcatatgggagaagggggagtaatgacttgtacaaacagtatttctggtgtatattttaatgtttttaaaaagagtaatttcatttaaatatctgttattcaaatttgatgatgttaaatgtaatataatgtattttctttttattttgcactctgtaattgcactttttaagtttgaagagccattttggtaaacggtttttattaaagatgctatggaacataaagttgtattgcatgcaatttgaagtaacttatttgactatgaatgttatcggattactgaattgtatcaatttgtttgtgttcaatatcagctttgataattgtgtaccttaagatattgaaggagaaaatagataatttacaagatattattaatttttatttatttttcttgggaattgaaaaaaattgaaataaataaaaatgcattgaacatcttgcattcaaaatc

SEQ ID NO: 207 - DNA, 480 bp, Homo sapiens
  source 1..480: mol_type = genomic DNA
acaaatagccctgggctctgcagctccacaggctcctggggtggagtccaaatcactcattgtttgtgaaagctgagctcacagcaaaacaagccaccatgaagctgtcggtgtgtctcctgctggtcacgctggccctctgctgctaccaggccaatgccgagttctgcccagctcttgtttctgagctgttagacttcttcttcattagtgaacctctgttcaagttaagtcttgccaaatttgatgcccctccggaagctgttgcagccaagttaggagtgaagagatgcacggatcagatgtcccttcagaaacgaagcctcattgcggaagtcctggtgaaaatattgaagaaatgtagtgtgtgacatgtaaaaactttcatcctggtttccactgtctttcaatgacaccctgatcttcactgcagaatgtaaaggtttcaacgtcttgctttaataaatcacttgctctcca

SEQ ID NO: 208 - DNA, 890 bp, Homo sapiens
  source 1..890: mol_type = genomic DNA
ctgggccacaggcatgaactaagagtgctgaagacctaggagaaccactggtcaggtcagctcccagctccacagggagtaagaaggagctgcaggcacagcaggctgaaagtccaccaagggctgaggccacaaggcctctggggcagccacagttttcatgatcacatcatacaggactgagaagcagataacaagagtgacgctcacagggctgggctgacgctaacaggaggcagtgtgtggctcgaagattcttgaacccacagcagcagctgcggccaccccatcctgcccacagctccagccctgagacgacgaggaggagagtcgactttgcctcttgcccaagggaccatgcccaggtgccggtggctctccctgatcctcctcaccattcccctggccctggtggccaggaaagacccaaaaaagaatgagacaggggtgctgaggaaattaaaacccgtcaatgcctcaaatgccaacgtgaagcagtgtctgtggtttgccatgcaagaatacaacaaagagagcgaggacaagtatgtcttcctggtggtcaagacactgcaagcccagcttcaggtcacaaatcttctggaataccttattgatgtagaaattgcccgcagcgattgcagaaagcctttaagcactaatgaaatctgcgccattcaagaaaactccaagctgaaaaggaaattaagctgcagctttttggtaggagcacttccctggaatggtgaattcactgtgatggagaaaaagtgtgaagatgcttaatggtgttttgaggcatccctccaacctctgtgactactttatccatgaaaatgaagcaatggcaggtgggaggctcttcccaatgtgctttcttcatgcatgcc

SEQ ID NO: 209 - DNA, 510 bp, Homo sapiens
  source 1..510: mol_type = genomic DNA
aagtttctgaggctgtagacatggggatcggatgctggagaaaccccctgctgctgctgattgccctggtcctgtcagccaagctgggtcacttccaaaggtgggagggcttccagcagaagctcatgagcaagaagaacatgaattcaacactcaacttcttcattcaatcctacaacaatgccagcaacgacacctacttatatcgagtccagaggctaattcgaagtcagatgcagctgacgacgggagtggagtatatagtcactgtgaagattggctggaccaaatgcaagaggaatgacacgagcaattcttcctgccccctgcaaagcaagaagctgagaaagagtttaatttgcgagtctttgatatacaccatgccctggataaactatttccagctctggaacaattcctgtctggaggccgagcatgtgggcagaaacctcagatgagggctcatatgattgagttgtgcactggctgttattaaactgtaaaggatca

SEQ ID NO: 210 - DNA, 698 bp, Homo sapiens
  source 1..698: mol_type = genomic DNA
agattcaaggcttcctctctggcacccaaccatgaagctcctttttcctatctttgccagcctcatgctacagtaccaggtgaacacagaatttattggcttgagacgctgtttaatgggtttggggagatgcagggatcactgcaatgtggatgaaaaagagatacagaaatgcaagatgaaaaaatgttgtgttggaccaaaagtggttaaattgattaaaaactacctgcaatatggaacaccaaatgtacttaatgaagacgtccaagaaatgctaaaacctgccaagaattctagtgctgtgatacaaagaaaacatattttatctgttctcccccaaatcaaaagcactagcttttttgctaataccaactttgtcatcattccaaatgccacccctatgaactctgccaccatcagcactatgaccccaggacagatcacatacactgctacttctaccaagagtaacaccaaagaaagcagagattctgccactgcctcgccaccaccagcaccacctccaccaaacatactgccaacaccatcactggagctagaggaagcagaagagcagtaatgtggatctttcccttaaaactccaagttcctctctatttttgctatctataaaatgacatagaactgtttcctctgtcatcagtcattcaataaacactgtttgagcacctaca

SEQ ID NO: 211 - DNA, 1393 bp, Homo sapiens
  source 1..1393: mol_type = genomic DNA
gccagaaacggggatcaggcctggttaccgggagtggggcgcccctcctccttatcccctcccctcttccctgtcccctttcacagctggctgtagctggccaaggagttctcgattaaagaggaaggggcagtgctcacatttctgggcaggtgtctggaaaatatgaggggccacccctctctgctgctgctatatatggcattaaccacctgcctggatacttcacccagtgaggagacagaccaagaagtcttcctgggtcccccagaggcccagagcttcctgagtagccatacccggattccaagagccaaccactgggacctggagctgctcacaccagggaacctggaacgggagtgtctggaagagaggtgttcctgggaagaggccagggagtattttgaggacaacactctcacggagcgcttttgggagagctacatctacaatggcaaaggagggcgtggacgagtggatgtggccagcctggctgtggggctgacaggtggcatcctgctcattgtcctggccggcctgggagccttttggtatctgcgctggcgacagcaccgaggccagcagccctgtccccaagaggccgggctcattagccctctgagtcctttgaaccctctgggcccaccgacgcccctgcctccacccccacccccacccccaggcctccccacctatgagcaggcgctggcagcctctggggtacacgacgcacctccacccccctacaccagcctcaggaggcctcactgaagagctgctttcgagacccggctctccgaaccgtgcccctgattcataccggattccggaagccgctaggcctcatagacgccgaagctggacttggagtggggaatggtgggagtaggggtcatccggcccgaggcctgccctggcacacgcgtttccgccgcgtatggatatacacatgttttcggcaacgtgttcccgtgtcctggcccctcacgggcccccacactctcctgaccgtgagggcactggtcagttccgcccccgtggtaggcagacgcgcggggaaattcggacccaggagcccagccccggctgtgccatcttgtgtatgggcagatatgacctgacagccccctccagtgccacagggtacgcacacgcagagccccgcctgtgcacacgcgtgtcttcgtgcactccccgtgcggtacaggggcacttcgtaacccagggaaagggcggggggcatatttgcaagcgcgctcggtgcgggcaggctcgcattgcacccagggagctggagttgagctgttcccctaaataaaaacccttcggaaaggagaccaaaaaaagcagaaataatgcaaaaaataataatgaaatgaactgcgatccc

SEQ ID NO: 212 - DNA, 982 bp, Homo sapiens
  source 1..982: mol_type = genomic DNA
tcaacacaacttgcttctctccagacttgggcttaaggctctgataaccatgaggcttctcattctcacctgtcttgtggctgttgctcttgccaggcctaaacttcctcttagatacccagaacgccttcagaatccatcagagagcagtgagcctataccattagaatcaagagaggaatacatgaatggtatgaacaggcagagaaacattctgagagaaaaacagactgatgaaatcaaggatactaggaatgagtctactcagaactgtgttgtggcagagcctgagaagatggaatccagcatcagttcatcgagtgaggaaatgtctctcagtaagtgtgcggaacagttttgtagactgaacgaatacaaccaacttcagctgcaagctgcccatgcccaggagcaaattcgcagaatgaatgaaaacagccatgtccaagtgcctttccagcagctcaaccaacttgctgcctacccctatgctgtttggtactatccacaaatcatgcagtatgttcctttcccaccgttttccgacatctccaatcccactgctcatgaaaattatgaaaaaaataacgtcatgctacagtggtgatatgattgaaaatttcattctctgaatttctcctctcaaggaaaaccatcttatctgaagactggactgttgttttagaatagtaaaatcccatattgaaggaaattgttctttttgagttatctacttaatagcatatcattctttttcttaagctaaattttcctagagagtttattgtctaaatttcagttgtgtcttgccatatggagggcacctaatcagagggtattaaagtgtttactaagttttctagtggacattttgtttaaaaagtctttgaattgccagttctgtaagtgccatcaattaaaatagttttgtgcagtgacagagattttcttttttcttttcaataaattacactttaaggca

SEQ ID NO: 213 - DNA, 1713 bp, Homo sapiens
  source 1..1713: mol_type = genomic DNA
gagcaccgcacactcacttcaccctggttcaacacccccacgaggttgaccccgtcattatgttagagattatgcattttccacatagggaaactgaggctcaggggtgttaagtgactcacccaaggtcacacggctaggaagttgctgcacgctcctatgctccatttcctctgggagcctatcaacccagataaagcgggacctcctctctggtagaggtgcagggggcagtactcaacatgatcacagagggagcgcaggcccctcgattgttgctgccgccgctgctcctgctgctcaccctgccagccacaggctcagaccccgtgctctgcttcacccagtatgaagaatcctccggcaagtgcaagggcctcctggggggtggtgtcagcgtggaagactgctgtctcaacactgcctttgcctaccagaaacgtagtggtgggctctgtcagccttgcaggtccccacgatggtccctgtggtccacatgggccccctgttcggtgacgtgctctgagggctcccagctgcggtaccggcgctgtgtgggctggaatgggcagtgctctggaaaggtggcacctgggaccctggagtggcagctccaggcctgtgaggaccagcagtgctgtcctgagatgggcggctggtctggctgggggccctgggagccttgctctgtcacctgctccaaagggacccggacccgcaggcgagcctgtaatcaccctgctcccaagtgtgggggccactgcccaggacaggcacaggaatcagaggcctgtgacacccagcaggtctgccccacacacggggcctgggccacctggggcccctggaccccctgctcagcctcctgccacggtggaccccacgaacctaaggagacacgaagccgcaagtgttctgcacctgagccctcccagaaacctcctgggaagccctgcccggggctagcctacgagcagcggaggtgcaccggcctgccaccctgcccagtggctgggggctgggggccttggggccctgtgagcccctgccctgtgacctgtggcctgggccagaccatggaacaacggacgtgcaatcaccctgtgccccagcatgggggccccttctgtgctggcgatgccacccggacccacatctgcaacacagctgtgccctgccctgtggatggggagtgggactcgtggggggagtggagcccctgtatccgacggaacatgaagtccatcagctgtcaagaaatcccgggccagcagtcacgcgggaggacctgcaggggccgcaagtttgacggacatcgatgtgccgggcaacagcaggatatccggcactgctacagcatccagcactgccccttgaaaggatcatggtcagagtggagtacctgggggctgtgcatgcccccctgtggacctaatcctacccgtgcccgccagcgcctctgcacacccttgctccccaagtacccgcccaccgtttccatggtcgaaggtcagggcgagaagaacgtgaccttctgggggagaccgctgccacggtgtgaggagctacaagggcagaagctggtggtggaggagaaacgaccatgtctacacgtgcctgcttgcaaagaccctgaggaagaggaactctaacacttctctcctccactctgagccccctgaccttccaaacctcaataaactagcctcttcg

SEQ ID NO: 214 - DNA, 453 bp, Homo sapiens
  source 1..453: mol_type = genomic DNA
atgctcattgcaacttccttcttcctttttttctcatcggtggtggcagcccccacccacagcagtttctggcagtttcagaggagggtcaaacacatcacggggcgaagtgccttcttctcatattacggatatggctgctactgtgggcttggggataaagggatccccgtggatgacactgacagcccctcatctccctctccctacgagaagctgaaggagttcagctgccagcctgtgttgaacagctaccagttccacatcgtcaatggcgcagtggtttgtggatgcacccttggtcctggtgccagctgccactgcaggctgaaggcctgtgagtgtgacaagcaatccgtgcactgcttcaaagagagcctgcccacctatgagaaaaacttcaagcagttctccagccagcccaggtgtggcagacataagccctggtgctag

SEQ ID NO: 215 - DNA, 2162 bp, Homo sapiens
  source 1..2162: mol_type = genomic DNA
gcttaccctcccgggaggcgtggcctgcgggccgcccagcctctagtgggcgagcggggaacgcgggccccgccccccccccgcctataagggcggtgcggcactgcagctagcgcagttctcactgagacctgtcaccccgactcaacgtgagacgcaccgcccggactcaccatgcgtgaatgcatctcagtccacgtggggcaggcaggtgtccagatgggcaatgcctgctgggagctctattgcttggaacatgggattcagcctgatgggcagatgcccagtgacaagaccattggtggaggggacgactccttcaccaccttcttctgtgaaactggtgctggaaaacacgtaccccgggcagtttttgtggatctggagcctacggtcattgatgagatccgaaatggcccataccgacagctcttccacccagagcagctcatcactgggaaagaggatgctgccaacaactatgcccgtggtcactataccattggcaaggagatcattgacccagtgctggatcggatccgcaagctgtctgaccagtgcacaggacttcagggcttcctggtgttccacagctttggtgggggcactggctctggcttcacctcactcctgatggagcggctctctgttgactatggcaagaaatccaagctggaattctccatctacccagccccccaggtgtctacagccgtggtcgagccctacaactctatcctgaccacccacaccaccctggagcactcagactgtgccttcatggtggacaacgaagcaatctatgacatctgccgccgcaacctagacatcgagcgcccaacctacaccaacctcaatcgcctcattagccaaattgtctcctccatcacagcttctctgcgctttgacggggccctcaatgtggacctgacagagttccagaccaacctggtgccctaccctcgcatccacttccccctggccacctatgcaccagtcatctctgcagaaaaggcataccacgagcagctgtcggtggcagagatcaccaatgcctgctttgagcctgccaaccagatggtaaagtgtgatccccggcacggcaagtacatggcctgctgcctgctgtaccgtggagatgtggtgcccaaggatgtcaacgctgccattgccgccatcaagaccaagcgcagcattcagtttgtggactggtgccccacaggcttcaaggttggtatcaactaccagcctcccactgtggtgcctgggggtgacctggccaaggtgcagcgtgccgtgtgcatgctgagcaacacgaccgccatcgccgaggcctgggcccgcctggaccacaagttcgacctgatgtatgccaagagggcgtttgtgcactggtatgtgggtgagggcatggaggagggtgagttctccgaggcccgtgaggatatggctgccctggagaaggattatgaggaggtgggcatcgactcctatgaggacgaggatgagggagaagaataaagcagctgcctggagcctattcactatgtttattgcaaaatcctttcgaaataaacagtttccttgcacggtttcttgttccctctgagtgcttgagcttctgctgccttccccttcatgctgctgctgctctgtttgctgttcatgacccttatcccttccatcgctgaaggtgagacctgcaaaggggttcttgccaggcccaggaagcataaccccagggactttaaattgaagtcctagggttactcagtatagggaggaaatgaggaccaaaatccaggcacaaactgttgaaggatgagtcttcagctcctttccaagtaggagtataatccagtggtttctgtctttgaaagttagactgctaccctgttcttcctgctgcctctacatttaccaactctggaagcaaggcttggcccaggctcctctgtgcattatgagggtttgggagtggggctgggctggcccagagttcctgggcatggagccacgtcataagcttgggggatgggagggaacacaggcgatctcctagagttgtttgtgccactgcacctctgagcagctttgcatagcttcctgtcttgctgctttgctggagctggggctgtgccattaaaagtcaggtcatctcc

SEQ ID NO: 216 - DNA, 2002 bp, Homo sapiens
  source 1..2002: mol_type = genomic DNA
tataacgtgagggctgaatgcagcccattctctggagaacttcctcacacaccgcagcaaagagaagactgaaagacaaacctgggtgcagccagagaggtccagatagatgagcttgtggcatccattccccaagttcagcctagggactccacgtaccccagctgggtctcattgttccagaactgcattagttaagattacccagacttggatttcaaaggaatactttcattgttccgtctgtaacacgaagtaattggggccagctggatgtcaggatgcgtgtggttaccattgtaatcttgctctgcttttgcaaagcggctgagctgcgcaaagcaagcccaggcagtgtgagaagccgagtgaatcatggccgggcgggtggaggccggagaggctccaacccggtcaaacgctacgcaccaggcctcccgtgtgacgtgtacacatatctccatgagaaatacttagattgtcaagaaagaaaattagtttatgtgctgcctggttggcctcaggatttgctgcacatgctgctagcaagaaacaagatccgcacattgaagaacaacatgttttccaagtttaaaaagctgaaaagcctggatctgcagcagaatgagatctctaaaattgagagtgaggcgttctttggtttaaacaaactcaccaccctcttactgcagcacaaccagatcaaagtcttgacggaggaagtgttcatttacacacctctcttgagctacctgcgtctttatgacaacccctggcactgtacttgtgagatagaaacgcttatttcaatgttgcagattcccaggaaccggaatttggggaactacgccaagtgtgaaagtccacaagaacaaaaaaataaaaaactgcggcagataaaatctgaacagttgtgtaatgaagaagaaaaggaacaattggacccgaaaccccaagtgtcagggagacccccagtcatcaagcctgaggtggactcaactttttgccacaattatgtgtttcccatacaaacactggactgcaaaaggaaagagttgaaaaaagtgccaaacaacatccctccagatattgttaaacttgacttgtcatacaataaaatcaaccaacttcgacccaaggaatttgaagatgttcatgagctgaagaaattaaacctcagcagcaatggcattgaattcatcgatcctgggtctttgagatgaaaccctgcaagtagacttacgtgaatgatttttgctgtgccgcttttttagggctcacacatttagaagaattagatttatcaaacaacagtctgcaaaactttgactatggcgtattagaagacttgtattttttgaaactcttgtggctcagagataacccttggagatgtgactacaacattcactacctctactactggttaaagcaccactacaatgtccattttaatggcctggaatgcaaaacgcctgaagaatacaaaggatggtctgtgggaaaatatattagaagttactatgaagaatgccccaaagacaagttaccagcatatcctgagtcatttgaccaagacacagaagatgatgaatgggaaaaaaaacatagagatcacaccgcaaagaagcaaagcgtaataattactatagtaggataaggtagaaattgttctgattgtaattagttttgtattttctatactggtgttagaaaacatatgtttacatttgattaactgtgttgcctatttatgcagggtaatccagctaaaggaagctttctttaattataagtattattgtgactattatagtaatcaagagaatgctatcatcctgcttgcctgtccatttgtggaacagcatctggtgatatgcaattccacactggtaacctgcagcagttgggtcctaatgatggcattagactttcataatgtcctgtataaatgtttttactgcttttagaaaataaagaaaaaaaacttggttcatgttta

SEQ ID NO: 217 - DNA, 1405 bp, Homo sapiens
  source 1..1405: mol_type = genomic DNA
gaccaacggaccggacagagacgaggagaggaacaggaagagagaagctgggagaatcgggaacctgggggctagtgacctgcacacagggcaggggcactcggcagttcccagaggccacccctcccaccccagacatccagacatctggaactttgggtgccaagagtccagcttaatgcaggcagcctggcttttgggggctttggtggtcccccagctcttgggctttggccatggggctcggggagcagagagggagtgggagggaggctggggaggtgcccaggaggaggagcgggagagggaggccctgatgctgaagcatctgcaggaagccctaggactgcctgctgggaggggggatgagaatcctgccggaactgttgagggaaaagaggactgggagatggaggaggaccagggggaggaagaggaggaggaagcaacgccaaccccatcctccggccccagcccctctcccacccctgaggacatcgtcacttacatcctgggccgcctggccggcctggacgcaggcctgcaccagctgcacgtccgtctgcacgcgttggacacccgcgtggtcgagctgacccaggggctgcggcagctgcggaacgcggcaggcgacacccgcgatgccgtgcaagccctgcaggaggcgcagggtcgcgccgagcgcgagcacggccgcttggagggctgcctgaaggggctgcgcctgggccacaagtgcttcctgctctcgcgcgacttcgaagctcaggcggcggcgcaggcgcggtgcacggcgcggggcgggagcctggcgcagccggcagaccgccagcagatggaggcgctcactcggtacctgcgcgcggcgctcgctccctacaactggcccgtgtggctgggcgtgcacgatcggcgcgccgagggcctctacctcttcgaaaacggccagcgcgtgtccttcttcgcctggcatcgctcaccccgccccgagctcggcgcccagcccagcgcctcgccgcatccgctcagcccggaccagcccaacggtggcacgctcgagaactgcgtggcgcaggcctctgacgacggctcctggtgggaccacgactgccagcggcgtctctactacgtctgcgagttccccttctagcggggccggtaccccgcctccctgcccatcccaccacccggcctttccctgcgccgtgcccaccctcctccggaatctcccttcccttcctggccacgaatggcagcgtcctccccgacccccagtctgggcgcttctgggagggctcttgcggtgccggcactcctccttgttagtgtctttccttgaaggggcgggcaccaggctaggtccggtgccaataaatccttgtggaatctgacttgaggggcagtg

SEQ ID NO: 218 - DNA, 1630 bp, Homo sapiens
  source 1..1630: mol_type = genomic DNA
gcggagggaccgacggacgcacgggcgggcggccgggagccatggagcgcggccctggggcccgggggcgcgggccggggtgggcttcccacggcacgacatggagacctgtggttgcgaggctccctggggctcggcttggaccgcgatggggctgggccctggcctcctaacggggctgctgtctggggcggtagctgggggggcgctctcccccctgcccgcgactcggagcacccccacccctcccctgccgggccaggccgggcggcgttgttggcgggggccccggtggaggcccggcctgggcggcgcccgccatgaatgggctgtcgctgagtgagctctgctgcctcttctgctgcccgccctgccccggccgcatcgctgccaagctcgccttcctgccgccggaggccacctactccctggtgcctgagcccgagccggggcctggtggggccggggccgcccccttggggaccctgagagcctcctcgggcgcacccgggcgctggaagctgcacctgacggagcgtgccgacttccagtacagccagcgcgagctggacaccatcgaggtcttccccaccaagagcgcccgcggcaaccgcgtctcctgcatgtatgttcgctgcgtgcctggtgccagacaaggacaccaggctcagggaggccatccccagctggcatgggtgggcaggctgggcgactccaacaacccagcgcctggtggttgcctgctgggcaagagctggggcacaggggctgccctggcctgcgggtacatccaccttctcgccaggtacacggtcctcttctcgcacggcaatgccgtggacctgggccagatgagcagcttctacattggcctgggctcccgcctccactgcaacatcttctcctacgactactccggctacggtgccagctcgggcaggccttccgagaggaacctctatgccgacatcgacgccgcctggcaggccctgcgcaccaggtacggcatcagcccggacagcatcatcctgtacgggcagagcatcggcacggtgcccaccgtggacctggcctcgcgctacgagtgtgccgcggtggtgctgcactcgccgctcacctcgggcatgcgcgtcgccttccccgacaccaagaagacctactgcttcgacgccttccctaacatcgagaaggtgtccaagatcacgtctcccgtgctcatcatccacggcacggaggacgaggtgatcgacttctcgcacgggctggcgctctacgagcgctgccccaaggcggtggagccgctgtgggtggagggcgccgggcacaacgacatcgagctctacagccagtacctggagcgcctgcgtcgcttcatctcccaggagctgcccagccagcgcgcctagcggcggccccaaccggccggacctcagcaataaggcggcccccggacctcaccccgcgccggcccccacccaggggctgcatgtggaccccccgggcggcccaggggaccccgccccgacccaggggctgtggacgatgtacaggcaacagagctacgcactcctttccttttggaagcaagaagaaaatacgtgaaaacggaaattaaagatttaaaatttta

SEQ ID NO: 219 - DNA, 1943 bp, Homo sapiens
  source 1..1943: mol_type = genomic DNA
aggaggggggtgctcgcgccgccgggagaggcgagcgcgaggcagagagcgcgattcggctccaaactccggcgctgcagccgatcggactctgggccgcggtgggcaccgcgcgcagctagggagccgagaaccgcggcgagccccgaggacgcccagagcgcgagggtcgctgcgcctcgcagagccggagccgagtcgagccgggcgcccgggctgcctggccgcggcggcatgggggcgcccccgcggctctccgcgctgcccgccaccgcctcggccagtggccggaggcaggagcgcgtctgagcccatggcgaggggacccgccgccaccgcctccacccccgccgccccgccaccgccgccagctcccgggcaccatgcgaaccgccccgagcctccgccgctgcgtctgcctgctgctcgccgcgatcctggacctggcgcgcggctacctgacagtcaacattgagcctctcccccctgtggtggctggagacgccgtgactttgaagtgtaacttcaagacagatgggcgcatgcgggagatcgtgtggtaccgggtgacggatggtggcaccatcaagcaaaagatcttcaccttcgacgccatgttctccaccaactactcacacatggagaactaccgcaagcgagaggacctggtgtaccagtccactgtgaggctgcccgaggtccggatctcagacaatggtccctatgagtgccatgtgggcatctacgaccgcgccaccagggagaaggtggtcctggcatcaggcaacatcttcctcaacgtcatggctcctcccacctccattgaagtggtggctgctgacacaccagcccccttcagccgctaccaagcccagaacttcacgctggtctgcatcgtgtctggaggaaaaccagcacccatggtttatttcaaacgagatggggaaccaatcgacgcagtgcccctatcagagccaccagctgcgagctccggccccctacaggacagcaggcccttccgcagccttctgcaccgtgacctggatgacaccaagatgcagaagtcactgtccctcctggacgccgagaaccggggtgggcgaccctacacggagcgcccctcccgtggcctgaccccagatcccaacatcctcctccagccaaccacagagaacataccagagacggtcgtgagccgtgagtttccccgctgggtccacagcgccgagcccacctacttcctgcgccacagccgcaccccgagcagtgacggcactgtggaagtacgtgccctgctcacctggaccctcaacccacagatcgacaacgaggccctcttcagctgcgaggtcaagcacccagctctgtcgatgcccatgcaggcagaggtcacgctggttgcccccaaaggacccaaaattgtgatgacgcccagcagagcccgggtaggggacacagtgaggattctggtccatgggtttcagaacgaagtcttcccggagcccatgttcacgtggacgcgggttgggagccgcctcctggacggcagcgctgagttcgacgggaaggagctggtgctggagcgggttcccgccgagctcaatggctccatgtatcgctgcaccgcccagaacccactgggctccaccgacacgcacacccggctcatcgtgtttgaaaacccaaatatcccaagaggaacggaggactctaatggttccattggccccactggtgcccggctcaccttggtgctcgccctgacagtgattctggagctgacgtgaaggcacccgccccggccactccatcaggcactgacatctccacgaccggttttcatttcttttctaaactatttccagtcttgttcttagtctctttccatctgtgtcttggcttcttcagtcggtttaattaaaacaaacagaacaattttcccc

SEQ ID NO: 220 - DNA, 1497 bp, Homo sapiens
  source 1..1497: mol_type = genomic DNA
cgcggatcggacccaagcaggtcggcggcggcggcaggagagcggccgggcgtcagctcctcgacccccgtgtcgggctagtccagcgaggcggacgggcggcgtgggcccatggccaggcccggcatggagcggtggcgcgaccggctggcgctggtgacgggggcctcggggggcatcggcgcggccgtggcccgggccctggtccagcagggactgaaggtggtgggctgcgcccgcactgtgggcaacatcgaggagctggctgctgaatgtaagagtgcaggctaccccgggactttgatcccctacagatgtgacctatcaaatgaagaggacatcctctccatgttctcagctatccgttctcagcacagcggtgtagacatctgcatcaacaatgctggcttggcccggcctgacaccctgctctcaggcagcaccagtggttggaaggacatgttcaatgtgaacgtgctggccctcagcatctgcacacgggaagcctaccagtccatgaaggagcggaatgtggacgatgggcacatcattaacatcaatagcatgtctggccaccgagtgttacccctgtctgtgacccacttctatagtgccaccaagtatgccgtcactgcgctgacagagggactgaggcaagagcttcgggaggcccagacccacatccgagccacgtgcatctctccaggtgtggtggagacacaattcgccttcaaactccacgacaaggaccctgagaaggcagctgccacctatgagcaaatgaagtgtctcaaacccgaggatgtggccgaggctgttatctacgtcctcagcacccccgcacacatccagattggagacatccagatgaggcccacggagcaggtgacctagtgactgtgggagctcctccttccctccccacccttcatggcttgcctcctgcctctggattttaggtgttgatttctggatcacgggataccacttcctgtccacaccccgaccaggggctagaaaatttgtttgagatttttatatcatcttgtcaaattgcttcagttgtaaatgtgaaaaatgggctggggaaaggaggtggtgtccctaattgttttacttgttaacttgttcttgtgcccctgggcacttggcctttgtctgctctcagtgtcttccctttgacatgggaaaggagttgtggccaaaatccccatcttcttgcacctcaacgtctgtggctcagggctggggtggcagagggaggccttcaccttatatctgtgttgttatccagggctccagacttcctcctctgcctgccccactgcaccctctcccccttatctatctccttctcggctccccagcccagtcttggcttcttgtcccctcctggggtcatccctccactctgactctgactatggcagcagaacaccagggcctggcccagtggatttcatggtgatcattaaaaaagaaaaatcgcaaccaatc

SEQ ID NO: 221 - DNA, 1888 bp, Homo sapiens
  source 1..1888: mol_type = genomic DNA
gccagttaagaactcacaggtacttttccagccacccagataggagagatcattaaaacagtgcattctgtgctacctgacacctattggctttggtctgctctaaacttatccatctctgtccattactggaacaactccgcaaagtccttattccctaaaacatcactgataccattaaagccactaacagagactgaactcagaataaaggaaatcatagagaaactagatcagcagatcccacccagacctttcacccatgtgaacaccaccaccagtgccacacacagcacagccaccatcctcaaccctcgagatacatactgcaggggagaccagctggacatcctactggaggtgagggaccacttgggacagaggaagcaatatggtggggatttcctgagggccaggatgtcctccccagcactgacggcaggtgcttcaggaaaggtgatggacttcaacaatggcacctacctggtcagcttcactctgttctgggagggccaggtctccctgtctctgctgctcatccaccccagtgaaggggcgtcggctctctggagggcaaggaaccaaggctatgataaaattattttcaaaggcaaatttgttaatggcacctctcatgtcttcactgaatgtggcctgaccctaaactcaaatgctgaactctgtgaatatctggatgacagagaccaagaagccttctattgtatgaagcctcaacacatgccctgtgaggctctgacctacatgaccacccggaatagagaggtatcttatcttacagacaaggaaaacagccttttccacaggtccaaagtgggagttgaaatgatgaaggatcgtaaacacattgatgtcactaattgtaacaagagagaaaaaatagaagagacatgccaagttggaatgaagcctcctgtccctggtggttatactttacaaggaaaatggataacaacattttgcaaccaggttcagttagacacaattaagataaatggctgtttgaaaggcaaactcatttacctcctgggagactctacactacgtcagtggatctactacttccccaaagttgtaaaaacactgaagttttttgatcttcatgaaactggaatctttaagaaacatttgcttctggatgcagaaagacacactcagattcaatggaaaaaacatagctatcccttcgtcactttccagctctactctctgatagatcatgattatatccctcgggaaattgaccggctatcaggtgacaaaaacacagccatcgtcatcacctttggccagcactttagaccatttcccattgacatttttattcgcagggccatcggtgttcaaaaggctattgaaagactgttcctaagaagcccagccactaaagtgattattaagacagaaaacatcagggagatgcacatagagacagagaggtttggagacttccatggttatattcactatcttatcatgaaggatattttcaaagacctcaacgtgggcatcattgatgcctgggacatgaccattgcatatggcactgacactatccacccacctgatcatgtgattggaaatcagattaacatgttcttaaactacatttgctaagggataaatactatacaaaatcactaggaaccaatctctgcacataatcccacatgtattgtaaagtaagttttactcattttaggaactaaggaaaataaatttaaaagaatctgtttggggaggaaggctatgtaaggacaatgacaactgataagggatgcaaaaccaagagaatcattcatgaagaatgactataccatgcctggttctgatgctcgtttaaaatattaaaaaagttttttaaaagcca

SEQ ID NO: 222 - DNA, 871 bp, Homo sapiens
  source 1..871: mol_type = genomic DNA
ataccttagaccctcagtcatgccagtgcctgctctgtgcctgctctgggccctggcaatggtgacccggcctgcctcagcggcccccatgggcggcccagaactggcacagcatgaggagctgaccctgctcttccatgggaccctgcagctgggccaggccctcaacggtgtgtacaggaccacggagggacggctgacaaaggccaggaacagcctgggtctctatggccgcacaatagaactcctggggcaggaggtcagccggggccgggatgcagcccaggaacttcgggcaagcctgttggagactcagatggaggaggatattctgcagctgcaggcagaggccacagctgaggtgctgggggaggtggcccaggcacagaaggtgctacgggacagcgtgcagcggctagaagtccagctgaggagcgcctggctgggccctgcctaccgagaatttgaggtcttaaaggctcacgctgacaagcagagccacatcctatgggccctcacaggccacgtgcagcggcagaggcgggagatggtggcacagcagcatcggctgcgacagatccaggagagactccacacagcggcgctcccagcctgaatctgcctggatggaactgaggaccaatcatgctgcaaggaacacttccacgccccgtgaggcccctgtgcagggaggagctgcctgttcactgggatcagccagggcgccgggccccacttctgagcacagagcagagacagacgcaggcggggacaaaggcagaggatgtagccccattggggaggggtggaggaaggacatgtaccctttcatgcctacacacccctcattaaagcagagtcgtggcatctc

SEQ ID NO: 223 - DNA, 1727 bp, Homo sapiens
  source 1..1727: mol_type = genomic DNA
ggtctgaggcctctgcctaaagacaaagcctgtgctggggtgtgcaggatataaggttggacttccagacccactgcccgggagaggagaggagcgggccgaggactccagcgtgcccaggtctggcatcctgcacttgctgccctctgacacctgggaagatggccggcccgtggaccttcacccttctctgtggtttgctggcagccaccttgatccaagccaccctcagtcccactgcagttctcatcctcggcccaaaagtcatcaaagaaaagctgacacaggagctgaaggaccacaacgccaccagcatcctgcagcagctgccgctgctcagtgccatgcgggaaaagccagccggaggcatccctgtgctgggcagcctggtgaacaccgtcctgaagcacatcatctggctgaaggtcatcacagctaacatcctccagctgcaggtgaagccctcggccaatgaccaggagctgctagtcaagatccccctggacatggtggctggattcaacacgcccctggtcaagaccatcgtggagttccacatgacgactgaggcccaagccaccatccgcatggacaccagtgcaagtggccccacccgcctggtcctcagtgactgtgccaccagccatgggagcctgcgcatccaactgctgcataagctctccttcctggtgaacgccttagctaagcaggtcatgaacctcctagtgccatccctgcccaatctagtgaaaaaccagctgtgtcccgtgatcgaggcttccttcaatggcatgtatgcagacctcctgcagctggtgaaggtgcccatttccctcagcattgaccgtctggagtttgaccttctgtatcctgccatcaagggtgacaccattcagctctacctgggggccaagttgttggactcacagggaaaggtgaccaagtggttcaataactctgcagcttccctgacaatgcccaccctggacaacatcccgttcagcctcatcgtgagtcaggacgtggtgaaagctgcagtggctgctgtgctctctccagaagaattcatggtcctgttggactctgtgcttcctgagagtgcccatcggctgaagtcaagcatcgggctgatcaatgaaaaggctgcagataagctgggatctacccagatcgtgaagatcctaactcaggacactcccgagttttttatagaccaaggccatgccaaggtggcccaactgatcgtgctggaagtgtttccctccagtgaagccctccgccctttgttcaccctgggcatcgaagccagctcggaagctcagttttacaccaaaggtgaccaacttatactcaacttgaataacatcagctctgatcggatccagctgatgaactctgggattggctggttccaacctgatgttctgaaaaacatcatcactgagatcatccactccatcctgctgccgaaccagaatggcaaattaagatctggggtcccagtgtcattggtgaaggccttgggattcgaggcagctgagtcctcactgaccaaggatgcccttgtgcttactccagcctccttgtggaaacccagctctcctgtctcccagtgaagacttggatggcagccatcagggaaggctgggtcccagctgggagtatgggtgtgagctctatagaccatccctctctgcaatcaataaacacttgcctgtgatgcctgc

SEQ ID NO: 224 - DNA, 1122 bp, Homo sapiens
  source 1..1122: mol_type = genomic DNA
ggagaatttgcaggggggtgacatcctcagacctggcccttggcactgggaagagttgatgcaaagaaattctgcgaggccagagaggaggctttgggaattgtccagcagaaacagagaagtctgaggtggtgtcaagacaaaagatgcttcagctttggaaacttgttctcctgtgcggcgtgctcactgggacctcagagtctcttcttgacaatcttggcaatgacctaagcaatgtcgtggataagctggaacctgttcttcacgagggacttgagacagttgacaatactcttaaaggcatccttgagaaactgaaggtcgacctaggagtgcttcagaaatccagtgcttggcaactggccaagcagaaggcccaggaagctgagaaattgctgaacaatgtcatttctaagctgcttccaactaacacggacatttttgggttgaaaatcagcaactccctcatcctggatgtcaaagctgaaccgatcgatgatggcaaaggccttaacctgagcttccctgtcaccgcgaatgtcactgtggccgggcccatcattggccagattatcaacctgaaagcctccttggacctcctgaccgcagtcacaattgaaactgatccccagacacaccagcctgttgccgtcctgggagaatgcgccagtgacccaaccagcatctcactttccttgctggacaaacacagccaaatcatcaacaagttcgtgaatagcgtgatcaacacgctgaaaagcactgtatcctccctgctgcagaaggagatatgtccactgatccgcatcttcatccactccctggatgtgaatgtcattcagcaggtcgtcgataatcctcagcacaaaacccagctgcaaaccctcatctgaagaggacgaatgaggaggaccactgtggtgcatgctgattggttcccagtggcttgccccacccccttatagcatctccctccaggaagctgctgccaccacctaaccagcgtgaaagcctgagtcccaccagaaggaccttcccagataccccttctcctcacagtcagaacagcagcctctacacatgttgtcctgcccctggcaataaaggcccatttctgca

SEQ ID NO: 225 - DNA, 2300 bp, Homo sapiens
  source 1..2300: mol_type = genomic DNA
gcttttctgatagcaatttcatgagtcagctgacctaagatacatacttcaattctcatgggatttcttgagctaggaaaggtggttggcttacggcacagtagagagcttccagggctggctggcgtgggatacccgtaccacagaaatgcagggaccattgcttcttccaggcctctgctttctgctgagcctctttggagctgtgactcagaaaaccaaaacttcctgtgctaagtgccccccaaatgcttcctgtgtcaataacactcactgcacctgcaaccatggatatacttctggatctgggcagaaactattcacattccccttggagacatgtaacgacattaatgaatgtacaccaccctatagtgtatattgtggatttaacgctgtgtgttacaatgtcgaaggaagtttctactgtcaatgtgtcccaggatatagactgcattctgggaatgaacaattcagtaattccaatgagaacacctgtcaggacaccacctcctcaaagacaaccgagggcaggaaagagctgcaaaagattgtggacaaatttgagtcacttctcaccaatcagactttatggagaacagaagggagacaagaaatctcatccacagctaccactattctccgggatgtggaatcgaaagttctagaaactgccttgaaagatccagaacaaaaagtcctgaaaatccaaaacgatagtgtagctattgaaactcaagcgattacagacaattgctctgaagaaagaaagacattcaacttgaacgtccaaatgaactcaatggacatccgttgcagtgacatcatccagggagacacacaaggtcccagtgccattgcctttatctcatattcttctcttggaaacatcataaatgcaactttttttgaagagatggataagaaagatcaagtgtatctgaactctcaggttgtgagtgctgctattggacccaaaaggaacgtgtctctctccaagtctgtgacgctgactttccagcacgtgaagatgacccccagtaccaaaaaggtcttctgtgtctactggaagagcacagggcagggcagccagtggtccagggatggctgcttcctgatacacgtgaacaagagtcacaccatgtgtaattgcagtcacctgtccagcttcgctgtcctgatggccctgaccagccaggaggaggatcccgtgctgactgtcatcacctacgtggggctgagcgtctctctgctgtgcctcctcctggcggccctcacttttctcctgtgtaaagccatccggaacaccagcacctcactgcatctgcagctctcgctctgcctcttcctggcccacctcctcttcctcgtggggattgatcgaactgaacccaaggtgctgtgctccatcatcgccggtgctttgcactatctctacctggccgccttcacctggatgctgctggagggtgtgcacctcttcctcactgcacggaacctgacagtggtcaactactcaagcatcaatagactcatgaagtggatcatgttcccagtcggctatggcgttcccgctgtgactgtggccatttctgcagcctcctggcctcacctttatggaactgctgatcgatgctggctccacctggaccagggattcatgtggagtttccttggcccagtctgtgccattttctctgcgaatttagtattgtttatcttggtcttttggattttgaaaagaaaactttcctccctcaatagtgaagtgtcaaccatccagaacacaaggatgctggctttcaaagcaacagctcagctcttcatcctgggctgcacatggtgtctgggcttgctacaggtgggtccagctgcccaggtcatggcctacctcttcaccatcatcaacagcctccaaggcttcttcatcttcttggtctactgcctcctcagccagcaggtccagaaacaatatcaaaagtggtttagagagatcgtaaaatcaaaatctgagtctgagacatacacactttccagcaagatgggtcctgactcaaaacccagtgagggggatgtttttccaggacaagtgaagagaaaatattaaaactagaatattcaactccatatggaaaatcatatccatggatctctttggcattatgaagaatgaagctaaggaaaagggaattcattaaacatatcatccttggagaggaagtaatcaacctttacttcccaagctgtttgttctccacaataggctctcaacaaatgtgtggtaaattgcatttctcttc

SEQ ID NO: 226 - DNA, 1391 bp, Homo sapiens
  source 1..1391: mol_type = genomic DNA
gggaaagaaaatgaggccccaggacacctgggttcacacccaggtccccagcgatgtctccaccaccgctgctgcaacccctgctgctgctgctgcctctgctgaatgtggagccttccggggccacactgatccgcatccctcttcatcgagtccaacctggacgcaggatcctgaacctactgaggggatggagagaaccagcagagctccccaagttgggggccccatcccctggggacaagcccatcttcgtacctctctcgaactacagggatgtgcagtattttggggaaattgggctgggaacgcctccacaaaacttcactgttgcctttgacactggctcctccaatctctgggtcccgtccaggagatgccacttcttcagtgtgccctgctggttacaccaccgatttgatcccaaagcctctagctccttccaggccaatgggaccaagtttgccattcaatatggaactgggcgggtagatggaatcctgagcgaggacaagctgactattggtggaatcaagggtgcatcagtgattttcggggaggctctctgggagcccagcctggtcttcgcttttgcccattttgatgggatattgggcctcggttttcccattctgtctgtggaaggagttcggcccccgatggatgtactggtggagcaggggctattggataagcctgtcttctccttttacctcaacagggaccctgaagagcctgatggaggagagctggtcctggggggctcggacccggcacactacatcccacccctcaccttcgtgccagtcacggtccctgcctactggcagatccacatggagcgtgtgaaggtgggcccagggctgactctctgtgccaagggctgtgctgccatcctggatacgggcacgtccctcatcacaggacccactgaggagatccgggccctgcatgcagccattgggggaatccccttgctggctggggagtacatcatcctgtgctcggaaatcccaaagctccccgcagtctccttccttcttgggggggtctggtttaacctcacggcccatgattacgtcatccagactactcgaaatggcgtccgcctctgcttgtccggtttccaggccctggatgtccctccgcctgcagggcccttctggatcctcggtgacgtcttcttggggacgtatgtggccgtcttcgaccgcggggacatgaagagcagcgcccgggtgggcctggcgcgcgctcgcactcgcggagcggacctcggatggggagagactgcgcaggcgcagttccccgggtgacgcccaagtgaagcgcatgcgcagcgggtggtcgcggaggtcctgctacccagtaaaaatccactatttccattg

SEQ ID NO: 227 - DNA, 1859 bp, Homo sapiens
  source 1..1859: mol_type = genomic DNA
agtcaccatggcgaccctgcgcccagcctggagacacgctgaccctccctcccccgcagtggccgagcctgctgctgctcctgctgttgccggggcccccgcccgtcgccggcttggaagacgctgccttcccccacctgggggagagcttgcagcccctgccccgggcctgtcccctgcgctgctcctgcccccgagtcgacactgtggactgtgatggcttggaccttcgagtgttcccggacaacatcaccagagccgctcagcacctctccctgcagaacaaccagctccaggaactcccctacaatgagctgtcccgcctcagtggcctgcgaaccctcaacctccacaacaacctcatctcctccgaagctctcagtggcccctcagtttctgccccggtccctccgtgtcgcggatctggctgccaaccaagtgatggagatcttccccctcacctttggggagaagccggcactcaggtccgtgtacctccacaacaaccagctgagcaacgctggcctgccccccgacgccttccgcggctccgaggccatcgccaccctcagcctctccaacaaccagctcagctacctgccgcccagcctgccgccctcactcgagcggctccacctgcagaacaatctcatctccaaggtgccccgaggagccctgagccgccagactcaactccgtgagctctacctccagcacaaccagctgacagacagtggcctggatgccaccaccttcagcaagctgcatagccttgaatacctggatctctcccacaaccagctgaccacagtgcccgccggcctgccccggaccctggctatcctgcacctgggccgcaaccgcatccggcaggtggaggcggctcggctgcacggggcgcgtggtctgcgctatttgttgctgcagcacaaccagctggggagctcagggctgcccgccggggctctgcggccgctgcggggcctgcacacgctgcacctctatggcaatgggctggaccgcgtgcctccagccctgccccgccgcctgcgtgccctggtgctgccccacaaccacgtggccgcgctgggtgcccgtgacctggtcgccacaccgggcctgacggagcttaacctggcctataaccgcctggccagcgcccgtgtgcaccaccgggccttccgccggttgcgtgccctgcgcagcctcgacctggcagggaatcagctaacccggctgcccatgggcctgcccactggcctgcgcaccctgcagctgcaacgcaaccagctgcggatgctcgagcccgagcctctggccggcctggaccaactgcgggagctcagcctggcgcacaaccggctccgggtcggcgacatcgggccaggcacctggcatgagctccaagccctccaggtcaggcacaggctggttagccacactgtccccagggcccctccatccccctgcctgccctgccacgtcccaaacattctagttagctggtaaagcaatcagaacaagaaaatgataagagtgggttagaaggtgatgaggaggctgggtgaggtggctcatgcctgtaatcccagcactttggggagccaaggcaggagaatcgctttaggctatgggtttgagaccagcctggcaacacagcaagaccctatctctaccaaaaaaacatagccaagcgtggtggcacatgcctgtagtcccagctattcaggaggctgaggcaggaggatcgcttgagcccagaagtttgaggctgcaatgagccgtgatcgggccactgccctctagactgggcaacagagcaagaccctgtctcttgaaaaaaaaagtgatgaaagagg

SEQ ID NO: 228 - DNA, 3994 bp, Homo sapiens
  source 1..3994: mol_type = genomic DNA
ccggagggggcggccgcggagcactggttggagcgccgcgaagcgcccgagcctcttgccttcgcgggcggcgccctggccgccggcagccttgtggccggtgccccgatccgccgcgctccggacccgggcaggcggggcgcgcccgctgcgcgcgggatgtggcagcccagacggccctggccccgcgtgccctggcgctgggcgctggcgctgctggccctggttggcgcggggctgtgccacgccggcccgcagcccgggtatcccgcgcggcccagcgccaggaacaagaactggtgcgcctacatcgtgaacaagaatgtgagctgctccgtgctggagggaagtgagagttttattcaggctcagtacaactgtgcctggaaccagatgccctgtccgtcggcgctggtgtatcgagtgaacttcagacctagatatgtcactaggtataagacagtgacacagttggaatggaggtgctgtcctggctttagagggggagattgccaagaaggtcccaaagaccccgtgaagaccctccgccccacgccggctcggcctcgaaacagcttgaagaaagccacagataatgaacccagccaattctcagagcccaggaagactttgtccccaactggtacagcacaaccaagctggggggtagatccaaaagaggggcctcaggaacttcaggaaaagaagatacaggtgctagaggagaaggttcttcgactcacaaggacggttcttgacctccagtcttcccttgctggagtgagtgaaaatctcaaacatgccactcaggatgatgccagtagaacacgggcaccagggctcagcagccagcaccccaagcctgacaccactgttagtggagacacagaaacgggccagagtcctggtgtcttcaacactaaggaatctggcatgaaggacatcaagtctgaattggctgaagtcaaagatactctaaagaacaaaagtgacaagctggaagagctggatggaaaagtgaagggctacgaagggcagctcagacagctccaggaagcagctcagggcccgacggtgaccatgacaaccaacgaactctaccaagcctatgtggacagtaagatcgacgccctgagagaggagctcatggagggcatggacagaaagctggctgacctgaaaaactcatgtgagtacaagctcactggcctccagcagcagtgtgatgactatgggagcagctacctgggagtgatagagctcataggggagaaggaaacaagcctgagaaaagaaataaataacctccgagcccggctacaggagccttcagcccaggcaaattgctgcgacagtgaaaagaatggtgacattggtcaacagatcaagacattggaccagaaaatcgagagagttgctgaagccaccagaatgctgaatggaagactggacaatgagtttgaccgccttatagttccagagccagatgtggattttgatgcaaaatggaatgaactcgatgcaaggatcaatgtgacggagaagaacgctgaagaacattgcttttacattgaggaaacccttcggggcgccattaatggagaggtgggtgacttgaagcagcttgttgatcagaaaatacagtctctggaagaccgtctggggagcgttctcctacagatgaccaataacactggtgcagagctcagtcccccaggggcagcagccctgccaggagtgtcagggtcaggagatgaacgggtcatgatggaattaaaccacctgaaggacaaagttcaagttgttgaagacatttgcctgctgaacatccagggaaagcctcatgggatggaaggtgccttgccaaacagggaagaccgcgcagtacgcgacagcctgcaccttttgaaatctctcaacgacacgatgcacaggaagtttcaagaaaccgaacaaaccatccagaaacttcaacaggattttagttttctttattctcaattaaaccacacagaaaatgatgtgactcatcttcaaaaggaaatgagcaattgtagagcaggtgaaaacgctggcatgggtaggttcactaaggtgggtgagcaagaaaggacagtggacaccctgccgtccccccagcaccccgtggctcattgctgcagtcagctggaggagaggtggcagaggttgcagagccaggtcatctcggagctggatgcttgtaaggaatgcacgcagggggtccagagggaggtctccatggtggagggcagggtgtctcatatggagaaaacttgcagcaagctggactctatctcaggaaatcttcagaggatcaaggaggggctcaacaagcatgtcagcagcctgtggaactgtgtcaggcagatgaacggaacgctcaggtcgcattccagagacatttctggcctgaagaattcagtccagcagttctacagccacgtcttccagatttctactgatttgcaagatctggtcaaatttcagccatcagcaaaggcgccctcgcccccgccgcccgcagaggccccgaaggagccgctgcagcccgagcccgccccgccgaggcccagcggccccgcaaccgcagaggaccctgggcgacggcccgtcctgccccagcggccccccgaggagaggccgccccagccgccaggctccaccggggtcatcgcggagacgggccaggccgggccccccgcaggcgcaggcgtgtctgggcggggtctgccgcggggcgtggacggccagaccgggagcggcaccgtccccggcgcagaaggcttcgcgggcgcaccaggatacccgaagtcacctcctgtagcttccccaggagctccggtgccttctctggtgtctttttctgcggggctcacccagaagcctttccccagtgatgggggcgttgtcctctttaacaaagtgctggtgaacgacggggatgtttacaaccccagcaccggggtcttcacggctccttatgatgggcgctacctgatcacggccaccctcacccccgagagagacgcctacgtggaagcagtgctgtcggtctccaacgccagcgtggcccagctgcataccgctgggtacaggagagagttcctggaataccaccgccctccaggagctttgcatacctgcgggggcccgggggcattccacctcatcgtgcacctgaaggcgggagatgcagtcaacgtcgtggtgactgggggcaagctggctcacacagactttgatgaaatgtactccacatttagtggggttttcttatatcctttcctttcccacctctaaggtggctggggagatgtcaggggaaagatagatagttgtaaaaactctaaagctttaatatattcggtttgtatgtaatggaagcacggggctagagtttccacataggccccaacataaaggccttccctcgctgttgaggccaccatgccttactgcatccagccaggctgcagggagtgaggcacacggtgaacatggccactgacttttctgccactctaactggacaactggaagacttggaaaggcctccacctgtatctacactctgagggccctggactgggcctgagcttgccacagaggctccgtctgactgtgggctgggaggagggaggcaggggagagccggtcacggtggctggtctttactgcagggcagcactgtggccagctgtctgtctttacactgcatgcagaagtttaaacactgaagtgccgaagtggcccgtgccgccgcacagagaccccgactttagtttgggctgttccacgcttggctcaccattgccgcctgggacttaacctgctcaggcgggccttcgcccagctgcaaatagggatgcgttagagactgttcccaaagcttgttgggctccttaaatggcatgtacaatttaagtgcaaagacagggagtgtcaataaagatggaaagccatttccagttaa

SEQ ID NO: 229 - DNA, 3285 bp, Homo sapiens
  source 1..3285: mol_type = genomic DNA
cgctcgtccttgctctcgccgctgctgccggagccgaagcagagaaggcagcgggtcccgtgaccgtcccgagagccccgcgctcccgaccagggggcgggggcggccccggggagggcggggcaggggcggggggaagaaagggggttttgtgctgcgccgggagggccggcgccctcttccgaatgtcctgcggccccagcctctcctcacgctcgcgcagtctccgccgcagtctcagctgcagctgcaggactgagccgtgcacccggaggagacccccggaggaggcgacaaacttcgcagtgccgcgacccaaccccagccctgggtagcctgcagcatggcccagctgttcctgcccctgctggcagccctggtcctggcccaggctcctgcagctttagcagatgttctggaaggagacagctcagaggaccgcgcttttcgcgtgcgcatcgcgggcgacgcgccactgcagggcgtgctcggcggcgccctcaccatcccttgccacgtccactacctgcggccaccgccgagccgccgggctgtgctgggctctccgcgggtcaagtggactttcctgtcccggggccgggaggcagaggtgctggtggcgcggggagtgcgcgtcaaggtgaacgaggcctaccggttccgcgtggcactgcctgcgtacccagcgtcgctcaccgacgtctccctggcgctgagcgagctgcgccccaacgactcaggtatctatcgctgtgaggtccagcacggcatcgatgacagcagcgacgctgtggaggacagccagctgtatcccatccagaccccacgagaggcctgttacggagacatggatggcttccccggggtccggaactatggtgtggtggacccggatgacctctatgatgtgtactgttatgctgaagacctaaatggagaactgttcctgggtgaccctccagagaagctgacattggaggaagcacgggcgtactgccaggagcggggtgcagagattgccaccacgggccaactgtatgcagcctgggatggtggcctggaccactgcagcccagggtggctagctgatggcagtgtgcgctaccccatcgtcacacccagccagcgctgtggtgggggcttgcctggtgtcaagactctcttcctcttccccaaccagactggcttccccaataagcacagccgcttcaacgtctactgcttccgagggagcacttgccttctgccatccctgaggcctccaacccagcctccaacccaggatggactagaggctatcgtcacagtgacagagaccctggaggaactgcagctgcctcaggaagccacagagagtgaatcccgtggggccatctactccatccccatcatggaggacggaggaggtggaagctccactccagaagacccagcagaggcccctaggacgctcctagaatttgaaacacaatccatggtaccgcccacggggttctcagaagaggaaggtaaggcattggaggaagaagagaaatatgaagatgaagaagagaaagaggaggaagaagaagaggaggaggtggaggatgaggctctgtgggcatggcccagcgagctcagcagcccgggccctgaggcctctctccccactgagccagcagcccaggaggagtcactctcccaggcgccagcaagggcagtcctgcagcctggtgcatcaccacttcctgatggagagtcagaagcttccaggcctccaagggtccatggaccacctactgagactctgcccactcccagggagaggaacctagcatccccatcaccttccactctggttgaggcaagagaggtgggggaggcaactggtggtcctgagctatctggggtccctcgaggagagagcgaggagacaggaagctccgagggtgccccttccctgcttccagccacacgggcccctgagggtaccagggagctggaggccccctctgaagataattctggaagaactgccccagcagggacctcagtgcaggcccagccagtgctgcccactgacagcgccagccgaggtggagtggccgtggtccccgcatcaggtgactgtgtccccagcccctgccacaatggtgggacatgcttggaggaggaggaaggggtccgctgcctatgtctgcctggctatgggggggacctgtgcgatgttggcctccgcttctgcaaccccggctgggacgccttccagggcgcctgctacaagcacttttccacacgaaggagctgggaggaggcagagacccagtgccggatgtacggcgcgcatctggccagcatcagcacacccgaggaacaggacttcatcaacaaccggtaccgggagtaccagtggatcggactcaacgacaggaccatcgaaggcgacttcttgtggtcggatggcgtccccctgctctatgagaactggaaccctgggcagcctgacagctacttcctgtctggagagaactgcgtggtcatggtgtggcatgatcagggacaatggagtgacgtgccctgcaactaccacctgtcctacacctgcaagatggggctggtgtcctgtgggccgccaccggagctgcccctggctcaagtgttcggccgcccacggctgcgctatgaggtggacactgtgcttcgctaccggtgccgggaaggactggcccagcgcaatctgccgctgatccgatgccaagagaacggtcgttgggaggccccccagatctcctgtgtgcccagaagacctgcccgagctctgcacccagaggaggacccagaaggacgtcaggggaggctactgggacgctggaaggcgctgttgatccccccttccagccccatgccaggtccctagggggcaaggccttgaacactgccggccacagcactgccctgtcacccaaattttccctcacaccctgcgctcccgccaccacaggaagtgacaacatgacgaggggtggtactggagtccaggtgacagttcctgaaggggcttctgggaaatacctaggaggctccagcccagcccaggccctctccccctaccctgggcaccagatcttccatcagggccggagtaaatccctaagtgcctcaactgccctctccctggcagccatcttgtcccctctattcctctagggagcactgtgcccactctttctgggttttccaagggaatgggcttgcaggatggagtgtctgtaaaatcaacaggaaataaaactgtgtatgagccca

SEQ ID NO: 230 - DNA, 1771 bp, Homo sapiens
  source 1..1771: mol_type = genomic DNA
ttgccattacccacagaataaagaaaggggccctgttattcaacaataggggaaaagacagagacaatgggaaattgtgcttccgatggggtggggactgagaaggaaaggacagacagacagacagacagggggttgtacagaagaggtccggtttcttgaagcagctggaagtcctggatagttcccacctgaaagtctgtttgcaaaggcaatgcgcactcaggcaccagagggcagaggggctcaagttccagggttttaaggtgcttggaactcccaggagcctggcaaaccttcatccagaacctcttcctcaagcaagacaaaaagctgctaagcactgctccctccgtctctgtgaagagaccagcttctaacagacggtgccgggctgaccccccatcatgccaggctggctcaccctccccacactctgccgcttccttctttgggccttcaccatcttccacaaagcccaaggagacccagcatcccacccgggcccccactacctcctgccccccatccacgaggtcattcactctcatcgtggggccacggccacgctgccctgcgtcctgggcaccacgcctcccagctacaaggtgcgctggagcaaggtggagcctggggagctccgggaaacgctgatcctcatcaccaacggactgcacgcccgggggtatgggcccctgggagggcgcgccaggatgcggagggggcatcgactagacgcctccctggtcatcgcgggcgtgcgcctggaggacgagggccggtaccgctgcgagctcatcaacggcatcgaggacgagagcgtggcgctgaccttgagcttggagggtgtggtgtttccgtaccaacccagccggggccggtaccagttcaattactacgaggcgaagcaggcgtgcgaggagcaggacggacgcctggccacctactcccagctctaccaggcttggaccgagggtctggactggtgtaacgcgggctggctgctcgagggctccgtgcgctaccctgtgctcaccgcacgcgccccgtgcggcggccgaggccggcccgggatccgcagctacggaccccgcgaccggatgcgcgaccgctacgacgccttctgcttcacctccgcgctggcgggccaagtgttcttcgtgcccgggcggctgacgctgtctgaagcccacgcggcgtgccggcgacgcggcgccgtggtggccaaggttgggcacctctacgccgcctggaagttttcggggctagaccagtgcgacggcggctggctggctgacggcagtgtgcgcttcccaatcaccacgccgaggccgcgctgcggggggctcccggatcccggagtgcgcagtttcggcttccccaggccccaacaggcagcctatgggacctactgctacgccgagaattaggcgcccaccgtgtcccctccagcgcgcgcgaagaagcttgggagtcgtggcgggggtctctcgccacccctttccggagagcctcccctccctccagacccggagcggcctctccagacctgccttcccagccgggggctgcgggcctcggaccccggctggcccggcggcggggaggggaggcgggggcgcctccggcggcgagatgcagaggtgaccctcggacccgctgccgttcgcgaaccctagcagaggactcagccaccgccggggggagggtgaggcggccgggggcattaactgacctctgagtacagcaataaaataacctggggatcttt

SEQ ID NO: 231 - DNA, 1270 bp, Homo sapiens
  source 1..1270: mol_type = genomic DNA
agttgctttgctgttagcctgttggaccttcgagcctagctgctcgcacaggactcggccacctgcccttcctgcaccgactggccagctcaagaggtttggatatggaccttcttcaattcctggccttcctctttgtcctgcttttgtctgggatgggagccacaggcaccttgaggacctccctggacccaagcctggagatctacaagaagatgtttgaggtgaagcggcgggagcagctgttggcactgaagaacctggcacagctgaacgacatccaccagcagtacaagatccttgatgtcatgctcaaggggctctttaaggtgctggaggactcccggacagtgctcaccgctgctgatgtgctcccagatgggcccttcccccaggacgagaagctgaaggatgctttctcccacgtggtggagaacacggccttcttcggcgatgtggtgctgcgcttcccgaggattgtgcactattactttgaccacaactccaactggaacctcctcatccgctggggtatcagtttctgcaaccagacaggcgtcttcaaccaggggccccactcgcccatcctcagcctgatggcccaggagctggggatcagtgagaaagactccaacttccagaacccatttaaaatcgaccgcacagagttcattcccagcactgaccctttccagaaggccctgagagaagaagagaaacgccgaaagaaagaggagaagcggaaggagatccgaaaaggcccaaggatctccagatcccagtctgagttatagccctggagcagctcagggctcagggggccacaaggaggcaggtcgggaggaagaagaggtggaggtgtggttgtggtggagagcaccagctagccccttccagaaggggaggccacatttgcccggccccctggagctgggtctgagccccagctgaagggactgagcctcagatggctggattttctctcaggggcctcctgctgaaggggccttcagaggattttatgctggaaatatgaccctgtgcagactgctgggggaggcaggaggatgcctgcctggaccctgttggtggctgaagacctctggccagctggcttccgcccttggtggggaagcagcagaactaggttctgagccacgggtcagggtgccaccctgctgctggccccactgtgtcacagagctgcctggcacaggtcccagcccctctgcagagacacaataaaagccagcagaccctttggaccgac

SEQ ID NO: 232 - DNA, 563 bp, Homo sapiens
  source 1..563: mol_type = genomic DNA
atgagtgtgggcacctccttggagcaggctcagatgtccaccctgacttgtcccctttttatccccacagtgggccgcaagacggccctgcacagcggcgaggacttccagacgctgctcttcgaaagggtctttgtgaaccttgatgggtgctttgacatggcgaccggccagtttgctgctcccctgcgtggcatctacttcttcagcctcaatgtgcacagctggaattacaaggagacgtacgtgcacattatgcataaccagaaagaggctgtcatcctgtacgcgcagcccagcgagcgcagcatcatgcagagccagagtgtgatgctggacctggcctacggggaccgcgtctgggtgcggctcttcaagcgccagcgcgagaacgccatctacagcaacgacttcgacacctacatcaccttcagcggccacctcatcaaggccgaggacgactgagggcctctgggccaccctcccggctggagagctcaggtgctggtcccgtcccctgcagggctcagtttgcactgctgtgaagcaggaaggccagggag

SEQ ID NO: 233 - DNA, 2819 bp, Homo sapiens
  source 1..2819: mol_type = genomic DNA
aacagagaacagaaaccacctcacagcattgttgtgagccttaaatgagcaaatttaagacttaaaactggtcattgacataagccttcaaaaagtgatagctattagtattatgtagctcctagaacagtggctgacatatagtagatgctcataactgttaaaaaggggccaggaggattctatctatttatgcattcatccatttaattatgcttcagaaatgtcttgctctttttatactgtcgatgctgtaaaatacaaaacccataataagccaagtaagcaagcaagagccagcactctgggaggaaaacaaagagattttcttcattgaaatatccatgccacagttcctactaggtgccaggcactgtgataggcactaggatagagaaataagttacaggcctttagggattttaggtgctggtgggagagacaaacatgaaacgcagtgttatgtggattataataaatagagcaacaagctgtggctgcacagttaacccccagtggagtcaggaaaggtctcacagaggaagggacacttgtcttggtcttgaaggagaggtagatgctcccaggtgaagaagagaatgaagggcattccaaggaatgaggatagcatatacagtgcaccaagttgccagcaggcaccgtgtttctggtgagaagcctgggatggaagtctagatcaggagaagtaagcaggaactcgacaggaaagggcatggtctgcccaggcaaagaatttgtgcccttatttggtgggccactggaagcctgaattgaggagcatcatgagcacaggcacatttaccaagaagctaatgaggtttaagcttcgaggcccatcactggcatggccccttccaaaccctgaagagcccaagcaatgtggttgtaaaatttgcaaaataagattaaatcttaactgcaatctgttaacactgctgtctcctttcactctttctcctatatcacactttcccacatgttggatggccttggagtggtagccataagcatttttggaattcaactaaaagtacattggggcactgggggcacgagtgatctgtgacaatatccctggtttggtgagccggcagcggcagctgtgccagcgttacccagacatcatgcgttcagtgggcgagggtgcccgagaatggatccgagagtgtcagcaccaattccgccaccaccgctggaactgtaccaccctggaccgggaccacaccgtctttggccgtgtcatgctcagaagtagccgagaggcagcttttgtatatgccatctcatcagcaggggtagtccacgctattactcgcgcctgtagccagggtgaactgagtgtgtgcagctgtgacccctacacccgtggccgacaccatgaccagcgtggggactttgactggggtggctgcagtgacaacatccactacggtgtccgttttgccaaggccttcgtggatgccaaggagaagaggcttaaggatgcccgggccctcatgaacttacataataaccgctgtggtcgcacggctgtgcggcggtttctgaagctggagtgtaagtgccatggcgtgagtggttcctgtactctgcgcacctgctggcgtgcactctcagatttccgccgcacaggtgattacctgcggcgacgctatgatggggctgtgcaggtgatggccacccaagatggtgccaacttcaccgcagcccgccaaggctatcgccgtgccacccggactgatcttgtctactttgacaactctccagattactgtgtcttggacaaggctgcaggttccctaggcactgcaggccgtgtctgcagcaagacatcaaaaggaacagacggttgtgaaatcatgtgctgtggccgagggtacgacacaactcgagtcacccgtgttacccagtgtgagtgcaaattccactggtgctgtgctgtacggtgcaaggaatgcagaaatactgtggacgtccatacttgcaaagcccccaagaaggcagagtggctggaccaaacctgaacacacagatacctcactcatccctccaattcaagcctctcaactcaaaagcacaagatccttgcatgcacaccttcctccaccctccaccctgggctgctaccgcttctatttaaggatgtagagagtaatccatagggaccatggtgtcctggctggttccttagccctgggaaggagttgtcaggggatataagaaactgagcaagctccctgatttcccgctctggagatttgaagggagagtagaagagatagggggtctttagagtgaaatgagttgcactaaagtacgtagttgaggctccttttttctttcctttgcaccagcttcccgatacttcttggtgtgcaagaggaagggtacctgtagagagcttctttttgtttctacctggccaaagttagatgggacaaagatgaatggcatgtcccttctctgaagtccgtttgagcagaactacctggtaccccgaaagaaaatcttaggctaccacattctattattgagagcctgagatgttagccatagtggacaaggttccattcacatgctcatatgtttataaactgtgttttgtagaagaaaaagaatcataacaatacaaacacacattcattctctctttttctctctaccattctcaacctgtattggacagcactgcctcttttgcttacttgctgcctgttcaaactgaggtggaatgcagtggttcccatgcttaacaaatcattaaaacaccctagaacactcctaggatagattaatgt

SEQ ID NO: 234 - DNA, 2810 bp, Homo sapiens
  source 1..2810: mol_type = genomic DNA
agtacattgaaattcaaagtcatgcttgtaactgttaatgaaagcagatttaaagcaacaccaccatcactggagtatttttagttatatacgattgagactaccaagcatgttgctcttattcagtgtaatcctaatctcatgggtatccactgttgggggagaaggaacactttgtgattttccaaaaatacaccatggatttctgtatgatgaagaagattataaccctttttcccaagttcctacaggggaagttttctattactcctgtgaatataattttgtgtctccttcaaaatccttttggactcgcataacatgcacagaagaaggatggtcaccaacaccgaagtgtctcagaatgtgttcctttccttttgtgaaaaatggtcattctgaatcttcaggactaatacatctggaaggtgatactgtacaaattatttgcaacacaggatacagccttcaaaacaatgagaaaaacatttcgtgtgtagaacggggctggtccactcctcccatatgcagcttcactaaaggagaatgtcatgttccaattttagaagccaatgtagatgctcagccaaaaaaagaaagctacaaagttggagacgtgttgaaattctcctgcagaaaaaatcttataagagttggatcagactcagttcaatgttaccaatttgggtggtcacctaactttccaacatgcaaaggacaagtacgatcatgtggtccacctcctcaactctccaatggtgaagttaaggagataagaaaagaggaatatggacacaatgaagtagtggaatatgattgcaatcctaattttataataaacgggcctaagaaaatacaatgtgtggatggagaatggacaactttacccacttgtgttgaacaagtgaaaacatgtggatacatacctgaactcgagtacggttatgttcagccgtctgtccctccctatcaacatggagtttcagtcgaggtgaattgcagaaatgaatatgcaatgattggaaataacatgattacctgtattaatggaatatggacagagcttcctatgtgtgttgcaacacaccaacttaagaggtgcaaaatagcaggagttaatataaaaacattactcaagctatctgggaaagaatttaatcataattctagaatacgttacagatgttcagacatcttcagatacaggcactcagtctgtataaacgggaaatggaatcctgaagtagactgcacagaaaaaagggaacaattctgcccaccgccacctcagatacctaatgctcagaatatgacaaccacagtgaattatcaggatggagaaaaagtagctgttctctgtaaagaaaactatctacttccagaagcaaaagaaattgtatgtaaagatggacgatggcaatcattaccacgctgtgttgagtctactgcatattgtgggccccctccatctattaacaatggagataccacctcattcccattatcagtatatcctccagggtcaacagtgacgtaccgttgccagtccttctataaactccagggctctgtaactgtaacatgcagaaataaacagtggtcagaaccaccaagatgcctagatccatgtgtggtatctgaagaaaacatgaacaaaaataacatacagttaaaatggagaaacgatggaaaactctatgcaaaaacaggggatgctgttgaattccagtgtaaattcccacataaagcgatgatatcatcaccaccatttcgagcaatctgtcaggaagggaaatttgaatatcctatatgtgaatgaagcaagcataattttcctgaatatattcttcaaacatccatctatgctaaaagtagccattatgtagccaattctgtagttacttcttttattctttcaggtgttgtttaactcagttttatttagaactctggatttttagagctttagaaatttgtaagctgagagaacaatgtttcacttaataggagggtgtcttagtccatattacattgttataacagagtatcacagactggataacttctaaccaatagtttatttgtttcataaatctaaaagctgagaagtccaagatggtggggctgcctctggtgagggtcttctcgaagcatcataatatgctggaaggcatcacaacatggtggaagggatcacgtggcaaaagagcatgtacatgggagtgagagaaaaagagagagagagacagagtggcgggggcggggaggagcgcaaactcatcctttataaagacaccactcctgagataacaatccaatcccatgataatgacattaatccattcaagaagatagagctctcgtgacttaatcaccttctaaagatctcacctgacaacactgttgcattggcagttaagtttccacgtaaactttcggggacacattcaaaccacaggagaaactcaaattgttcctgggcaaatcacaacatggggaattttattcataaatgtccacagaaacagtaaatgttctcgcttcagtacttaattcatctaatccctcctgtttgtctcaaattataggataactttgaaactttctgaattaacgttatttaaaaggaaatgtagatgttattttagtctctatcttcatgttattatcacttaaaaacctgcgaaagctgtcaacttttgtggttgtagcaagtattaataaatatttataaatcctctaatgtaagtctagctacctatccaatactaaataccccttaaagtattaaatgcactatctgctgtaaa

SEQ ID NO: 235 - DNA, 1845 bp, Homo sapiens
  source 1..1845: mol_type = genomic DNA
aatcttgcttgaagactgacaagatgtccctgtggactcccaaactctactccagatggggaggtgcccttaacaccaagattttaaaagctccaatttcagagcaagagtcgaaaactcacagataaagttatagttatttcagggttctgaaaagacgcagaacatgaagggactcagaagtctggcagcaacaaccttggctcttttcctggtgtttgttttcctgggaaactccagctgcgctccgcagagactgttggagagaaggaactggactcctcaagctatgctctacctgaaaggggcacagggtcgccgcttcatctccgaccagagccggagaaaggacctctccgaccggccactgccggaaagacgaagcccaaatccccaactactaactattccggaggcagcaaccatcttactggcgtcccttcagaaatcaccagaagatgaagaaaaaaactttgatcaaaccagattcctggaagacagtctgcttaactggtgaaaatatactggattatgtttaattatggttctattctctttgaaaacatgaaccatgtgaataaaacctttggacccttttattccatttgtaatcttaagaacacacacagatagttttattctttcagaaacaaaatatatataggatgcttagctgagaacatcatcttctttcattgcttcaggtcctgtttagatgaccaaaaatgttttcagatcaccttgtgtcttactcttgagtttcttagaatatttataattataaggctgaagactaaagtgttctttccttttaactatagccagtacctgtcttgatcttagttgtgtttttttttcattttgttacccacttgcattttgttttcactcagcagaaattctccttctctgttttccttttatcccatccccaagaatgtggaaggaaggtgagaaacatggcaggatgggaaataggagagtatgactctctatagctcatccaggagtaatcaattaagaagataaattggatgactgtggagaagctctgtgataggaacacttcagtgtggttgctgagaggagacagtcattgaggtagaaggtttgccaaagatccagagctcagagctccctttgtgctctttgggaattaccttgcattcagtttagaaacatggatctaaaagttactgggaaataagcagatggagacacactctgttgtttacgtattggaagaagggaacaagccagttttgttagaggtaactcattttccatgaccaaacagactcaacagattcaagtactctgcttactctaattgactagactctaggttttatttgacatcatagcattacataaatcactctgataacataagtgcacagtaatatgcctgatctcttcctttttaaaagccaacttgagttcagtaccatctgaatacacacacatgcacatatacccacacacgcatacacacatactcctgtggcaaacataataatgtatttatttagaattataatatgaccatcatgttaattattttttacctaatcagagttgttattgacaaatgtcataagtggaaagtattaattcttattgtcatcagtatttagccattatttagtagctcaagaatatctttatgtgaatgtctctgtaacttggaattgcaatttcactgtgttaagtaatcagaactctgcttataagatttatctgtatcttgtttcataatttaataatgaaactaaattcaagttaatgtaatgttgatctccgtcgaaaaataacttgtgagcattaaaatatctgtatggcatt

SEQ ID NO: 236 - DNA, 1349 bp, Homo sapiens
  source 1..1349: mol_type = genomic DNA
gacggcgcttttgtctccggtgagttttgtggcgggaagcttctgcgctggtgcttagtaaccgactttcctccggactcctgcacgacctgctcctacagccggcgatccactcccggctgttcccccggagggtccagaggcctttcagaaggagaaggcagctctgtttctctgcagaggagtagggtcctttcagccatgaagcatgtgttgaacctctacctgttaggtgtggtactgaccctactctccatcttcgttagagtgatggagtccctagagggcttactagagagcccatcgcctgggacctcctggaccaccagaagccaactagccaacacagagcccaccaagggccttccagaccatccatccagaagcatgtgataagacctccttccatactggccatattttggaacactgacctagacatgtccagatgggagtcccattcctagcagacaagctgagcaccgttgtaaccagagaactattactaggccttgaagaacctgtctaactggatgctcattgcctgggcaaggcctgtttaggccggttgcggtggctcatgcctgtaatcctagcactttgggaggctgaggtgggtggatcacctgaggtcaggagttcgagaccagcctcgccaacatggcgaaaccccatctctactaaaaatacaaaagttagctgggtgtggtggcagaggcctgtaatcccagctccttgggaggctgaggcgggagaattgcttgaacccggggacggaggttgcagtgagccgagatcgcactgctgtacccagcctgggccacagtgcaagactccatctcaaaaaaaaaagaaaagaaaaagcctgtttaatgcacaggtgtgagtggattgcttatggctatgagataggttgatctcgcccttaccccggggtctggtgtatgctgtgctttcctcagcagtatggctctgacatctcttagatgtcccaacttcagctgttgggagatggtgatattttcaaccctacttcctaaacatctgtctggggttcctttagtcttgaatgtcttatgctcaattatttggtgttgagcctctcttccacaagagctcctccatgtttggatagcagttgaagaggttgtgtgggtgggctgttgggagtgaggatggagtgttcagtgcccatttctcattttacattttaaagtcgttcctccaacatagtgtgtattggtctgaagggggtggtgggatgccaaagcctgctcaagttatggacattgtggccaccatgtggcttaaatgattttttctaactaataaagtggaatatatatttc

SEQ ID NO: 237 - DNA, 1083 bp, Homo sapiens
  source 1..1083: mol_type = genomic DNA
gtcctgcgagcgacgcgcggcggggcggcgagaggaaacgcggcgccgggccgggcccggccctggagatggtccccggcgccgcgggctggtgttgtctcgtgctctggctccccgcgtgcgtcgcggcccacggcttccgtatccatgattatttgtactttcaagtgctgagtcctggggacattcgatacatcttcacagccacacctgccaaggactttggtggtatctttcacacaaggtatgagcagattcaccttgtccccgctgaacctccagaggcctgcggggaactcagcaacggtttcttcatccaggaccagattgctctggtggagagggggggctgctccttcctctccaagactcgggtggtccaggagcacggcgggcgggcggtgatcatctctgacaacgcagttgacaatgacagcttctacgtggagatgatccaggacagtacccagcgcacagctgacatccccgccctcttcctgctcggccgagacggctacatgatccgccgctctctggaacagcatgggctgccatgggccatcatttccatcccagtcaatgtcaccagcatccccacctttgagctgctgcaaccgccctggaccttctggtagaagagtttgtcccacattccagccataagtgactctgagctgggaaggggaaacccaggaattttgctacttggaatttggagatagcatctggggacaagtggagccaggtagaggaaaagggtttgggcgttgctaggctgaaagggaagccacaccactggccttcccttccccagggcccccaagggtgtctcatgctacaagaagaggcaagagacaggccccagggcttctggctagaacccgaaacaaaaggagctgaaggcaggtggcctgagagccatctgtgacctgtcacactcacctggctccagcctcccctacccagggtctctgcacagtgaccttcacagcagttgttggagtggtttaaagagctggtgtttggggactcaataaaccctcactgactttttagcaataaagcttctcatcagggttgcaa

SEQ ID NO: 238 - DNA, 2962 bp, Homo sapiens
  source 1..2962: mol_type = genomic DNA
cgggatgcttggcgctctacctcgccgcccctgagccttcccgtccgcctcgccacgcgcccggacggcctggggttgctgcccgtcagtctcgaaaggtgtttttggggaaaaaaatcacaatctggacgtgagaaaggacatgaggagactaaagacctgggattttgtcaatcagaatgaaaccaatgttgaaagacttttcaaatctattgttggtggtactctgtgactatgttcttggagaagctgaatatcttctcttgagagagccaggccatgtagcactaagcaacgacacagtgtatgtggatttccagtattttgatggtgctaatgggacactgaggaatgtatctgtcctgctgttggaggccaacaccaatcagactgtaactaccaagtacctcctgaccaaccagtcccagggaacactaaagtttgagtgcttctatttcaaggaggctggtgactactggttcacaatgactccagaagcaacagacaacagcactccattcccctggtgggagaaaagtgcctttctgaaggtggaatggcctgtctttcacgttgacttgaataggagtgccaaggcagcagaaggcaccttccaagtgggcctatttaccagtcaaccactgtgcccgtttcctgtggacaagcccaacatcgtagtggatgtcatcttcaccaacagtcttcctgaggcaagaagaaattcaagacagccgctggaaataagaaccagcaaaaggacagaacttgctcaaggtcagtgggttgagtttggctgtgcacccttggggccagaagcctatgtcaccgtggtgctgaagctgcttgggcgagactcagtcattacctccacaggacccattgacctggcccagaaatttggatacaaactggtgatggtgccagaactcacatgtgagtccggggtagaggtgacagtgctgcctccaccatgcaccttcgtccaaggagtggtcactgtcttcaaggaggcccccagataccctgggaagaggaccattcacttggctgaaaacagcctgcccctgggagagaggaggacaatttttaactgtactttgtttgacatggggaagaataagtactgctttgactttggcatttcaagcagaagccatttttctgcaaaggaggagtgcatgctaattcagagaaatacagaaacttggggactgtggcagccatggagccagtgtagtgccacatgtggggatggtgtcagagagcgtcgccgagtgtgtctcacttccttcccctccagtcctgtctgccctggaatgtccttggaggcctccctgtgttccctggaggagtgtgctgctttccagccatccagcccatctcctcttcagccccagggtccagtgaagtccaacaacatcgtgactgtcactggtatatccttgtgcttgttcatcatcattgccactgtgctcatcacgctgtggaggaggttcggccggccagccaagtgcagcacacctgctcgacacaactccatccactcccccagcttccggaagaactcggacgaggagaatatctgcgagctgagcgagcagcgcgggagcttctcggatgggggagacgggcccacggggagtccaggggacacaggcatccctctgacctacaggcggagcgggccggtacctcccgaggatgatgcctctggcagcgagagcttccagtccaacgcccagaagataatcccacctctgttcagctaccgccttgcccagcagcagttaaaggagatgaaaaagaaaggtctgacggaaactaccaaagtgtatcacgtgtctcagagtcccctgacagacactgccattgatgcggcccccagcgctcccttagatttggaaagcccggaagaagctgcagcaaacaagttccggatcaaatccccatttccggagcagcccgcggtcagtgccggggaaaggcctccctccaggctggatctaaatgtgactcaggccagttgtgccataagccccagccagactctgatccgcaagtcacaggcaaggcacgtgggcagcagagggggcccgtccgaaaggagccatgccaggaacgcccatttcaggaggacagcgagtttccatgaagccaggcaggcccggccgttccgagagaggagcatgtccactctgactccacggcaggcccctgcctacagctctaggacgcggacctgcgagcaggcagaggacagatttaggcctcagagtcgaggtgcccacctgtttcctgaaaaactggagcatttccaagaggcaagtggaacccgtggtccattaaaccctctccctaaatcctacactttggggcagcccttgaggaaaccagaccttggggatcaccaggcaggattagtggccggaattgagagaacagagccccacagagctcgtcggggaccgtcccccagtcacaagagtgtctcaaggaagcagtcttctcccatatcccccaaagataactaccagagggtcagttctctgagcccttctcagtgtagaaaagacaagtgtcaaagcttccccactcaccctgagtttgccttctatgacaatacgtcgtttggcctcactgaggctgagcagaggatgctggacctcccaggatattttgggtcaaatgaagaggatgaaaccacaagtacacttagcgtggagaagctggtgatctagactgagaatcagcctgagctttacacagctggggtctgctactcgcgttttgtagacttttgtgtaactatttgtaccgtaggacagaatgtgaggaggaagtaacacacagaggaggatgtgtgtgtatgcatgtgtttgaattcacaaggaagaaattatttatcttgagctttttcctttgttattcaatttctattgatttattagtaataacaatgata

SEQ ID NO: 239 - DNA, 647 bp, Homo sapiens
  source 1..647: mol_type = genomic DNA
attcttgtgatagtgaagaagtctcacaagatctgatcatttataatgggtttccacttttgcatctggatcatttttctcttgccaccaccatgtaagaagtgcctttcacctcccaccatgaacctgaggcctcccaagtcatgtggaaatgtcttttattgggtgctggttcttaactctggacttctctacaagttttgtcaaactatcaaatgcagagcaaattggaggcctgccagagcacccagagggtggaatgaagcaacagagaggcatcaggaaaggagaacacagatggagacagagatgggaggcataagcaccacctactggcacaggctgtgcacttgcacggataggagagctgaaaagttggtcatggatggaaataactgctggtttcacaaatgaggaggcagaaaattccacttaatttcactattacaatgctcagcagaaaaaaaaaaacaaaacaacttggattactgagctacagaacacccagactcatagcactgggacttccaggtcttaccttacgagtgggtcacaacactgacaaaggggacaatatccattagccattatcttgctgcgtatgaataaccctctctcacaaaaataaagataaatatgttctgaaa

SEQ ID NO: 240 - DNA, 1140 bp, Homo sapiens
  source 1..1140: mol_type = genomic DNA
caggatgcagggccgcgtggcagggagctgcgctcctctgggcctgctcctggtctgtcttcatctcccaggcctctttgcccggagcatcggtgttgtggaggagaaagtttcccaaaacttggggaccaacttgcctcagctcggacaaccttcctccactggcccctctaactctgaacatccgcagcccgctctggaccctaggtctaatgacttggcaagggttcctctgaagctcagcgtgcctgcatcagatggcttcccacctgcaggaggttctgcagtgcagaggtggcctccatcgtgggggctgcctgccatggattcctggccccctgaggatccttggcagatgatggctgctgcggctgaggaccgcctgggggaagcgctgcctgaagaactctcttacctctccagtgctgcggccctcgctccgggcagtggccctttgcctggggagtcttctcccgatgccacaggcctctcacccaaggcttcactcctccaccaggactcggagtccagacgactgccccgttctaattcactgggagccgggggaaaaatcctttcccaacgccctccctggtctctcatccacagggttctgcctgatcacccctggggtaccctgaatcccagtgtgtcctggggaggtggaggccctgggactggttggggaacgaggcccatgccacaccctgagggaatctggggtatcaataatcaacccccaggtaccagctggggaaatattaatcggtatccaggaggcagctggggaaatattaatcggtatccaggaggcagctgggggaatattaatcggtatccaggaggcagctgggggaatattcatctatacccaggtatcaataacccatttcctcctggagtcctccgccctcctggctcttcttggaacatcccagctggcttccctaatcctccaagccctaggttgcagtggggctagagcacgatagagggaaacccaacattgggagttagagtcctgctcccgccccttgctgtgtgggctcaatccaggccctgtcagcatgtttccagcactatccccacttttcagtgcctcccctgctcatctccaataaaataaaagcacttatggaa

SEQ ID NO: 241 - DNA, 3845 bp, Homo sapiens
  source 1..3845: mol_type = genomic DNA
gatcccagaagtaggaggggcgtcttcccctcgtgggccctgagcgggactgcagccagccccctggggagccagctttggaggcccccgacagctgctctcgggagccgcctcccgacacccgagccccgccggcgcctcccgctcccggctcccggctcctggctccctccgcctcccccgcccctcgccccgccgccgaagaggccccgctcccgggtcggacgcctgggtctgccgggaagagcgatgagaggtgtctgaaggtggctattcactgagcgatggggttggacttgaaggaatgccaagagatgctgcccccacccccttaggcccgagggatcaggagctatgggaccagaggccctgtcatctttactgctgctgctcttggtggcaagtggagatgctgacatgaagggacattttgatcctgccaagtgccgctatgccctgggcatgcaggaccggaccatcccagacagtgacatctctgcttccagctcctggtcagattccactgccgcccgccacagcaggttggagagcagtgacggggatggggcctggtgccccgcagggtcggtgtttcccaaggaggaggagtacttgcaggtggatctacaacgactgcacctggtggctctggtgggcacccagggacggcatgccgggggcctgggcaaggagttctcccggagctaccggctgcgttactcccgggatggtcgccgctggatgggctggaaggaccgctggggtcaggaggtgatctcaggcaatgaggaccctgagggagtggtgctgaaggaccttgggccccccatggttgcccgactggttcgcttctacccccgggctgaccgggtcatgagcgtctgtctgcgggtagagctctatggctgcctctggagggatggactcctgtcttacaccgcccctgtggggcagacaatgtatttatctgaggccgtgtacctcaacgactccacctatgacggacataccgtgggcggactgcagtatgggggtctgggccagctggcagatggtgtggtggggctggatgactttaggaagagtcaggagctgcgggtctggccaggctatgactatgtgggatggagcaaccacagcttctccagtggctatgtggagatggagtttgagtttgaccggctgagggccttccaggctatgcaggtccactgtaacaacatgcacacgctgggagcccgtctgcctggcggggtggaatgtcgcttccggcgtggccctgccatggcctgggagggggagcccatgcgccacaacctagggggcaacctgggggaccccagagcccgggctgtctcagtgccccttggcggccgtgtggctcgctttctgcagtgccgcttcctctttgcggggccctggttactcttcagcgaaatctccttcatctctgatgtggtgaacaattcctctccggcactgggaggcaccttcccgccagccccctggtggccgcctggcccacctcccaccaacttcagcagcttggagctggagcccagaggccagcagcccgtggccaaggccgaggggagcccgaccgccatcctcatcggctgcctggtggccatcatcctgctcctgctgctcatcattgccctcatgctctggcggctgcactggcgcaggctcctcagcaaggctgaacggagggtgttggaagaggagctgacggttcacctctctgtccctggggacactatcctcatcaacaaccgcccaggtcctagagagccacccccgtaccaggagccccggcctcgtgggaatccgccccactctgctccctgtgtccccaatggctctgcctacagtggggactatatggagcctgagaagccaggcgccccgcttctgcccccacctccccagaacagcgtcccccattatgccgaggctgacattgttaccctgcagggcgtcaccgggggcaacacctatgctgtgcctgcactgcccccaggggcagtcggggatgggccccccagagtggatttccctcgatctcgactccgcttcaaggagaagcttggcgagggccagtttggggaggtgcacctgtgtgaggtcgacagccctcaagatctggtcagtcttgatttcccccttaatgtgcgtaagggacaccctttgctggtagctgtcaagatcttacggccagatgccaccaagaatgccaggaatgatttcctgaaagaggtgaagatcatgtcgaggctcaaggacccaaacatcattcggctgctgggcgtgtgtgtgcaggacgaccccctctgcatgattactgactacatggagaacggcgacctcaaccagttcctcagtgcccaccagctggaggacaaggcagccgagggggcccctggggacgggcaggctgcgcaggggcccaccatcagctacccaatgctgctgcatgtggcagcccagatcgcctccggcatgcgctatctggccacactcaactttgtacatcgggacctggccacgcggaactgcctagttggggaaaatttcaccatcaaaatcgcagactttggcatgagccggaacctctatgctggggactattaccgtgtgcagggccgggcagtgctgcccatccgctggatggcctgggagtgcatcctcatggggaagttcacgactgcgagtgacgtgtgggcctttggtgtgaccctgtgggaggtgctgatgctctgtagggcccagccctttgggcagctcaccgacgagcaggtcatcgagaacgcgggggagttcttccgggaccagggccggcaggtgtacctgtcccggccgcctgcctgcccgcagggcctatatgagctgatgcttcggtgctggagccgggagtctgagcagcgaccacccttttcccagctgcatcggttcctggcagaggatgcactcaacacggtgtgaatcacacatccagctgcccctccctcagggagcgatccaggggaagccagtgacactaaaacaagaggacacaatggcacctctgcccttcccctcccgacagcccatcacctctaatagaggcagtgagactgcaggtgggctgggcccacccagggagctgatgccccttctccccttcctggacacactctcatgtccccttcctgttcttccttcctagaagcccctgtcgcccacccagctggtcctgtggatgggatcctctccaccctcctctagccatcccttggggaagggtggggagaaatataggatagacactggacatggcccattggagcacctgggccccactggacaacactgattcctggagaggtggctgcgcccccagcttctctctccctgtcacacactggaccccactggctgagaatctgggggtgaggaagacaagaaggagaggaaaatgtttccttgtgcctgctcctgtacttgtcctcagcttgggcttcttcctcctccatcacctgaaacactggacctgggggtagccccgccccagccctcagtcacccccacttcccacttgcagtcttgtagctagaacttctctaagcctatacgtttctgtggagtaaatattgggattggggggaaagagggagcaacggcccatagccttggggttggacatctctagtgtagctgccacattgatttttctataatcacttggggtttgtacatttttggggggagagacacagatttttacactaatatatggacctagcttgaggcaattttaatcccctgcactaggcaggtaataataaaggttgagttttccacaa

SEQ ID NO: 242 - DNA, 1168 bp, Homo sapiens
  source 1..1168: mol_type = genomic DNA
cttgcagagaaagagtcttttgtgcagcaccctttaaagggtgactcgtcccacttgtgttctctctcctggtgcagagttgcaagcaagtttatcggagtatcgccatgaagttcgtcccctgcctcctgctggtgaccttgtcctgcctggggactttgggtcaggccccgaggcaaaagcaaggaagcactggggaggaattccatttccagactggagggagagattcctgcactatgcgtcccagcagcttggggcaaggtgctggagaagtctggcttcgtgtcgactgccgcaacacagaccagacctactggtgtgagtacagggggcagcccagcatgtgccaggctttcgctgctgaccccaaaccttactggaatcaagccctgcaggagctgaggcgccttcaccatgcgtgccagggggccccggtgcttaggccatccgtgtgcagggaggctggaccccaggcccatatgcagcaggtgacttccagcctcaagggcagcccagagcccaaccagcagcctgaggctgggacgccatctctgaggcccaaggccacagtgaaactcacagaagcaacacagctgggaaaggactcgatggaagagctgggaaaagccaaacccaccacccgacccacagccaaacctacccagcctggacccaggcccggagggaatgaggaagcaaagaagaaggcctgggaacattgttggaaacccttccaggccctgtgcgcctttctcatcagcttcttccgagggtgacaggtgaaagacccctacagatctgacctctccctgacagacaaccatctctttttatattatgccgctttcaatccaacgttctcacactggaagaagagagtttctaatcagatgcaacggcccaaattcttgatctgcagcttctctgaagtttggaaaagaaaccttcctttctggagtttgcagagttcagcaatatgatagggaacaggtgctgatgggcccaagagtgacaagcatacacaactacttattatctgtagaagttttgctttgttgatctgagccttctatgaaagtttaaatatgtaacgcattcatgaatttccagtgttcagtaaatagcagctatgtgtgtgcaaaataaaagaatgatttcagaaata

SEQ ID NO: 243 - DNA, 1354 bp, Homo sapiens
  source 1..1354: mol_type = genomic DNA
aagcagctctggtgctgaagagagcactgcctccctgtgtgactggagaagaggacgttgtcacagataaagagccaggctcaccagctcctgacgcatgcatcatgaccatgagacacaactggacaccagacctcagccctttgtgggtcctgctcctgtgtgcccacgtcgtcactctcctggtcagagccacacctgtctcgcagaccaccacagctgccactgcctcagttagaagcacaaaggacccctgcccctcccagcccccagtgttcccagcagctaagcagtgtccagcattggaagtgacctggccagaggtggaagtgccactgaatggaacgctgagcttatcctgtgtggcctgcagccgcttccccaacttcagcatcctctactggctgggcaatggttccttcattgagcacctcccaggccgactgtgggaggggagcaccagccgggaacgtgggagcacaggtacgcagctgtgcaaggccttggtgctggagcagctgacccctgccctgcacagcaccaacttctcctgtgtgctcgtggaccctgaacaggttgtccagcgtcacgtcgtcctggcccagctctgggctgggctgagggcaaccttgccccccacccaagaagccctgccctccagccacagcagtccacagcagcagggttaagactcagcacagggccagcagcagcacaaccttgaccagagcttgggtcctacctgtctacctggagtgaacagtccctgactgcctgtaggctgcgtggatgcgcaacacaccccctccttctctgctttgggtcccttctctcaccaaattcaaactccattcccacctacctagaaaatcacagcctccttataatgcctcctcctcctgccattctctctccacctatccattagccttcctaacgtcctactcctcacactgctctactgctcagaaaccaccaagactgttgatgccttagccttgcactccagggccctacctgcatttcccacatgactttctggaagcctcccaactattcttgcttttcccagacagctcccactcccatgtctctgctcatttagtcccgtcttcctcaccgccccagcaggggaacgctcaagcctggttgaaatgctgcctcttcagtgaagtcatcctctttcagctctggccgcattctgcagacttcctatcttcgtgctgtatgttttttttttcccccttcactctaatggactgttccagggaagggatgggggcagcagctgcttcggatccacactgtatctgtgtcatccccacatgggtcctcataaaggattattcaatgg

SEQ ID NO: 244 - DNA, 6732 bp, Homo sapiens
  source 1..6732: mol_type = genomic DNA
agcattcaaaccttgcagagctttgctctcagagagtttgtaaaaagacacactcctcttacaagagttcatgctaccacatagcaaagaaccttaaatttttggaagaacaatatattcattttggcattgtgcagagcaaagtaaactcggtggcctcttcttctccacccctcaaaatgatagcaatctctgccgtcagcagtgcactcctgttctcccttctctgtgaagcaagtaccgtcgtcctactcaattccactgactcatccccgccaaccaataatttcactgatattgaagcagctctgaaagcacaattagattcagcggatatccccaaagccaggcggaagcgctacatttcgcagaatgacatgatcgccattcttgattatcataatcaagttcggggcaaagtgttcccaccggcagcaaatatggaatatatggtttgggatgaaaatcttgcaaaatcggcagaggcttgggcggctacttgcatttgggaccatggaccttcttacttactgagatttttgggccaaaatctatctgtacgcactggaagatatcgctctattctccagttggtcaagccatggtatgatgaagtgaaagattatgcttttccatatccccaggattgcaaccccagatgtcctatgagatgttttggtcccatgtgcacacattatacgcagatggtttgggccacttccaatcggataggatgcgcaattcatacttgccaaaacatgaatgtttggggatctgtgtggcgacgtgcagtttacttggtatgcaactatgccccaaagggcaattggattggagaagcaccatataaagtaggggtaccatgttcatcttgtcctccaagttatgggggatcttgtactgacaatctgtgttttccaggagttacgtcaaactacctgtactggtttaaataagtttaccttttcctccaggaaatataatgatttctgggaacatgggcatgtatatatatatatggagagagaattttgcacatattatacatattttgtgctaatcttgttttcctcttagtattcctttgtataaattagtgtttgtctagcatgtttgtttaatcctttgaaatatttgaaacatcaatttctattttctgacctctaagcctaaattaagatattgtatatgtaatgatgacatagttgatgcatccaatcctaaaacttacattccaaaggaattatatcattatgttcctaaggagtaaatatatatttgacctgtaagtgtgtgtatgtatacatatacatatgtatgtgtatggatttatatatgcacacaaacatataatatgtgatgtaacatgtagatgataatatgattcagtagtcaacttgagggaaatttttaaaaaactattctcaattatatacgaggtgatgggacttcttaacacacatttctataatacccatgaaatgataatttgtaaaataacacttagtgatatctggaaataataattcaattaagcaaccacgaatttcaccctggagatattttttcttatttgagtccaccaaaggataatgccaacttatataagttctcaaatcatgccttccgcttagtctcattttattcattcagtcgtcatgagttgagtgcttactacatgcaaggcactctgctagttatattctaataatgcagagataattagacatggttcccgccctcaagaagctcacaaaagtattcaggaaataatgcagactagtgattttgctataaaattatttttgaaggaagcagacacagcagtatttacctgtaggtggagcaagtaataagccatgctgtgcaatatatacataaagcttctgcttctcatgggaatttagttacagtgcttggaatgagaaggggaaggaaagaattaacaaatgccaagatttctggagcagattgtacagctgtgactttggaaaacagaaagtaagaccctcagaaaaccaatgaagtctaagagaaataaaatttagtggacaggtatgaaaagtgtaattgcgcctaactaccagatggagagcttcagaatgggctatccttagagtctagtacatcttgaggcctctcagcaggagacaaaggattccaaaaagagatgtggaggtgctgagggcacctctatctctttgttgtttagtctgtcattgaatcaatctacttatcatcttgggtctttgagtattgtatgaaagatccttcgtgcacaccacacacagtcatgattttgttaaagtagccttcttcagatgcttttctaagggctagttaccaactttatttctgtgtttctgtagaagaaacattttcagttcttcattgagtttgattatggaaatccattcaaagtcactatgaaaattttactcatgtagtttggaaatgcaacattttcctatcatgaaatctctttcagagaggagaatacaacatcttagtccagacatttaacatactgcatttcaagtacatgtgtgtgtgttttattcaggttgtgtaatgctcccgtagaattatagaacaattaaatatggttagttccagagtgcaaattacagaaggaagctacttgtttaaaattccatacacgtttgcagtttcttgtacacatttggatactttgaaagatgacagattgttaaatccattcaatggtaaagaaactcaccatctggagattgagtctacttgttaatgaatgactagcccaattatccttataaattgaatatggtgaccaaatgctttgatatcatactactctgcctttgtgggcacatatgtagacactactaaaaataaatatttttggagattaaaatggagaatagaagtaattacattatttaggtcttaatccaacttttttctaatatatctaaacaattgaaagggaagcttattcatggaatattggcttgatttatctagaaagtttttccttcttcaattttactatattcattctacaggaacagcaataagtactattaaacagaagatggctacactaagttccaattttgttgctgaattgcttctgtgagttcacttttcagttctaaggaagaataatatttgctacatatttcacaggggttcttatgaaggtaaatttaccagattaataaaaatttatgaatattaaaattatcattaataatataaaacacttatttgagattaaattaaatttttcatgagcccctctttggcaggaactctgtttaattctttgtatttatcccagcttcttaaatggtggctgtaacataataaatgtttaataaatgcttatatgaatggatttttagaattaactaagaagccaaaaatggcaacaatttacagaaatcccacctttccatgcttaagacaaaaatgtcttaaatataaagctgtgattatatcaaaaatccagataaatcatcaaatatatcagattaagaccagggtttacacacttaggcaatagtcctttccaaaccatgacaaaaactacaagtttatttataatttaacaactcagctgaaaatataacgggtatatttgttattctaactctattttttaaagttaataatataaagtggccatgtaaaatattttattttccaggctaaagcaaatgaaagtttgctggtatcaacacagcctgccatatttttcacagcatgcaacaatggtgctaggatagctatttcttactgtaattgccagaggcagaaatggtctgggtataagctatttcataaaagcagctttaaattgtcagtattaaggttttcatgtggaaaggtgtcattcaaaaaaaaagtaattggcatacatattccacatcatcgatcctctctgtggtgttaatttttttatatgaccagtagaaaaattttaatattctcacaatataggttttggggcttccatatcatcaaaagactgaaaaattataattttagaattaaactgatggatttcattatagaattatctgtgagttgtgtagacacagtcttaatgtttctggttatgacagataagtttgctcaaaaaatgtggatgaagccattattgttattattgttattgcttctgttcagttgtctaagtatcatcccttctgtggcccatcacgcagcagagttgccctacaaatttcatttggcagcgccataacattcatttaaaaagtttatgaaaacattcatttgaaagttccatgcagctttagcacagagttgaccaaacactggcgtaagttcaatttacacagaatatttgaattgaaacaatagaaatttttctcataatatatacctatgtgaaaccaacttatctgcataattaaatctaatacatatttaagccagtttaagtgctttgtgttgatgccatgcttatcaaatacatgcacaagctaaacataatttgaatgggtctatgaaggaaaaataatgcttagactttggtgtaggttcttcctgtgtagccatatacccaggctctgcagtatcgaaggatgcaaatgttgacatagatggaagctcttacctaccaaagtgtttaggaaggataaagttacatttgtcttaatttctaacattatctttgcttttatgtttcataaaaatttgtcattatttatgctggtgaaacgtataatcacatccaattatttgaacacatgcaaaataattttttaaattatgttattgtttaaatttgacttatgggagatcagtcaaaaacttagaaggtttaacacttcactgattaatggtgctgaaaacacgttacaattaccacatatccttgctataagttttgaagtttcttagcaattaaagtttttttattcagtgtgaactgtcagtatctattctggtgctaaatgtatggtgctaaatgaattgttagtgttgatggctttagtaatgctccttttattcattgctaaatttagtgttatccatttgattcctgattcagaaatatcaataaaatcctatgttaaattaatctttaccaaaaacaggcaagttaactctgttgttttaattcaacagtccaacattatttaggtgttacagagtgtaaatatatttctttgggagttattttctttttaaaatctttttatagcttggcaatgtccaaagtcaaatatcacctaaactggttagattacttctacagctaataatattgcaggcactggcgccctctggtggttatgaagacaaattcttaatggctacttgacctacagcaaaagccatttctgtaccataaaaatttgttgtgcaatattagaattatcatatgtttcctacatctgacagcacctaaaatgtttgataatattaacatgtatctaagaggaaaaaagagttaatatattctggcacccactttcctagtaatgttttccatgattttccagttctgaggcacttattaaagtgcttttttttttctgaattaattaggtattggtaaaatatatttttaaatttagttagctttataaacacaattagaattacaattaattaacagaggtataattgtctcactttcagaagtgatcatttatttttatttagcacaggtcataagaaaaatatatagaaaaataatcaatttcatatataaaaggattatttctccacctttaattattggcctatcatttgttagtgttatttggtcatattattgaactaatgtattattccattcaaagtctttctagatttaaaaatgtatgcaaaagcttaggattatatcatgtgtaactattatagataacatcctaaaccttcagtttagatatataattgactgggtgtaatctcttttgtaatctgttttgacagatttcttaaattatgttagcataatcaaggaagatttaccttgaagcactttccaaattgatactttcaaacttattttaaagcagtagaaccttttctatgaactaaatcacatgcaaaactccaacctgtagtatacataaaatggacttacttattcctctcaccttctccagtgcctaggaatattcttctctgagccctaggattgattctatcacacagagcaacattaatctaaatggtttagctccctcttttttctctaaaaacaatcagctaataaaaaaaaaatttgagggcctaaattatttcaatggttgtttgaaatattcagttcagtttgtacctgttagcagtctttcagtttgggggagaattaaatactgtgctaagctggtgcttggatacatattacagcatcttgtgttttatttgacaaacagaattttggtgccataatattttgagaattagagaagattgtgatgcatatatataaacactatttttaaaaaatatctaaatatgtctcacatatttatataatcctcaaatatactgtaccattttagatattttttaaacagattaatttggagaagttttattcattacctaattctgtggcaaaaatggtgcctctgatgttgtgatatagtattgtcagtgtgtacatatataaaacctgtgtaaacctctgtccttatgaaccataacaaatgtagctttttaaagtccattgtattgttttttctttcaataaaagagtataattaa

SEQ ID NO: 245 - DNA, 1199 bp, Homo sapiens
  source 1..1199: mol_type = genomic DNA
cacacgcgcacactcacacgggcgcgcgcagcccctccggccgcgggcgcagcgggggcgctggtggagctgcgaagggccaggtccggcgggcggggcggcggctggcactggctccggactctgcccggccagggcggcggctccagccgggagggcgacgtggagcggccacgtggagcggcccgggggaggctggcggcgggaggcgaggcgcgggcggcgcagcagccaggagcgcccacggagctggacccccagagccgcgcggcgccgcagcagttccaggaaggatgttacctttgacgatgacagtgttaatcctgctgctgctccccacgggtcaggctgccccaaaggatggagtcacaaggccagactctgaagtgcagcatcagctcctgcccaaccccttccagccaggccaggagcagctcggacttctgcagagctacctaaagggactaggaaggacagaagtgcaactggagcatctgagccgggagcaggttctcctctacctctttgccctccatgactatgaccagagtggacagctggatggcctggagctgctgtccatgttgacagctgctctggcccctggagctgccaactctcctaccaccaacccggtgatcttgatagtggacaaagtgctcgagacccaggacctgaatggggatgggctcatgacccctgctgagctcatcaacttcccgggagtagccctcaggcacgtggagcccggagagccccttgctccatctcctcaggagccacaagctgttggaaggcagtccctattagctaaaagcccattaagacaagaaacacaggaagcccctggtcccagagaagaagcaaagggccaggtagaggccagaagggagtctttggatcctgtccaggagcctgggggccaggcagaggctgatggagatgttccagggcccagaggggaagctgagggccaggcagaggctaaaggagatgcccctgggcccagaggggaagctgggggccaggcagaggctgaaggagatgcccccgggcccagaggggaagctgggggccaggcagaggccagggagaatggagaggaggccaaggaacttccaggggaaacactggagtctaagaacacccaaaatgactttgaggtgcacattgttcaagtggagaatgatgagatctag

SEQ ID NO: 246 - DNA, 1539 bp, Homo sapiens
  source 1..1539: mol_type = genomic DNA
acagccattggtcaggggcaaataccactagctctgcatcctcagtcactttgtgccatttcatcaggtcagagccaaaggaaagcttgaaaaatgaagacattagcaggacttgttctgggacttgtcatctttgatgctgctgtgactgccccaactctagagtccatcaactatgactcagaaacctatgatgccaccttagaagacctggataatttgtacaactatgaaaacatacctgttgataaagttgagattgaaatagccacagtgatgccttcagggaacagagagctcctcactccacccccacagcctgagaaggcccaggaagaggaagaggaggaggaatctactcccaggctgattgatggctcttctccccaggagcctgaattcacaggggttctggggccacacacaaatgaagactttccaacctgtcttttgtgtacttgtataagtaccaccgtgtactgtgatgaccatgaacttgatgctattcctccgctgccaaagaacaccgcttatttctattcccgctttaacagaattaaaaagatcaacaaaaatgactttgcaagcctaagtgatttaaaaaggattgatctgacatcaaatttaatatctgagattgatgaagatgcattccgaaaactgcctcaacttcgagagcttgtcctgcgtgacaacaaaataaggcagctcccagaattgccaaccactttgacatttattgatattagcaacaatagacttggaaggaaagggataaagcaagaagcatttaaagacatgtatgatctccatcatctgtacctcactgataacaacttggaccacatccctctgccactcccagaaaatctacgagcccttcacctccagaataacaacattctggaaatgcacgaagatacgttctgcaatgttaaaaatttgacttatattcgtaaggcactagaggacattcgattggatggaaaccctattaatctcagcaaaactcctcaagcatacatgtgtctacctcgtctgcctgttgggagccttgtctaatttcagataatggttagcattacgatggctactataaataaaccattcttactgctctcttccaaaacaaaactcagcatgatactttgagattgtgttctgagagatgatatgactacataaaatacaattaaaaatgttataatgaaaatgtagtaatttaagaaaacaccagatgagttaggaataaacctataacatttacaaaaagagcaaaactaagtgatagaaaatatttcacacatgttcttatagatcatgtatcacttgcaagttttaggagttcatatcctatatcatttcaaattaagtacataataaagtaaaattttgaaatgaacactttaggtatttttgccaagatttagatgtttttaattaaacttttctcttcctttttttttcactaaagcatgtttattcccctaatccattaaagagcatgaaaaaaagaataaatgtatttgaaaattataa

SEQ ID NO: 247 - DNA, 2801 bp, Homo sapiens
  source 1..2801: mol_type = genomic DNA
gggctgcgcccaaggctgccgggagcagactgggctgcgggcggcggggccggcgcctgcctggagggatggggctgccgggcgcgtaggggccatgccgcccgggacccgggcctgccgcgttccgcgccccggccgccgcgccccacgtccgcgccgggatggtgaacctggcggccatggtgtggcgccggcttctgcggaagaggtgggtgctcgccctggtcttcgggctgtcgctcgtctacttcctcagcagcaccttcaagcaggaggagagggcagtgagagataggaatctcctccaggttcatgaccataatcagcccatcccgtggaaagtgcagtttaacttgggcaatagcagtcgtccgagcaatcagtgccgcaactccattcaagggaagcacctcatcacggatgaactcggctacgtttgcgagaggaaggatttgctggtaaatggctgctgtaatgtcaacgtccctagcacgaagcagtactgctgtgatggctgctggcccaacggctgctgcagcgcctatgagtactgtgtctcctgctgcctgcagcccaacaagcaacttctcctggagcgcttcctcaaccgggcagccgtggcattccagaacctcttcatggcagtcgaagatcactttgagttgtgcctggccaaatgcaggacctcatctcagagcgtgcagcatgagaacacctaccgggaccccatagcaaagtattgctatggagaaagcccgcccgagctcttccccgcttgacgggtgcagcggacttgctccagcctgggtgaggaggccccgctgaagaactcgcctcctgggacccagcttcagccatcgggccaggctgcaggaagaagacaaaggcagcgtgaggaaaccttggctttgaccccttctcgtgttgtcatctttggcttcgctcaccacccgggcttaccagatggaactcttctgtaaagcagcttggcccctccagccagtcccattcgggaaagatgaaaccggaggccgggctcacggtggtggtggagttcttggatgactcagccctgggacctgcacagggacctgtgacttgtgttcatcgggggccggtgtcacttccagttttgatccaggctctttcactgtaaaattatttattggattcctttggagtaatgggaacattctaatgttttatgtaggaaaatgccttgccattctagttgaatatgttcaaggaaattatttttgttgttgttctgtgttctcgagtttcaggagttaaatcattcttccacccagatacaacattttctcttttaggacgtgaatattctctctaggcagttatttttgtttgtatttcgacagtatcaagcataggccctgaacgtgacctgttagccatatcctgacgtgtaaaattatctaaaaactcagacactcttccattctaatctaactgcacgatttctaacagtgggcaccatgtgcctgccctcaggttattttccagtggtagtcgaatgtgctcatataccctatggagagcactgttttagcagaaatctaatttctcttcctggaggaatttgttctcatttcttttgccacttaaaattaactgtgggctactcagccagggtacagtgggagcctcaggaaggtcagaggcaacctcctcccctgttctatcaatagaaacccaacgttgaggcaattcctaaacagacgcacctcgtagcttgctgtatgtgtttattctttattgctttcagctttggggctgtaacaggtacaaatatttggtttccctatgatttatagagaagaagaagaaacccagctttctatcagagcactgcaagagaagagtcttacacctgccctcagtgggagatgagaatggtcattatgacttagagaatgctacacgtgtaggttgctggtgtgtcctgaatccacaggcataaagcactccccatttttcctactgtaatgcagattctccggctcaaggtctagaatatttgatcctaagatcaagacatcatgcccttcgaatagtactgctctttgttttcaggagtcacgtgaacacacaactctcctatattcctcacgaacctcaggattgagcaaggtctttgtaatttttttggttcactttattgacctgggagcaaggtgctaattctgtggtcagtattcaatgtttttttcagtggagctttttctttgggccatatttgccttctaatacattcctgcaatatgtagtggtgatttcccttagcttcctcctactacctcttatactcatctccccaaattatttgcctcccttaaataagttttcctagaaggtaagctggtcaggcaatttgaaaaatattagatcccaagaaatctattccgtttgcattggacttctcggattccatgtgtttgcagcaggactacatcgaactctgatgtgccggattgtggcatgtctgcatgtctcatccatctattgtttttggtaactcagtttggaatttcagtgtctgtcttccctgggttgacattggaatcagcctctcctttgagcttattttaactcttgagcaacataacatagatttaatgtgaacagtttataccaaagggcagcctgtgcctgtttatggatcctctctgcctttgtacttgaagagcgcattttacatttccagtcctttcacagacaggagctccaaccttacgatggagaattaaacttgcttgtatttccactttgtggatgaggaa

SEQ ID NO: 248 - DNA, 9145 bp, Homo sapiens
  source 1..9145: mol_type = genomic DNA
gacttgaacgcaactcccaattgcagaaaattggcaacgtctctgaagagcccttgcttttgcctggacccccagcatcatggtttcccatttcatggggtctctcagtgtcctgtgtttccttctgctgcttggattccagttcgtctgcccacagccctccactcaacacaggaaggtcccgcagcggatggcggcggagggcgcccccgaggacgacggcggcggcggcgccccgggagtgtggggcgcctggggcccctggtcggcctgctcgcgtagctgcagcggcggcgtgatggagcagacgcggccctgcctgccccgctcctaccgcctgcgcggcggccagcggcctggcgcccctgcgcgcgccttcgcggaccacgtggtgtcggcggtgcgcacgtcggtgccactgcaccggagccgcgacgagacgccagcgctggccggtacggacgccagccgccagggccccacggtgctgcgaggcagccggcacccacagccccagggcctcgaagtcactggggacagaaggagcaggacccgtggtaccattggccctggcaagtatggctatggtaaggccccatatatcttaccactgcagacagacactgcacacacgccacagaggctccggagacagaagctctcatcccgccattccaggtcccagggagcatcttctgctaggcatggctacagttcaccagcccaccaggtcccccaacatgggcctttgtaccaaagtgacagtggccctcgctctggactgcaggctgcggaggcccccatctaccagctacctttgacccatgatcaaggctaccctgcagcttcaagtctctttcacagcccagaaacaagcaacaaccacggtgtggggacccatggggcaactcagagcttctctcagcctgcccgatctacagcaatctcatgcatcggggcctatcggcagtacaagctgtgcaacaccaacgtatgtccagaaagcagtagaagtatccgggaggtacagtgtgcatcctacaacaacaagccattcatgggccggttttatgagtgggaaccatttgcagaagtaaaaggcaatcgcaaatgtgagttgaactgccaggcaatgggctaccgcttctatgtacggcaagctgagaaagtcatcgatggcaccccctgtgaccagaacggcacggccatctgtgtgtctgggcagtgcaagagcattggctgtgatgactacttaggctccgacaaagtcgtggacaaatgtggggtgtgtggaggagacaacacgggctgtcaggttgtgtcgggcgtgtttaagcatgccctcaccagcctgggctaccaccgcgtcgtggagattcccgagggagccacgaaaatcaacatcacggagatgtacaagagcaacaactatttggccctgagaagtcgttctggacgctccatcatcaatgggaactgggcaattgatcgaccaggaaaatacgagggcggagggaccatgttcacctacaagcgtccaaatgagatttcgagcactgccggagagtcctttttggcggaaggtcccaccaacgagatcttggatgtctacatgatacaccagcagccaaacccaggcgtgcactacgagtacgtgatcatggggaccaacgccatcagcccccaggtgccaccccacaggagaccaggggaacccttcaatggccagatggtgacagaaggcaggagccaggaggagggagaacagaaagggaggaacgaggagaaggaagacttgcgtggggaggcccctgagatgttcacctcagaatcggcacagaccttcccagtcaggcatccagacagattttctccccatcgaccggacaacttggtgccaccagcaccgcagcccccacggcgcagccgggatcacaactggaagcagcttgggacaacagaatgttccacgacctgtgggaaaggatcgcagtaccctattttccgctgtgtgcacagaagcactcatgaagaggctcctgagagttactgtgactccagcatgaagccgacccccgaggaggagccctgcaacatcttcccttgcccagccttctgggacatcggggagtggtctgagtgcagcaagacctgtggcctgggcatgcagcaccgccaggttctgtgccgccaggtgtacgccaaccgcagcctgacggtgcagccctaccgctgccagcacctggagaaacctgagaccaccagcacctgccaactcaagatctgcagcgagtggcagatccggaccgactggacctcgtgctcggtgccctgcggcgtgggacagaggacccgtgatgtgaagtgtgtgagcaacattggggatgtggttgacgatgaggaatgcaacatgaagctccggccgaatgacattgagaactgcgacatgggaccctgtgccaagagctggttcctcaccgagtggagcgaaaggtgctcagcggagtgtggggccggagtgcggacacgctcggtggtgtgcatgaccaaccatgtcagcagcctgcccctggagggctgtgggaacaaccggccggcagaggccaccccatgtgacaacggaccctgcacgggcaaggtggagtggtttgccgggagctggagtcagtgttccatcgagtgtgggagcgggacgcaacagagggaggtgatttgtgttagaaagaatgcagacacctttgaagtgttggacccctctgaatgttctttcctggagaaaccccccagccagcaatcctgccacctcaagccttgcggagccaaatggtttagcaccgaatggagcatgtgttccaagagctgccagggtggctttcgggtccgggaagtgcggtgtctgtctgatgacatgactctaagtaacctctgtgaccctcagttgaaaccagaagagagagaatcttgtaaccctcaggactgtgtccctgaagttgatgaaaactgcaaggacaagtactacaactgcaacgtggtggtccaggcaagactctgtgtctacaactactacaagaccgcctgctgtgcctcctgcacccgtgtggccaacaggcagacgggcttcctggggagcagataacactcctgcacccccatcagtagggcagcatcactgccttcccgggggcttcagcagtgcgcctggctggctgctgctccaccacgggccccctggcccaggcgctgccaaccaacttagtcaccacccctgcctccggtgaatgcaccccgtggtacccaggggctttttacacaagatgtttgaaagccacagtcagtcctttaagcatcaccatgtactgatgatcccctccttggacctggcatctgctaatggtgccctttgaaagtcaagcagtgggaagtacatggagctctcagccctgctcccatctggcaccttcaagtcagcagatgggccactgactgagcactgccccgtccctggtgctactggtctttctaaacttagcaccctggagagtccaaggaggcagcgcccccaacccagcgccccactaagccttgctgacacgcgtgcatccctctgtgacctcagcccagatgtgcctgttttcattctcaaagacattagactgttttcctgccctatgacacagatagctcacatgaatattgtgctttatttagcaggtgtactcacagatactagctccttagcagctcacaacatcccagaatgggaggcagggggtgactcattatccccattttactgacagggaaactgaggctcaacttaagtaattgacctgccaggtatattcacccatccagtggaagagctgagtccccgccccagtcatctaccagtatccagcctggggcctgtacttagatgtgaaaggtgctgcttcatttctgaccaagagactgagaagtttcccagaatgcaaacaaagcccaggcccctgaaatctttccggtcaagcctttatcccagcactcagttgttttggatgtctgttcctacttgcccttacccccaaagttacagatcctagttacaggactctgccagctttgttaaactgtccgtgagacaagaaagccattggggaaaccaggtgattgcctgaaattcttactccgttccaagtgctgttcctcccaggaaatcaaaggccagggtccttatggccgtggagccttcccgaccacagagccaacttgtgaagcacacagctctgcagcctgggctctgccctgcctcagccgcctcccccacgctcttcaccacgttcctggagagtccggccaacctgtcccagccgaaacactgctgtattagaaaaagtctctttctggtctttctggttttgtttatgaatttccctctgtggccacaaattcctcccctcccccatgactcacagtccatatggcccacccccagacttgagcaccaagctctgcattaatgcagttggcctgcgacaaggagctgtggacccttccccatctcttccaattcactttccccaactatccagttccagaggccgcaggcctggaaggatgcagtgcatattgaaaggtggaccctctgaaaacagttaagaggaatatatgtatgttttacccattaagaaaaaatggcaagctaaacaaatgttaaacttacagaaaatttgtcttatggtcctgagcatatttcccttttagagcaagcctggattcttagcaaagtgtttcccccatttgctcttttagctgacaaatctgccactgtgatgatggtttgcagcttttggaagcagtatggcaacctggcctgacatgctctttaggcttccactaacctggggctttcagaaattctatttggcctttctgtgggtagctttccagcttctcttctagggagccccaggcatcatttcccaaaagcatccccatctcctgattctcttggaactcctacagataagcatcctggcagaggcccaggctcccaaaccgacaaagtgaaaagagaccagagaggccaagcatattgactggtgctgttcagggcctgctcttttccactcaccacttgttttgctgcttgtcacgaggagagttgttcctgtatgtggctgctctcagatctttccaagcaagccagtcatttgaagaggttttcttttcatgctggagggcaggctaagatcaatgagtggaagagagaaaggctgttttagctcaagttaaaggaacaccttctagccatcaaagccgcccaacagaggcaagggccaccacacatgagagagcgctctgtccttaaagggaattctctgttgagtgggaggtgaacaccctggttcttccaactcaggaattctcgtggctgggctgggtcagtgatggctttgtctctttatgtctaaagtgccctatggctgctgaaggttacctaaccattctttaaaaggagaatgaccctccatgggaatggccagcctgccaactgtgcaattgaagaagacccgatggatcaaccccatgtctcccttggggagaaagtgcataaaccaggggtctctttttttttttcaacaaaccattgagctgttcttggagttcatctctggagaggttatacattattagaagtttgattattattatagtttgatcaatttatttgtcttagagatccaatttttactaattccctagttttttatttcagcatctgaatgtctttctccctagcacagtgcatacaatcagggccttgggtatttccagtgataactttccttggagaggatctaagaaaagcccagatttcggtagccatctccctccaaatatgtctctttctgctttcttagtgcccattatttccccctctcctttcttctgtcactgccatctccttcttggtcttcccattgttctttaactggccgtaatgtggaattgatatttacattttgatacggtttttttcttggcctgtgtacgggattgcctcatttcctgctctgaattttaaaattagatattaaagctgtcatatggtttcctcacaaaagtcaacaaagtccaaacaaaaatagtttgccgttttactttcatccattgaaaaaggaaattgtgcctcttgcagcctaggcaaaggacatttagtactatcgattctttccaccctcacgatgacttgcggttctctctgtagaaaagggatggcctaagaaatacaactaaaaaaacaaacaaaaacaccaaaagaaaaaaaaaagccatttaaagccagccactagagggagtcagttcagttccgtaaaggtatgctcagtgcccgctgcctgcaagctgttggggaccccagggagggcaaggcagcctgtccccgcccccagggaactagaacatgacaagaattctccgcactgtgcctacctgtccctttaccttacctctctggcccagagttcttggagggttttttctttattttcttatgtactcatctacttattctcaaagtatttagcattcaacactctttttgctttaaaaagaatggccttacaaagggacagaaaagagaagacacgagcttggtgtattttcatcaagttatgtggcagagaaatccagatattaccaggacctgtctaaacaaatgttgtgggttttcttttcattcggatagccactttatagttggaatatcaattctaatgaggaggaagacataaatataagtggtaaaaagaaacatgacttcccttaaaacaggctggataatctatatcagccttgtgggtggagactagtatttgatccttgccatataaaacattttaatatggtttacatgggaaaatatcgatggcttcctcacaaaatgtatgggtgacgtgaagttgaagagccaatggcttgggtgacacgtgctggatccaaaaagatcagggagactagaataaaacttggatgttaaaaattcaccaggaatccacataaagtactatatttgggctaaaatgaaaaactaaatacaaggtgggagagaggcaagaatttcagttgactaagctcagtgtgagtcaaagtgggatggaaccatgcaaaaacaaaacccacagacatgcaggctacgtgaggagaaaacagtggtgaggatcacatcacattgtgtttgcatttgccggaaccatactttaagaagaaaaccgatcatctataataacatcagtttatcaatgccccgtcctgatgaagtgtgcagactctcagaaacagcaggaaggacttcatgagaaccctcaggctggagaaggcactagggcacaaggagagctctcctaggaccaggaccaagaagctacaggcaggcacagtttagctcctgcagagacccagcttttcacaagttggagccttccagagatagagggactgtggtaggtggtgacccacccatcactggaggtggaagcagaggccgtttgccagggatgctggagaggggattcaagcatctggctgggcaacgtgatgctcagggccgtctccactcagggcttaggggagtctgtgagtagaagagctttaggtgatttgtttggtgggggaaggcaagtacacagctatgcactttccgtttctgacttttgccaccctgtcagccatggggagcccactgtgggactgaaaccctgagctgaatgcggcctcatgtctcagagaaacactggcaagttggtcagagccgccgtctgcatcgaggcgtagctgagcggcaggatggggggctgcctgcccagggtctctcaccgtggtgtaagcagagccatggcttgcctaggaccctatagataccatcactctttctcagctcgactggagtttctgcacctttgcaggggcaaagtaactccctgcaccctgaaccaccccccattcctgttcatttcagcagataatgatggagggggggggtgtccatcgtgctgagggtgtgaccgcaagagggtgaaaacttccagccaactttctcagtcctttctcttgcgagagggaagccacctgctatacaaactaataccccctgccttgaccccttccccacgactcagttgacagaaggatatactttgttataacttattattttgttctctgtaaatacaagatgtttataggaaatatgtattctgaactctatctgcagaatgagtcactacaccaaaatagttctattatttagaatgtgttaattttaaagggacctgataggtatttatttacatatgcgatccacatttgtgtgaaagcatgtgatcatactaacccagcctcctggaatgtcgctgtacgatgattgatgtctttttctcagtccatagttacaattgtttagtatgctaatcagtccagttccctgaggtttaagatcaaatataaattactctgcttttcgactcattcaggtagcattgtacctgaacctgattgctactttttcatcttaaatattatatttcctcatctaatctgccttcccctcatccacagacatttggagaaggaaatgggagggtgtctgttatccctttctctttgctttgtccccgttgttagactggcagcgtcagttgctcggtgggcttggttagagccgtgggtgaggcaggtggctggcggggacagggagaggctgagagggaagtggtggcatttactgctctgacacttccactgtccctgctggggatgctggggccaaggcctgtggggcctgtgaactgcacagccaggagcaaggaacccactaaatactccgtcacctccatgtcccctctacagtgttaaattattacataagcaggtgaaaggtagaaggcgaattatgtgagtaaatatggtctgttttctcttcagcaaaaatgactatttttgtgtgtgactaatttatttttattattgtaaagatacaataaaccggttgaaatatctgctttgttgacaagcgtgtgctttctctggccttattcgcgttctgttctcctgcaaatagcgccctctaaaaagaagagtcagacaataaactggttgaaatatc

SEQ ID NO: 249 - DNA, 4287 bp, Homo sapiens
  source 1..4287: mol_type = genomic DNA
ggcgcctggttctgcgcgtactggctgtacggagcaggagcaagaggtcgccgccagcctccgccgccgagcctcgttcgtgtccccgcccctcgctcctgcagctactgctcagaaacgctggggcgcccaccctggcagactaacgaagcagctcccttcccaccccaactgcaggtctaattttggacgctttgcctgccatttcttccaggttgagggagccgcagaggcggaggctcgcgtattcctgcagtcagcacccacgtcgcccccggacgctcggtgctcaggcccttcgcgagcggggctctccgtctgcggtcccttgtgaaggctctgggcggctgcagaggccggccgtccggtttggctcacctctcccaggaaacttcacactggagagccaaaaggagtggaagagcctgtcttggagattttcctggggaaatcctgaggtcattcattatgaagtgtaccgcgcgggagtggctcagagtaaccacagtgctgttcatggctagagcaattccagccatggtggttcccaatgccactttattggagaaacttttggaaaaatacatggatgaggatggtgagtggtggatagccaaacaacgagggaaaagggccatcacagacaatgacatgcagagtattttggaccttcataataaattacgaagtcaggtgtatccaacagcctctaatatggagtatatgacatgggatgtagagctggaaagatctgcagaatcctgggctgaaagttgcttgtgggaacatggacctgcaagcttgcttccatcaattggacagaatttgggagcacactggggaagatataggcccccgacgtttcatgtacaatcgtggtatgatgaagtgaaagactttagctacccatatgaacatgaatgcaacccatattgtccattcaggtgttctggccctgtatgtacacattatacacaggtcgtgtgggcaactagtaacagaatcggttgtgccattaatttgtgtcataacatgaacatctgggggcagatatggcccaaagctgtctacctggtgtgcaattactccccaaagggaaactggtggggccatgccccttacaaacatgggcggccctgttctgcttgcccacctagttttggagggggctgtagagaaaatctgtgctacaaagaagggtcagacaggtattatccccctcgagaagaggaaacaaatgaaatagaacgacagcagtcacaagtccatgacacccatgtccggacaagatcagatgatagtagcagaaatgaagtcataagcgcacagcaaatgtcccaaattgtttcttgtgaagtaagattaagagatcagtgcaaaggaacaacctgcaataggtacgaatgtcctgctggctgtttggatagtaaagctaaagttattggcagtgtacattatgaaatgcaatccagcatctgtagagctgcaattcattatggtataatagacaatgatggtggctgggtagatatcactagacaaggaagaaagcattatttcatcaagtccaatagaaatggtattcaaacaattggcaaatatcagtctgctaattccttcacagtctctaaagtaacagttcaggctgtgacttgtgaaacaactgtggaacagctctgtccatttcataagcctgcttcacattgcccaagagtatactgtcctcgtaactgtatgcaagcaaatccacattatgctcgtgtaattggaactcgagtttattctgatctgtccagtatctgcagagcagcagtacatgctggagtggttcgaaatcacggtggttatgttgatgtaatgcctgtggacaaaagaaagacctacattgcttcttttcagaatggaatcttctcagaaagtttacagaatcctccaggaggaaaggcattcagagtgtttgctgttgtgtgaaactgaatacttggaagaggaccataaagactattccaaatgcaatatttctgaattttgtataaaactgtaacattactgtacagagtacatcaactattttcagcccaaaaaggtgccaaatgcatataaatcttgataaacaaagtctataaaataaaacatgggacattagctttgggaaaagtaatgaaaatataatggttttagaaatcctgtgttaaatattgctatattttcttagcagttatttctacagttaattacatagtcatgattgttctacgtttcatatattatatggtgctttgtatatgccactaataaaatgaatctaaacattgaatgtgaatggccctcagaaaatcatctagtgcatttaaaaataatcgactctaaaactgaaagaaaccttatcacattttccccagttcaatgctatgccattaccaactccaaataatctcaaataattttccacttaataactgtaaagtttttttctgttaatttaggcatatagaatattaaattctgatattgcacttcttattttatataaaataatcctttaatatccaaatgaatctgttaaaatgtttgattccttgggaatggccttaaaaataaatgtaataaagtcagagtggtggtatgaaaacattcctagtgatcatgtagtaaatgtagggttaagcatggacagccagagctttctatgtactgttaaaattgaggtcacatattttcttttgtatcctggcaaatactcctgcaggccaggaagtataatagcaaaaagttgaacaaagatgaactaatgtattacattaccattgccactgatttttttttaaatggtaaatgaccttgtatataaatattgccatatcatggtacctataatggtgatatatttgtttctatgaaaaatgtattgtgctttgatactaaaaatctgtaaaatgttagttttggtaattttttttctgctggtggatttacatattaaattttttctgctggtggataaacattaaaattaatcatgtttcaaagttttattttcagttccttttgcatgcctattttgatttagaaatcactttaagataaatgaacaaaattattgtaagtcttctaaacttggtttattgacgttagtataaataacatacaataccagatgtctacaaaatcgacctgattatttaggtatttgtatgtgaaagagaaacacatatttagaaacacagcaagggagattttgaataaagagagagatgaatttataaagtaggaaaaaaagaatctgaaagatacaaagtgattataaaagaattgacaggacaataaatacttcaaatacttttaggaagtaaatgagtaggagtttaggagggataaacgagataaattccatgcaatgatcaaggaaagcaagagagcagataatacaaaagaaaaagaagaaggttcacataaatagcttctggagtgcaaattataaagacatcaacatttttgatcatataataagtactggcttacagctaagtggttccaaatactggtaattaaaacaatgatgtatacgttaaagattgcaaaacttaaaagcagatttttatgggaacttttttcgaaaggatacatgaccaccttcttaaatagtatgactttacatagactctttttctggtccttactgctcctcccacaacagggaagcccgatcagttctgtcagtataaggttttcttctatttgcccttagtttagatctccatcatcaattccacttactattgtaataccttcagctggagcctgtgtctttctccattcctttttaatacattcgtatttcccagccccagaacccttgaaattaactcttccatgagttttcattgctgaagaaaaaccaaacattcttgtaaaaacatttaagaacttccatagtcttgttcatattgtttacctatcttctacacaaggcgtgtccttgggtaagttatttaacttcaatttaccttacctgtaaaatggaacaaataatatctccttaagattgctctacgaattaattgacacattatgtgtgatgtacttaaaggaataataaatgcataatatgaggtcagtggacgccattttctgttataatcatttttgttatctaatttggggaaactattcatctgtcatatactattgatcctttggcacttaaataaatgtgaaatcctccaggaattttcctgtgattctccttgtaagaattaaatgctctctaatatgatatccctttaa

SEQ ID NO: 250 - DNA, 2413 bp, Homo sapiens
  source 1..2413: mol_type = genomic DNA
ctgactctcttttcggactcagcccgcctgcacccaggtgaaataaacagctttattgctcacacaaagcctgtttggtggtctcttcacacggacgcgcatgaaatttggtgccgtcactcggatcgggggacctcccttgggaaatcaatccccgtcctcctgttctttgctccatgagaaagatccacctacgacctcaggtcctcagacagaccagcccaagaaacatctcaccaatttcaaatccgctaccaggagggtggccagaactcagtggttgacagctgacagacagacgtgggcttccatatcgtccgtgccctgggctcagaccatcagtgagaaaaaacctggagggtctctctgggaaactcgttcttccccaccgactactgcagggaccgaggaagccatgaacactacaagccttttggcgcctgctgctgagataatggccacacctggcagcccatcccaggccagccctaccttgggagcattcacccatggcacacagactccgagtccaaccaaggcaacagcccccagatatccacaaacaggtgatctctctgcagagtggccattcactgctggtgaagagccagtcctggtcccaagaccccatcaagtttcaagagtccgttccagttgctgcctaagccccatcctttgttctcctgctatgattgcgtttctcctcaccagtgtgctgatgatcccccatgccggaggccatcctctggacactccacatcttccacaggagctgcctccaggactcccaaacaatatcaatatcactttcttcagtgggatgtttaaaaatgtggaaagtgtggctgaaatttttgattgcctgggcccccacttcacctggctgcaggctgtcttcaccaatttccctgtgctgatccagtttgtcaatggtatgaagtgtgtggctggtctctgcccccgagactttgaagactatggttgcacctgcaggtttgagatggaagggttgcctgtggatgaatctgacagctgctgcttccagcaccgcaggtgctatgaggaggccgctgagatggactgtctccaagaccccgccaaacttagcacagaggtcaattgtgtcagcaagaagatcatatgtgagtccaaggacaactgtgagcacctgctgtgtacctgtgataaggctgccatagagtgcttggctcgatccagcctcaactcttccctgaaccttctggacacctccttctgcctggctcagactccagagacaaccatcaaggaagacttgacaacacttctgcccagagtggttcctgtggagcccacagacaccagcctgacagccctttcaggagaagtggctgcagagactgaggctgacagactgatcactctctccaagaaaaaagcaggccacgatcaggaaggagtgggagctgctagggctacgtcccctccaggatctgcagagatagttgcaacaagggttacagctaaaattgtaacccttgtccctgctggcattaaatctctggggctggcagtgtcatctgttgaaaatgatcctgaggagaccactgaaaaagcctgtgacagattcaccttcctgcacctgggaagtggggacaacatgcaggtgatgccacagcttggagagatgctcttttgtctgacatcccggtgcccggaggaatttgagtcttatggctgttactgtggacaagaaggaagaggcgagccaagggatgacctagacaggtgctgcttgtcccatcactgctgcctagagcaagtgagaaggctgggctgcctgcttgagaggcttccttggtcaccggtggtgtgtgtggatcatacgcccaagtgtgggggccaaagcctgtgtgagaagttgctctgtgcctgtgaccagacggcagctgagtgcatgacctctgcctcctttaaccaaagcctcaagtccccaagcagactcgggtgccctgggcagccagcagcctgtgaagacagcctgcaccctgtgcccgcagcccccaccctgggctccagctctgaggaggacagcgaggaggaccctccacaggaggacctcggcagagccaagaggtttctgcggaagtcactgggtcccttggggatcgggcctcttcatggaagatagatgcccagagaaaatggctaacaccttcagtagcgtggctcctgctccaccttcagctctttatctctcagcctcctctgtcccttggagccttcttcccttcctttaactcagaggcggggagggaacagaggccgtgagccctgcccatgcctcatcagctgtggtcacctcacaagccaatgtacacttggagaaggcacaccatggtacctccatgctcctttagtgcactgtggaagc

SEQ ID NO: 251 - DNA, 1943 bp, Homo sapiens
  source 1..1943: mol_type = genomic DNA
gtgatggggcgccgggtccagcctgttgctgatgctgccgtgcggtacttgtcatggagctggcactgcggcgctctcccgtcccgcggtggttgctgctgctgccgctgctgctgggcctgaacgcaggagctgtcattgactggcccacagaggagggcaaggaagtatgggattatgtgacggtccgcaaggatgcctacatgttctggtggctctattatgccaccaactcctgcaagaacttctcagaactgcccctggtcatgtggcttcagggcggtccaggcggttctagcactggatttggaaactttgaggaaattgggccccttgacagtgatctcaaaccacggaaaaccacctggctccaggctgccagtctcctatttgtggataatcccgtgggcactgggttcagttatgtgaatggtagtggtgcctatgccaaggacctggctatggtggcttcagacatgatggttctcctgaagaccttcttcagttgccacaaagaattccagacagttccattctacattttctcagagtcctatggaggaaaaatggcagctggcattggtctagagctttataaggccattcagcgagggaccatcaagtgcaactttgcgggggttgccttgggtgattcctggatctcccctgttgattcggtgctctcctggggaccttacctgtacagcatgtctcttctcgaagacaaaggtctggcagaggtgtctaaggttgcagagcaagtactgaatgccgtaaataaggggctctacagagaggccacagagctgtgggggaaagcagaaatgatcattgaacagaacacagatggggtgaacttctataacatcttaactaaaagcactcccacgtctacaatggagtcgagtctagaattcacacagagccacctagtttgtctttgtcagcgccacgtgagacacctacaacgagatgccttaagccagctcatgaatggccccatcagaaagaagctcaaaattattcctgaggatcaatcctggggaggccaggctaccaacgtctttgtgaacatggaggaggacttcatgaagccagtcattagcattgtggacgagttgctggaggcagggatcaacgtgacggtgtataatggacagctggatctcatcgtagataccatgggtcaggaggcctgggtgcggaaactgaagtggccagaactgcctaaattcagtcagctgaagtggaaggccctgtacagtgaccctaaatctttggaaacatctgcttttgtcaagtcctacaagaaccttgctttctactggattctgaaagctggtcatatggttccttctgaccaaggggacatggctctgaagatgatgagactggtgactcagcaagaataggatggatggggctggagatgagctggtttggccttggggcacagagctgagctgaggccgctgaagctgtaggaagcgccattcttccctgtatctaactggggctgtgatcaagaaggttctgaccagcttctgcagaggataaaatcattgtctctggaggcaatttggaaattatttctgcttcttaaaaaaacctaagattttttaaaaaattgatttgttttgatcaaaataaaggatgataatagatattattttttcttatgacagaagcaaatgatgtgatttatagaaaaactgggaaatacaggtacccaaagagtaaatcaacatctgtatacccccttcccaggggtaagcactgttaccaatttagcatatgtccttgcagaatttttttttctatatatacatatatattttttaccaaaatgaatcattactctatgttgttttactatttgtttgacatatcagtatatctgaaacaccttttcatgtcaataaatgttcttctctaacattttt

SEQ ID NO: 252 - DNA, 2592 bp, Homo sapiens
  source 1..2592: mol_type = genomic DNA
aaaaggatggtgcgcctggcggccgagctgctgctgctgctggggctgctgctgctcacgctgcacatcaccgtgctgcgcggctcgggagccgccgacgggcccgacgcggccgcgggcaacgccagccaagcccagctgcagaataacctcaacgtgggaagtgacaccacatcagaaaccagcttttctctctccaaagaagcaccaagggagcatctggaccaccaggctgcacaccaacccttccccagaccgcgattccgacaagagacggggcacccttcattgcaaagagatttccccagatcctttctccttgatctaccaaactttccagatctttccaaagctgatatcaatgggcagaatccaaatatccaggtcaccatagaggtggtcgacggtcctgactctgaagcagataaagatcagcatccggagaataagcccagctggtcagtcccatcccccgactggcgggcctggtggcagaggtccctgtccttggccagggcaaacagcggggaccaggactacaagtacgacagtacctcagacgacagcaacttcctcaacccccccagggggtgggaccatacagccccaggccaccggacttttgaaaccaaagatcagccagaatatgattccacagatggcgagggtgactggagtctctggtctgtctgcagcgtcacctgcgggaacggcaaccagaaacggacccggtcttgtggctacgcgtgcactgcaacagaatcgaggacctgtgaccgtccaaactgcccaggaattgaagacacttttaggacagctgccaccgaagtgagtctgcttgcgggaagcgaggagtttaatgccaccaaactgtttgaagttgacacagacagctgtgagcgctggatgagctgcaaaagcgagttcttaaagaagtacatgcacaaggtgatgaatgacctgcccagctgcccctgctcctaccccactgaggtggcctacagcacggccgacatcttcgaccgcatcaagcgcaaggacttccgctggaaggacgccagcgggcccaaggagaagctggagatctacaagcccactgcccggtactgcatccgctccatgctgtccctggagagcaccacgctggcggcacagcactgctgctacggcgacaacatgcagctcatcaccaggggcaagggggcgggcacgcccaacctcatcagcaccgagttctccgcggagctccactacaaggtggacgtcctgccctggattatctgcaagggtgactggagcaggtataacgaggcccggcctcccaacaacggacagaagtgcacagagagcccctcggacgaggactacatcaagcagttccaagaggccagggaatattaaagagactgggatgaggtggaggacgctgcctctggttctggagcacacacgtgctgcactgacgtgccgactggcgccgagaccttcatagctgcggtcgtgtatatttgtatataccacatgagtatttctcatacattacgctaggggcgtgtgccacgcccaggggactgccttgtgaagccgccctcgccatctgcagagctccttgaaagtgcccctggggagcgatgtgggcagaaggatggggacaacttggaagccagaagaagaacctggaagccacagtgggtgcgactcaattcacacccggatccagagtttcaaagagaggcaaagggggaaagagactgaggttgtaaacgttataagcagtttttatatataacttatttaatacaaatgtgacttaattaagcgtaaccttttctctggagttgtggtgaaactaatcacgtctgtgagagatcagaaagaaagagacttagggaagtggaagagaaagggaattttggaatttatttctttaaaaataatgcaatggaaatatatcaaaacatgtaaacgcccaccttaaaccaaatgttatttggtcatgaggcaccttgctggagtctcagattccaaaagtctcttcttcagactgggtagggaatatgatattttagggacaaagctgaggactggttttaaataggctttaaaataaaagatcaatattatcataatgctatcattctgctaaacggccccaaaacagtagaatttctgctcatgtcctagcaggttcagaagactgcagccaagttcagatgtaaaaacaagaagtagcacttttccaaaggaaaacaacaaaacaaatgggaaaaagataatggaccgcatttcacctattttaatactattttaacaattttttcatctaccaatatatccccaataaataaatataaaagggggggagggtcaatctggggaatcttagttttttatgttttaagaaaacaaaaaaaactgcattatttttgtaaagtatttattgagtcacggattattgtgcatcaagcaattgttaatatgacctggtcctatggggtagaacttaggaaaaataaagttggttcttattcaatattttactttgcaaaattctagtaaaagagagtatataataaaatcataataaaaggt

SEQ ID NO: 253 - DNA, 3925 bp, Homo sapiens
  source 1..3925: mol_type = genomic DNA
ttgggaaacccctacctgtctgtacctgtaggtcttttctctggggtctggaagaagaatccttcaatatcttgccttctggtaatctgagagcagggcgagaaaaggaagatcagagttccacccttaaatctgtaggttttcactcccccactctcctttgcagtcccgtggagtctccatctgagccctttcctagtccaggcatcccgatgttggtggatggcccatctgagcggccagccctgtgcttcttgctgttggctgtggcaatgtctttcttcggctcagctctatccatagatgaaacacgggcgcatctgttgttgaaagaaaagatgatgcggctgggggggcggctggtgctgaacaccaaggaggagctggccaatgagaggctcatgacgctcaaaatcgctgagatgaaggaggccatgaggaccctgatattcccacccagcatgcactttttccaggccaagcatctcattgagagaagtcaagtgtttaatattctaaggatgatgccaaaaggggctgccttgcacctccatgacattggcatcgtgactatggactggctggtgaggaatgtcacctacaggcctcactgccacatctgtttcaccccaagggggatcatgcagttcagatttgctcacccaactccccgtccatcagaaaaatgttccaagtggattctgctggaggattatcggaagcgggtgcagaacgtcactgagtttgatgacagcttgctgaggaatttcactctggtgacccagcacccggaggtgatttacacaaaccaaaatgttgtctggtcgaaatttgaaaccatcttcttcaccatctctggtctcatccattacgcaccagtgttcagagactatgtcttccggagcatgcaggagttctacgaggacaacgtgctctacatggagatcagagccaggctgctgccggtgtatgagctcagtggagagcaccatgacgaagagtggtcagtgaagacttaccaggaagtagctcagaagtttgtggaaactcaccctgagtttattggaatcaaaatcatttattcggatcacagatccaaagatgtggctgtcatcgcagaatccatccgaatggccatggggctccgaatcaagttccccacggtggtggcagggtttgacctggtggggcatgaggacactggccactccttgcatgactacaaggaagctctgatgatccccgccaaggatggcgttaagctgccttacttcttccacgccggagaaacagactggcagggtacttccatagacaggaacattctggatgctctgatgctgaacactaccagaatcggccatggatttgctttgagcaaacaccccgcagtcaggacttactcctggaaaaaggacatccccatagaagtctgtcccatctctaaccaggtgctgaaactggtgtctgacttgaggaaccaccctgtagccactctgatggccactgggcaccccatggtgatcagctctgatgacccagctatgtttggtgccaaaggcttgtcctatgatttctatgaggtcttcatgggcattggggggatgaaggctgacctgaggaccctcaaacagctggccatgaactctatcaagtacagtaccctgttggagagtgagaaaaatactttcatggaaatctggaagaagagatgggataagttcatagcagatgtggctacaaagtgaggagaagctagccagccctctacaagctgtcttcttgcacacgctgtcacttcctctcactcgttcttgaatcagctccatgtgcccatgaaatcaatggcctctgtatggagcgaccctgtgagaagcacttggctggctgagcaaattcatcctctggaaatattctctctcagccacagtgacattgaccctcttggttttctcctgtctctggccatttcttccagtttccctatttcagagtcttctcctctctctgatctctgtgctgtttcctcaggactcagtcctgggctctcttctattctggtctctttatttttttatttttgtattttttcgagatggagttttgctcttgttgcccaggctggagtacaatggtgcgatctcagctcagtgcaacctccgccacccgggttcaggcaattctcttgcatcagcctcgcgagtagttggaattataggcatgtgccaccacacccagctgatttttgcatttttagtagagacaggttttcaccatgttggcgaggctggtatccaactcttgacctcaggtgatccactcgccccttggctcccaaagtgctggaattacaggcattagccaccatgcctggcctattctggtctctttaactctctcctctttatttctcttctctctctgtacacttttcctgggtggtctcatccattcctttgctttttcataccatttatttgttaatgattcccacatttatttatgcacttggagagctcacaggaatctcagaaactgatgaggtacaattctgaaccctcagtctcttccctttaaacctttctttttctctactttaatttttctaaagagtgtcttgctatgttgcccaggctggtctccaactcaagtgatcctcctgccgcagtctcccgaagtgctgggattactgacatgagccaccacactcagccctttaaacctttccctggcctttcccatagctggtgaaggacacctccatccattccacgcagttgctcaaagcagaaattttcagtgcaagtcttgatgctgcgccgtcccccactccctacatcagaacgcatccctcatctggactccagcggtggcttcttgatgctgcgcggtcccccactccctacatcagaatgcatcccgcatccagactccagcggtggtgctctacctgcacgctgttgccaagtccaagctaccatactcctgcctgagctatgacaacagcctcctcactgatctcccctttcttccctttgcctcctccagctcatttttcacagtgtagaatgacattttgtttgtttgttttgttttgtttgagatggagtctcgctctgttgcccagggtggagtgcagcggtgcgatctcggctcactgcaacctccacctcccgggttcaagcggattctcgtgcctcagcctcctgagtagctgggattacaggcatgcaccaccatgcccggataatttttgtatttttagtagagatggggtttcactatgttggccaggctggtctcgaacacctgacctcgtggtccacccgcctcggcctcccaaagcactgggattacaggcgtgagccacccggcctggcctagaatgacttttaaaagatcaaattaaatcaggtcactcctttgcttacaacgcagtgcgtttagaggtacaccccatgtctccacagggcatacagcatccgatttaatctggatccattccggcgccttcctctcccagtcacccagagggccccaaccccggcggccctttcttcctcaaatgtcctcggctctataccgtgcctgggtcttttctctttctctctgcctggaagattccttctttccccttttgtcttgcccactcctgtttacccttcaagtttcaagttcatgtcactgtctcagagaggttttcctgtgctcgccctgtttctctcaggaagccttgctcttttccatcatgcctctaatcacagcttataatcggatatttatttctgtgtctacagtcttgccctgccagactgtatgccccatgtgggcaggcgctcatgattgtttctgattgtttcacgcatgctgctaacccagagcctgggcccaaagctagttagtactcaataaacaatgcattgaa

SEQ ID NO: 254 - DNA, 2170 bp, Homo sapiens
  source 1..2170: mol_type = genomic DNA
atatacggctctaaccttctctctctgcaccttccttctgtcaatagatgaaacaaatacttcatcctgctctggaaaccactgcaatgacattattcccagtgctgttgttcctggttgctgggctgcttccatcttttccagcaaatgaagataaggatcccgcttttactgctttgttaaccacccaaacacaagtgcaaagggagattgtgaataagcacaatgaactgaggagagcagtatctccccctgccagaaacatgctgaagatggaatggaacaaagaggctgcagcaaatgcccaaaagtgggcaaaccagtgcaattacagacacagtaacccaaaggatcgaatgacaagtctaaaatgtggtgagaatctctacatgtcaagtgcctccagctcatggtcacaagcaatccaaagctggtttgatgagtacaatgattttgactttggtgtagggccaaagactcccaacgcagtggttggacattatacacaggttgtttggtactcttcatacctcgttggatgtggaaatgcctactgtcccaatcaaaaagttctaaaatactactatgtttgccaatattgtcctgctggtaattgggctaatagactatatgtcccttatgaacaaggagcaccttgtgccagttgcccagataactgtgacgatggactatgcaccaatggttgcaagtacgaagatctctatagtaactgtaaaagtttgaagctcacattaacctgtaaacatcagttggtcagggacagttgcaaggcctcctgcaattgttcaaacagcatttattaaatacgcattacacaccgagtagggctatgtagagaggagtcagattatctacttagatttggcatctacttagatttaacatatactagctgagaaattgtaggcatgtttgatacacatttgatttcaaatgtttttcttctggatctgctttttattttacaaaaatatttttcatacaaatggttaaaaagaaacaaaatctataacaacaactttggatttttatatataaactttgtgatttaaatttactgaatttaattagggtgaaaattttgaaagttgtattctcatatgactaagttcactaaaaccctggattgaaagtgaaaattatgttcctagaacaaaatgtacaaaaagaacaatataattttcacatgaacccttggctgtagttgcctttcctagctccactctaaggctaagcatcttcaaagacgttttcccatatgctgtcttaattcttttcactcattcacccttcttcccaatcatctggctggcatcctcacaattgagttgaagctgttcctcctaaaacaatcctgacttttattttgccaaaatcaatacaatcctttgaattttttatctgcataaattttacagtagaatatgatcaaaccttcatttttaaacctctcttctctttgacaaaacttccttaaaaaagaatacaagataatataggtaaataccctccactcaaggaggtagaactcagtcctctcccttgtgagtcttcactaaaatcagtgactcacttccaaagagtggagtatggaaagggaaacatagtaactttacaggggagaaaaatgacaaatgacgtcttcaccaagtgatcaaaattaacgtcaccagtgataagtcattcagatttgttctagataatctttctaaaaattcataatcccaatctaattatgagctaaaacatccagcaaactcaagttgaaggacattctacaaaatatccctggggtattttagagtattcctcaaaactgtaaaaatcatggaaaataagggaatcctgagaaacaatcacagaccacatgagactaaggagacatgtgagccaaatgcaatgtgcttcttggatcagatcctggaacagaaaaagatcagtaatgaaaaaactgatgaagtctgaatagaatctggagtatttttaacagtagtgttgatttcttaatcttgataaatatagcagggtaatgtaagatgataacgttagagaaactgaaactgggtgagggctatctaggaattctctgtactatcttaccaaattttcggtaagtctaagaaagcaatgcaaaataaaaagtgtcttg

SEQ ID NO: 255 - DNA, 1604 bp, Homo sapiens
  source 1..1604: mol_type = genomic DNA
gtgccagaagatgaaaaaataattgaacaaatagaggatatggtgactacagcttctacgtacctgtttgaagccacagaaaaaagattttttttcaaaaatgtatctatattaattcctgagaattggaaggaaaatcctcagtacaaaaggccaaaacatgaaaaccataaacatgctgatgttatagttgcaccacctacactcccaggtagagatgaaccatacaccaagcagttcacagaatgtggagagaaaggcgaatacattcacttcacccctgaccttctacttggaaaaaaacaaaatgaatatggaccaccaggcaaactgtttgtccatgagtgggctcacctccggtggggagtgtttgatgagtacaatgaagatcagcctttctaccgtgctaagtcaaaaaaaatcgaagcaacaaggttgttgaattttgtaacgaaaaaacccataatcaagaagctccaagcctacaaaacataaagtgcaattttagaagtacatgggaggtgattagcaattctgaggattttaaaaacaccatacccatggtgacaccacctcctccacctgtcttctcattgctgaagatcagtcaaagaattgtgtgcttagttcttgataagtctggaagcatggggggtaaggaccgcctaaatcgaatgaatcaagcagcaaaacatttcctgctgcagactgttgaaaatggatcctgggtggggatggttcactttgatagtactgccactattgtaaataagctaatccaaataaaaagcagtgatgaaagaaacacactcatggcaggattacctacatatcctctgggaggaacttccatctgctctggaattaaatatgcatttcaggtgattggagagctacattcccaactcgatggatccgaagtactgctgctgactgatggggaggataacactgcaagttcttgtattgatgaagtgaaacaaagtggggccattgttcattttattgctttgggaagagctgctgatgaagcagtaatagagatgagcaagataacaggaggaagtcatttttatgtttcagatgaagctcagaacaatggcctcattgatgcttttggggctcttacatcaggaaatactgatctctcccagaagtcccttcaggtcagagttctcattccttgggttttcatgttcacttttgccacaagaaaaaaccatttggtggttataagttttgagttccatatttttctcaaagtaaatttttaattaaaatctaaactttaatcttaaatagaaattacccttagctatagccaaattaattggtgaaataagagtaaaataaatggtgaaacagcagacatactgtttcttttcctattgccatgggtttggttaagaaatgacattacaatgttataatgtcaaatttttcaccaaaaatggaccttttccaaaataaagcacccatttttcaatgaatgcattttaaaagctcatgcttccaagctttccccatgcttaacttctatgatatagatttagaaacatgaactcaagaacctggctgggaaatggaaggagtgtatcttggaa

SEQ ID NO: 256 - DNA, 669 bp, Homo sapiens
  source 1..669: mol_type = genomic DNA
gcgcaagagagcgggaagccgagctgggcgagaagtaggggagggcggtgctccgccgcggtggcggttgctatcgcttcgcagaacctactcaggcagccagctgagaagagttgagggaaagtgctgctgctgggtctgcagacgcgatggataacgtgcagccgaaaataaaacatcgccccttctgcttcagtgtgaaaggccacgtgaagatgctgcggctggcactaactgtgacatctatgaccttttttatcatcgcacaagcccctgaaccatatattgttatcactggatttgaagtcaccgttatcttatttttcatacttttatatgtactcagacttgatcgattaatgaagtggttattttggcctttgcttgatattatcaactcactggtaacaacagtattcatgctcatcgtatctgtgttggcactgataccagaaaccacaacattgacagttggtggaggggtgtttgcacttgtgacagcagtatgctgtcttgccgacggggcccttatttaccggaagcttctgttcaatcccagcggtccttaccagaaaaagcctgtgcatgaaaaaaaagaagttttgtaattttatattactttttagtttgatactaagtattaaacatatttctgtattcttccacata

SEQ ID NO: 257 - DNA, 5864 bp, Homo sapiens
  source 1..5864: mol_type = genomic DNA
ggctgccaggggcgtccggttacatccccgccttcctctgtcctggccgcgggaccgggtttgcgggaccgcagttcgggaacatgttggcctcgagcagccggatccgggctgcgtggacgcgggcgctgctgctgccgctgctgctggcggggcctgtgggctgcctgagccgccaggagctctttcccttcggccccggacagggggacctggagctggaggacggggatgacttcgtctctcctgccctggagctgagtggggcgctccgcttctacgacagatccgacatcgacgcagtctacgtcaccacaaatggcatcattgctacgagtgaacccccggccaaagaatcccatcccgggctcttcccaccaacattcggtgcagtcgcccctttcctggcggacttggacacgaccgatggcctggggaaggtttattatcgagaagacttatccccctccatcactcagcgagcagcagagtgtgtccacagagggttcccggagatctctttccagcctagtagcgcggtggttgtcacttgggaatccgtggccccctaccaagggcccagcagggacccagaccagaaaggcaagagaaacacgttccaggctgttctagcctcctctgattccagctcctatgccattttcctttatcctgaggatggtctgcagttccatacgacattctcaaagaaggaaaacaaccaagttcctgccgtggttgcattcagtcaaggttcagtgggattcttatggaagagcaacggagcttataacatatttgctaatgacagggaatcagttgaaaatttggccaagagtagtaactctgggcagcagggtgtctgggtgtttgagattgggagtccagccaccaccaatggcgtggtgcctgcagacgtgatcctcggaactgaagatggggcagagtatgatgatgaggatgaagattatgacctggcgaccactcgtctgggcctggaggatgtgggcaccacgcccttctcctacaaggctctgagaaggggaggtgctgacacatacagtgtgcccagcgtcctctccccgcgccgggcagctaccgaaaggccccttggacctcccacagagagaaccaggtctttccagttggcagtggagacttttcaccagcagcaccctcaggtcatagatgtggatgaagttgaggaaacaggagttgttttcagctataacacggattcccgccagacgtgtgctaacaacagacaccagtgctcggtgcacgcagagtgcagggactacgccacgggcttctgctgcagctgtgtcgctggctatacgggcaatggcaggcaatgtgttgcagaaggttccccccagcgagtcaatggcaaggtgaaaggaaggatctttgtggggagcagccaggtccccattgtctttgagaacactgacctccactcttacgtagtaatgaaccacgggcgctcctacacagccatcagcaccattcccgagaccgttggatattctctgcttccactggccccagttggaggcatcattggatggatgtttgcagtggagcaggacggattcaagaatgggttcagcatcaccgggggtgagttcactcgccaggctgaggtgaccttcgtggggcacccgggcaatctggtcattaagcagcggttcagcggcatcgatgagcatgggcacctgaccatcgacacggagctggagggccgcgtgccgcagattccgttcggctcctccgtgcacattgagccctacacggagctgtaccactactccacctcagtgatcacttcctcctccacccgggagtacacggtgactgagcccgagcgagatggggcatctccttcacgcatctacacttaccagtggcgccagaccatcaccttccaggaatgcgtccacgatgactcccggccagccctgcccagcacccagcagctctcggtggacagcgtgttcgtcctgtacaaccaggaggagaagatcttgcgctatgctctcagcaactccattgggcctgtgagggaaggctcccctgatgctcttcagaatccctgctacatcggcactcatgggtgtgacaccaacgcggcctgtcgccctggtcccaggacacagttcacctgcgagtgctccatcggcttccgaggagacgggcgaacctgctatgatattgatgaatgttcagaacaaccctcagtgtgtgggagccacacaatctgcaataatcacccaggaaccttccgctgcgagtgtgtggagggctaccagttttcagatgagggaacgtgtgtggctgtcgtggaccagcgccccatcaactactgtgaaactggccttcataactgcgacataccccagcgggcccagtgtatctacacaggaggctcctcctacacctgttcctgcttgccaggcttttctggggatggccaagcctgccaagatgtagatgaatgccagccaagccgatgtcaccctgacgccttctgctacaacactccaggctctttcacgtgccagtgcaaacctggttatcagggagacggcttccgttgcgtgcccggagaggtggagaaaacccggtgccagcacgagcgagaacacattctcggggcagcgggggcgacagacccacagcgacccattcctccggggctgttcgttcctgagtgcgatgcgcacgggcactacgcgcccacccagtgccacggcagcaccggctactgctggtgcgtggatcgcgacggccgcgaggtggagggcaccaggaccaggcccgggatgacgcccccgtgtctgagtacagtggctcccccgattcaccaaggacctgcggtgcctaccgccgtgatccccttgcctcctgggacccatttactctttgcccagactgggaagattgagcgcctgcccctggagggaaataccatgaggaagacagaagcaaaggcgttccttcatgtcccggctaaagtcatcattggactggcctttgactgcgtggacaagatggtttactggacggacatcactgagccttccattgggagagctagtctacatggtggagagccaaccaccatcattagacaagatcttggaagtccagaaggtatcgctgttgatcaccttggccgcaacatcttctggacagactctaacctggatcgaatagaagtggcgaagctggacggcacgcagcgccgggtgctctttgagactgacttggtgaatcccagaggcattgtaacggattccgtgagagggaacctttactggacagactggaacagagataaccccaagattgaaacttcctacatggacggcacgaaccggaggatccttgtgcaggatgacctgggcttgcccaatggactgaccttcgatgcgttctcatctcagctctgctgggtggatgcaggcaccaatcgggcggaatgcctgaaccccagtcagcccagcagacgcaaggctctcgaagggctccagtatccttttgctgtgacgagctacgggaagaatctgtatttcacagactggaagatgaattccgtggttgctctcgatcttgcaatttccaaggagacggatgctttccaaccccacaagcagacccggctgtatggcatcaccacggccctgtctcagtgtccgcaaggccataactactgctcagtgaacaatggcggctgcacccacctatgcttggccaccccagggagcaggacctgccgttgccctgacaacaccttgggagttgactgtatcgaacagaaatgaagacaagagtgccttatttcctttccaagtatttcacagcaacactctacttgaagcaacttggtccagattgaaaagtgtcctctggctgagtggccactaggcccagacccagcccagcctgagccccaacaacttttccctcactgttccccaaaacatgcaccctggacttctctaatagaaaagtctccacccctacacaaggacagaaccctccacccctacccccaaccctcagacagacttatacacccctgagtgaggattacatgcccatcccagtgtcctaggaccttttcccaatactagccccccagtggtgaacagaacctcccaaatttgagttgcacccttccctgtggccttatgagctcagcctcgctttgaggtacccaccgtcctgtcagctccttgacctatgagccggggcctgactaggaaaagttgggagttaaggaggaaattagcattccttaatgttttgttttggtgctctgaatttcttctttattatagtcctatagttttactcctcagttcctcaccatcatcatcttgtctaagacccccattataatattcatgcgctgctttttcatcaaaacctaccctgtcctagagatctatgggcatttggtggatgataatgagcagcccctcccagatagaatgtcaatatttgagcagtaggatattggcatttgttagttaaaggcttaaatcaaaagaatgtccaatggtaggaatttcaaggtgtaggtcagatatttgagaataggggatttttttgatgtgccttaaattataccaaagattactaattattcctctttgcccaaaatacttgcatccaaggttctagtctctgttgctgtgctggtctttagccccactgcttgcactgatgtccctccttttcacggagacctatctgaggtacaggatggggctggcaccagatgatgtcccaccacagtccctcacctccggcctccacatgacagaaccaatttacactcaaccatgacctcacccctccttggtttctccctcgatctgtggccctttttggatgtattcttatctaacaacacaatccggaaagactgaattgaatatttatactaatggttcatatcctttattgctcaatgatctaattaaagggatcattgccacatttcatgtttatatttctacaatttgtttagaaaacatctcctgaccatatcagtagctcgtgttatctttttatcaactgcttcccagagtcctaaaacaatagaaattttggattgaaaagttcagcataaggagtttgagtcagtaaaggatgggataaaggagtcgagatgattcaatgaaaagtatcacaaaaaagagattgatcaacaagagaaataaaaaagcccaagaggaagtggtaggggaaggaatttaagaacagcaataagtaaaactcttaagtaactccaaaaagaaaatggtacattttgccaaagaccacttatacttgagaacatggaagaatttgcctgatactctctttggggaaaagagtctctcctcttttcctcaaaccccagtacactcagcctctctgccccaccttctcctgactttgtcctcacttgcttctgcagtacattggaacctgaattgaaagaaagtcttccttgaataattggagtttgtcttgagaggcaaatatagccccaagaatcacaagattcgaggaccatgtaggtcttttacgtagcccaaatccataaattagtctcactttttgtatttatcgtttcatattaaaccctctatatcaaatgttcatcatgattttgtatgatttttataactattttattcattttattagatttattctaaaattttttaatggtaaattcttaaactgtggaaaccactgaaggtgcttattaactgttctcccagatttgtacaagtattggatgattccttgagtttacagctgtacaaatagtgtggaaaataaactttttttaaaaaagaaaa

SEQ ID NO: 258 - DNA, 816 bp, Homo sapiens
  source 1..816: mol_type = genomic DNA
agtcctgtgtccgggccccgaggcacagccagggcaccaggtggagcaccagctacgcgtggcgcagcgcagcgtccctagcaccgagcctcccgcagccgccgagatgctgcgaacagagagctgccgccccaggtcgcccgccggacaggtggccgcggcgtccccgctcctgctgctgctgctgctgctcgcctggtgcgcgggcgcctgccgaggtgctccaatattacctcaaggattacagcctgaacaacagctacagttgtggaatgagatagatgatacttgttcgtcttttctgtccattgattctcagcctcaggcatccaacgcactggaggagctttgctttatgattatgggaatgctaccaaagcctcaggaacaagatgaaaaagataatactaaaaggttcttatttcattattcgaagacacagaagttgggcaagtcaaatgttgtgtcgtcagttgtgcatccgttgctgcagctcgttcctcacctgcatgagagaagaatgaagagattcagagtggacgaagaattccaaagtccctttgcaagtcaaagtcgaggatattttttattcaggccacggaatggaagaaggtcagcagggttcatttaaaatggatgccagctaattttccacagagcaatgctatggaatacaaaatgtactgacattttgttttcttctgaaaaaaatccttgctaaatgtactctgttgaaaatccctgtgttgtcaatgttctcagttgtaacaatgttgtaaatgttcaatttgttgaaaattaaaaaatctaaaaata

SEQ ID NO: 259 - DNA, 1430 bp, Homo sapiens
  source 1..1430: mol_type = genomic DNA
ccagtgaataatcagaagtcagtttgggagaagtcaaaatggacacaatcttcttgtggagtcttctattgctgttttttggaagtcaagcctcaagatgctcagctcaaaaaaataccgaatttgcagtggatctttatcaagaggtttccttatctcataaggacaacattatattttcaccccttggaataactttggttcttgagatggtacaactgggagccaaaggaaaagcacagcagcagataagacaaactttaaaacaacaggaaacctcagctggggaagaattttttgtactgaagtcatttttctctgccatctcagagaaaaaacaagaatttacatttaatcttgccaatgccctctaccttcaagaaggattcactgtgaaagaacagtatctccatggcaacaaggaattttttcagagtgctataaaactggtggattttcaagatgcaaaggcttgtgcagagatgataagtacctgggtagaaagaaaaacagatggaaaaattaaagacatgttttcaggggaagaatttggccctctgactcggcttgtcctggtgaatgctatttatttcaaaggagattggaaacagaaattcagaaaagaggacacacagctgataaattttactaagaaaaatggttcaactgtcaaaattccaatgatgaaggctcttctgagaacaaaatatggttatttttctgaatcttccctgaactaccaagttttagaattgtcttacaaaggtgatgaatttagcttaattatcatacttcctgcagaaggtatggatatagaagaagtggaaaaactaattactgctcaacaaatcctaaaatggctctctgagatgcaagaagaggaagtagaaataagcctccctagatttaaagtagaacaaaaagtagacttcaaagacgttttgtattctttgaacataaccgagatatttagtggtggctgcgacctttctggaataacagattcatctgaagtgtatgtttcccaagtgacgcaaaaagttttctttgagataaatgaagatggtagtgaagctgcaacatcaactggcatacacatccctgtgatcatgagtctggctcaaagccaatttatagcaaatcatccatttctgtttattatgaagcataatccaacagaatcaattctgtttatgggaagagtgacaaatcctgacacccaggagataaaaggaagagatttagattcactgtgaatgaaaagcacagcctcagaataaaagatgatttctcaaaaatagctgattggcaaaatatcgtcatcttgacaatatttgctctatatcttatgtcttttctgttttaaactgtgcctgtagtaatagatatctgtcttgatgaataagtaaaattaggtatgcatttgtttc

SEQ ID NO: 260 - DNA, 4967 bp, Homo sapiens
  source 1..4967: mol_type = genomic DNA
cagctatcaaaaaggccataaggattttgtccccaaatttcacatgagctaccttgcttcaaactactgagatgaagggggcaagattatttgtccttctttctagtttatggagtgggggcattgggcttaacaacagtaagcattcttggactatacctgaggatgggaactctcagaagactatgccttctgcttcagttcctccaaataaaatacaaagtttgcaaatactgccaaccactcgggtcatgtcggcggagatagctacaactccagaggcaagaacttctgaagacagtcttcttaaatcaacactgcctccctcagaaacaagtgcacctgctgagggtgtgagaaatcaaactctcacatccacagagaaagcagaaggagtggtcaagttacagaatcttaccctcccaaccaacgctagcatcaagttcaatcctggagcagaatcagtggtcctttccaattctacactgaaatttcttcagagctttgccagaaagtcaaatgaacaagcaacttctctaaacacagttggaggcactggaggcattggaggcgttggaggcactggaggcgtgggaaatcgagccccacgggaaacatacctcagccggggtgacagcagttccagccaaagaactgactaccaaaaatcaaatttcgaaacaactagaggaaagaattggtgtgcttatgtacataccaggttatctcccacagtgatattggacaaccaggtcacttatgtcccaggtgggaaaggaccttgtggctggaccggtggatcctgtcctcagagatctcagaagatatccaatcctgtctataggatgcaacataaaattgtcacctcattggattggaggtgctgtcctggatacagtgggccgaaatgtcaactaagagcccaggaacagcaaagtttgatacacaccaaccaggctgaaagtcatacagctgttggcagaggagtagctgagcagcagcagcagcaaggctgtggtgacccagaagtgatgcaaaaaatgactgatcaggtgaactaccaggcaatgaaactgactcttctgcagaagaagattgacaatatttctttgactgtgaatgatgtaaggaacacttactcctccctagaaggaaaagtcagcgaagataaaagcagagaatttcaatctcttctaaaaggtctaaaatccaaaagcattaatgtactgataagagacatagtaagagaacaatttaaaatttttcaaaatgacatgcaagagactgtagcacagctcttcaagactgtatcaagtctatcagaggacctcgaaagcaccaggcaaataattcaaaaagttaatgaatctgtggtttcaatagcagcccagcaaaagtttgttttggtgcaagagaatcggcccactttgactgatatagtggaactaaggaatcacattgtgaatgtaaggcaagaaatgactcttacatgtgagaagcctattaaagaactagaagtaaagcagactcatttagaaggtgctctagaacaggaacactcaagaagcattctgtattatgaatccctcaataaaactctttctaaattgaaggaagtacatgagcagcttttatcaactgaacaggtatcagaccagaagaatgctccagctgctgagtcagttagcaataatgtcactgagtacatgtctactttacatgaaaatataaagaagcagagtttgatgatgctgcaaatgtttgaagatttgcacattcaagaaagcaagattaacaatctcaccgtctctttggagatggagaaagagtctctcagaggtgaatgtgaagacatgttatccaaatgcagaaatgattttaaatttcaacttaaggacacagaagagaatttacatgtgttaaatcaaacattggctgaagttctctttccaatggacaataagatggacaaaatgagtgagcaactaaatgatttgacttatgatatggagatccttcaacccttgcttgagcagggagcatcactcagacagacaatgacatatgaacaaccaaaggaagcaatagtgataaggaaaaagatagaaaatctgactagtgctgtcaatagtctaaattttattatcaaagaacttacaaaaagacacaacttacttagaaatgaagtacagggtcgtgatgatgccttagaaagacgtatcaatgaatatgccttagaaatggaagatggcctcaataagacaatgactattataaataatgctattgatttcattcaagataactatgccctaaaagagactttaagtactattaaggataatagtgagatccatcataaatgtacctccgatatggaaactattttgacatttattcctcagttccaccgtctgaatgattctattcagactttggtcaatgacaatcagagatataactttgttttgcaagtcgccaagacccttgcaggtattcccagagatgagaaactaaatcagtccaacttccaaaagatgtatcaaatgttcaatgaaaccacttcccaagtgagaaaataccagcaaaatatgagtcatttggaagaaaaactactcttaactaccaagatttccaaaaattttgagactcggttgcaagacattgagtctaaagttacccagacgctcataccttattatatttcagttaaaaaaggcagtgtagttacaaatgagagagatcaggctcttcaactgcaagtattaaattccagatttaaggcgttggaagcaaaatctatccatctttcaattaacttcttttcgcttaacaaaactctccacgaagttttaacaatgtgtcacaatgcttctacaagtgtgtcagaactgaatgctaccatccctaagtggataaaacattccctgccagatattcaacttcttcagaaaggtctaacagaatttgtggaaccaataattcaaataaaaactcaagctgccctatctaatttaacttgttgtatagatcgatcgttgcctggtagtctggcaaatgttgtcaagtctcagaagcaagtaaaatcattgccaaagaaaattaacgcacttaagaaaccaacggtaaatcttaccacagtcctgataggccggactcaaagaaacacggacaacataatatatcctgaggagtattcaagctgtagtcggcatccgtgccaaaatgggggcacgtgcataaatggaagaactagctttacctgtgcctgcagacatccttttactggtgacaactgcactatcaagcttgtggaagaaaatgctttagctccagatttttccaaaggatcttacagatatgcacccatggtggcattttttgcatctcatacgtatggaatgactatacctggtcctatcctgtttaataacttggatgtcaattatggagcttcatataccccaagaactggaaaatttagaattccgtatcttggagtatatgttttcaagtacaccatcgagtcatttagtgctcatatttctggatttttagtggttgatggaatagacaagcttgcatttgagtctgaaaatattaacagtgaaatacactgtgatagggttttaactggggatgccttattagaattaaattatgggcaggaagtctggttacgacttgcaaaaggaacaattccagccaagtttccccctgttactacatttagtggctatttattatatcgtacataagttagtatgaaaaacagactatcacctttattgagaaacagccagtgttttcatttatctttgcttgcacatctgctctgttttggtttttctacaggaaatgaaaatcaacttgtttttttaatatgagtaaacttgtatgtctattttataaaattatttgaatattgtttaatgtctgaatatgaaagagttcttgatcctaaagaaatttagtggcacagaaaacaaagtgaatttgttagcataattattcctattcttatttcttcattttaagtcattgcaatggaaagtaatattataaaatggtaattacaacatattatcagtcacagttttctttccaattaaacacttaacttttgttattccctgtatataaatatataacacacattttctagattcacaaatttaaataaattactcaaaaaatgaaaattgattttgtaaacttttatttttactctttacgttgagttgatcaattttccatactaagattttcattcagaatcaaaattaagaaagttggactgaaaatatgaaaaatgcttaactattgttctcttcctataattctctaattataacatagtaatttacatgtagttggacatgtacactcaagtctaagaatatatgagtggatcatttaccgccccccgccccacaacatctataaggggcaaaaagtctttttctaataagtattcttctatggtagtacctacagatctgcccttcttcttctaaagggtaagtcataatctgtgtaatactacaatttatgggatgctcactatgccctgtttctcttctaaacaatttacatgtaatgtctcattcctcacaataacccttgtaaagtgggcatgattaccatgatttttatagttgaagaacctaagacacagagaccaaggcccatgagctcatagggctgaggcaggatttggaatcaggccatgtcttctccagagcccacatccatcctttctctatattgcctcccacagatgtgctaaaatttatttaactaatcctttatcctctatttgtgttgtctcccattttttattattacaatattactgtggtgaacatgcttaaaaatacattccttggatatctgacaacgtgtttctgaaaaacagattttcataagtaataataaaaataataataaaaaagttttggtatggt

SEQ ID NO: 261 - DNA, 1860 bp, Homo sapiens
  source 1..1860: mol_type = genomic DNA
ggtcgggacgccgggctaggggcgcgtcatgtggccgctcacggtcccgccgccgctgctgctgctgctgtgctcaggcctggccggacagactctcttccagaacccagaagagggctggcagctgtacacctcagcccaggcccctgacgggaaatgcatctgcacggccgtgatcccagcgcagagtacctgctctcgagatggcaggagtcgggagctgcggcaactgatggagaaggtccagaacgtctcccagtccatggaggtccttgagttgcggacgtatcgcgacctccagtatgtacgcggcatggagaccctcatgcggagcctggatgcgcggctccgggcagctgatgggtccctctcggccaagagcttccaggagctgaaggacaggatgacggaactgttgcccctgagctcggtcctggagcagtacaaggcagacacgcggaccattgtacgcttgcgggaggaggtgaggaatctctccggcagtctggcggccattcaggaggagatgggtgcctacgggtatgaggacctgcagcaacgggtgatggccctggaggcccggctccacgcctgcgcccagaagctgggctgtgggaagctgaccggggtcagtaaccccatcaccgttcgggccatggggtcccgcttcggctcctggatgactgacacgatggcccccagtgcggatagccgggtctggtacatggatggctattacaaaggccgccgggtcctggagttccgtaccctgggagacttcatcaaaggccagaactttatccagcacctgctgccccagccgtgggcgggcacgggccacgtggtgtacaacggctccctgttctataacaagtaccagagcaacgtggtggtcaaataccacttccgctcgcgctctgtgctggtgcagaggagcctcccgggcgccggttacaacaacaccttcccctactcctggggcggcttctccgacatggacttcatggtggacgagagcgggctctgggctgtgtacaccaccaaccagaacgcgggcaacatcgtggtcagccggctggacccgcacaccctcgaggtcatgcggtcctgggacaccggctaccccaagcgcagcgctggcgaggccttcatgatctgcggtgtgctctacgtgaccaactcccacctggctggggccaaggtctacttcgcctattttaccaacacgtccagttacgagtacacggacgtgcccttccacaaccagtattcccacatctcgatgctggattacaacccccgggagcgcgccctctatacctggaacaacggccaccaggtgctctacaatgtcaccctgtttcacgtcatcagcacctctggggacccctgagccaatgctgtggctcgggctgctgcctggggggcctctgggggctgggggcccttttcattctgcctgtgtccctcaagggtgatctctctgtctctgtcacgccctttctccccgcctttttgctgggcttttgttctctgcctatgtatttctgtctattttttcaatttcccctcttctcctttattgatctctgcttttaatacaccacttctttctttctgcctttttatggatgtctttttctttttatggctctggttctccagttctttccgtctctgcctctctctgtctctctctctctgtccttccacccctccctccttgcttcccacccattcctcatccctcactcccacccccacccccacccccaggagttgagtgcatggatctgtttctttttttatttacactttttctttccggtttgccggaataaacaggacctttgacatttg

SEQ ID NO: 262 - DNA, 5353 bp, Homo sapiens
  source 1..5353: mol_type = genomic DNA
tttctccttccctccacgggccgggtgagaaagtagccgggggctatcccgacccggcggttcttggggagggggccgaacaagaaaagggaggagatggagataacttccccggatttagcttttttgtctttgtttttgttctcaccacttccatcggatgactggagagtaaaagggaacccggagcggggtggcgagcagcgctttgagaaaatgcaggagtgtgtttggagacgcgtaaagttgcctttcaagctctggcctccgggcacgcgatgctccgcggcgggctgactcagggctgccttgggcctccctgccaccctcctggaaatgatgcaagtcctgactgtcacctggatccctgcagcccagcctggaatgcgtctggattaggggaaagacgagaaacgacactccaggtgttgcacggcccaccaaagcgggaagatagggcagttgctcagaccaaatactgtatctagtgcttctgctcctatcttcaatcgtggggttctttttaatgcaaagtgtcacaaggccaggaattcccatgtgtgctcagttggcccacagcatcattgtgcctaggaaactgcttcaatttatcaagtcctctgggctgggaatctcactgaattccaaacggcggaaagaggaaactttcccaacccgatgtgggtgtgacgcgagccaggggccccagggacactgtcccagagcacaccgtccccctttaacagcaactggagcttggattcgctcttatattgtacagtcctttcgaccattgccctggagcacccgcacacgcgcacgcatctccggccgcgctcacacacactcatacacacgcacgcaaacgcgtggccgccgccaggtcggcaactttgtccggcgctcccagcggcgctcggcttcctcctgtagtagttgagcgcaggccccgcctcccggccgtgttgtcaaaagggccggggtctcggattggtccagccgccgggacaacacctgctcgactccttcattcaagtgacaccagagcttccagggatatttgaggcaccatccctgccattgccgggcactcgcggcgctgctaacggcctggtcacatgctctccggagagctacgggagggcgctgggtaacctctatccgagccgcggccgcgaggaggagggaaaaggcgagcaaaaaggaagagtgggaggaggaggggaagcggcgaaggaggaagaggaggaggaggaagaggggagcacaaaggatccaggtctcccgacgggaggttaataccaagaaccatgtgtgccgagcggctgggccagttcatgaccctggctttggtgttggccacctttgacccggcgcgggggaccgacgccaccaacccacccgagggtccccaagacaggagctcccagcagaaaggccgcctgtccctgcagaatacagcggagatccagcactgtttggtcaacgctggcgatgtggggtgtggcgtgtttgaatgtttcgagaacaactcttgtgagattcggggcttacatgggatttgcatgacttttctgcacaacgctggaaaatttgatgcccagggcaagtcattcatcaaagacgccttgaaatgtaaggcccacgctctgcggcacaggttcggctgcataagccggaagtgcccggccatcagggaaatggtgtcccagttgcagcgggaatgctacctcaagcacgacctgtgcgcggctgcccaggagaacacccgggtgatagtggagatgatccatttcaaggacttgctgctgcacgaaccctacgtggacctcgtgaacttgctgctgacctgtggggaggaggtgaaggaggccatcacccacagcgtgcaggttcagtgtgagcagaactggggaagcctgtgctccatcttgagcttctgcacctcggccatccagaagcctcccacggcgccccccgagcgccagccccaggtggacagaaccaagctctccagggcccaccacggggaagcaggacatcacctcccagagcccagcagtagggagactggccgaggtgccaagggtgagcgaggtagcaagagccacccaaacgcccatgcccgaggcagagtcgggggccttggggctcagggaccttccggaagcagcgagtgggaagacgaacagtctgagtattctgatatccggaggtgaaatgaaaggcctggccacgaaatctttcctccacgccgtccattttcttatctatggacattccaaaacatttaccattagagaggggggatgtcacacgcaggattctgtggggactgtggacttcatcgaggtgtgtgttcgcggaacggacaggtgagatggagacccctggggccgtggggtctcaggggtgcctggtgaattctgcacttacacgtactcaagggagcgcgcccgcgttatcctcgtacctttgtcttctttccatctgtggagtcagtgggtgtcggccgctctgttgtgggggaggtgaaccagggaggggcagggcaaggcagggcccccagagctgggccacacagtgggtgctgggcctcgccccgaagcttctggtgcagcagcctctggtgctgtctccgcggaagtcagggcggctggattccaggacaggagtgaatgtaaaaataaatatcgcttagaatgcaggagaagggtggagaggaggcaggggccgagggggtgcttggtgccaaactgaaattcagtttcttgtgtggggccttgcggttcagagctcttggcgagggtggagggaggagtgtcatttctatgtgtaatttctgagccattgtactgtctgggctgggggggacactgtccaagggagtggcccctatgagtttatattttaaccactgcttcaaatctcgatttcactttttttatttatccagttatatctacatatctgtcatctaaataaatggctttcaaacaaagcaactgggtcattaaaaccagctcaaagggggtttaaaaaaaaaaaaccagcccatcctttgaggctgatttttcttttttttaagttctattttaaaagctatcaaacagcgacatagccatacatctgactgcctgacatggactcctgcccacttgggggaaaccttatacccagaggaaaatacacacctggggagtacatttgacaaatttcccttaggatttcgttatctcaccttgaccctcagccaagattggtaaagctgcgtcctggcgattccaggagacccagctggaaacctggcttctccatgtgaggggatgggaaaggaaagaagagaatgaagactacttagtaattcccatcaggaaatgctgaccttttacataaaatcaaggagactgctgaaaatctctaagggacaggattttccagatcctaattggaaatttagcaataaggagaggagtccaaggggacaaataaaggcagagagaagagacagaactaaaaatacgaggaaaggagagtgaggattttcattaaaagtctcagcagtgggtttcttgggttatttaaaacatcacctaaataggccttttcttcctaattggccatcaaattaaagcctatcctttctcaagcaggagctggtattgtagggagtggccgggtattctgggctgggctcttctggagtagggggtcagcaaacattgtctgcaaagggccagatactgaatccagtactttcagtttggcgagccgtgaggtctctgtcgaaactactcaactctgccgtcctagcacaaaagcagccatagacaacacacaaacgagagggcttggctcccttccaggaagatttatttaacaggctcccagctgaatttcactcacaggacacagtttactgatctctgttctagtgagtgggtcaaaaagcatatgcatccttatccgtcaactcatcagctcttcctcaaggcaacctgaggccagacaccaagaaaccaagcgtatctgctctaaaatgacttgttcctggggaatgccttcaaccaaaacacagctagtatttctatgccccaaatccaatcccagtctttcatgatccatgccggcggttgggtggggaggggaatcattggttgggggaagggaggaaaccccacctccagcccccgccaccgggctccctgggcacccagcaagatctggggctgcagagaacagaagagctggtgcacttaatccagctctgcccttggggggaggaggacctgtgtgtcaggctctgccatgggaacgagtgtaaaccgtggctgtctcctgcagtgagccaccgcggcaggcacgttgactgttttactgacatcactcaaaagctaaagcaataacattctcctgcgttgctgagtcagctgttcatttgtccgccagctcctggactggatgtgtgaaaggcatcacatttccattttcctccgtgtaaatgttttatgtgttcgcctactgatcccattcgttgcttctattgtaaatatttgtcatttgtatttattatctctgtgttttccccctaaggcataaaatggtttactgtgttcatttgaacccatttactgatctctgttgtatatttttcatgccactgctttgttttctcctcagaagtcgggtagatagcatttctatcccatccctcacgttattggaagcatgcaacagtatttattgctcagggtcttctgcttaaaactgaggaaggtccacattcctgcaagcattgattgagacatttgcacaatctaaaatgtaagcaaagtagtcattaaaaatacaccctctacttgggctttatactgcatacaaatttactcatgagccttcctttgaggaaggatgtggatctccaaataaagatttagtgtttattttgagctctgcatcttaacaagatgatctgaacacctctcctttgtatcaataaatagccctgttattctgaagtgagaggaccaagtatagtaaaatgctgacatctaaaactaaataaatagaaaacaccaggccagaactatagtcatactcacacaaagggagaaatttaaactcgaaccaagcaaaaggcttcacggaaatagcatggaaaaacaatgcttccagtggccacttcctaaggaggaacaaccccgtctgatctcagaattggcaccacgtgagcttgctaagtgataatatctgtttctactacggatttaggcaacaggacctgtacattgtcacattgcattatttttcttcaagcgttaataaaagttttaaataaatggcttccacttga

SEQ ID NO: 263 - DNA, 5419 bp, Homo sapiens
  source 1..5419: mol_type = genomic DNA
tcacgggctccggtcccggcggcagaaatagggcagccgcggcggcggtggcacagcagcgggcagcggcggctcagggagctggagcctcaacagcctccagcgagcccgggacccgccgacagcccgagaaaccagccgaaggacgcggggcggggtcgccgccgccgccacggggtgctccctccctcccgcccaagtccggccacctggtcttcccctcggccccggccgtctcagactcatcaaaatgaaaccaggaggcttttggctgcatctcacactgctcggagcctccctgccggctgcgctgggatggatggacccaggaaccagcagaggcccggatgtgggtgtgggggagtcacaggcagaggagcccagaagctttgaagtcacaagaagagaagggctttccagccacaacgagctgctggcctcctgcgggaagaagttctgcagccgagggagccggtgcgtgctcagcaggaagacaggggagcccgaatgccagtgcctggaggcatgcaggcccagctacgtgcctgtgtgcggctctgatgggaggttttatgaaaaccactgtaagctccaccgtgctgcttgcctcctgggaaagaggatcaccgtcatccacagcaaggactgtttcctcaaaggtgacacgtgcaccatggccggctacgcccgcttgaagaatgtccttctggcactccagacccgtctgcagccactccaagaaggagacagcagacaagaccctgcctcccagaagcgcctcctggtggaatctctgttcagggacttagatgcagatggcaatggccacctcagcagctccgaactggctcagcatgtgctgaagaagcaggacctggatgaagacttacttggttgctcaccaggtgacctcctccgatttgacgattacaacagtgacagctccctgaccctccgcgagttctacatggccttccaagtggttcagctcagcctcgcccccgaggacagggtcagtgtgaccacagtgaccgtggggctgagcacagtgctgacctgcgccgtccatggagacctgaggccaccaatcatctggaagcgcaacgggctcaccctgaacttcctggacttggaagacatcaatgactttggagaggatgattccctgtacatcaccaaggtgaccaccatccacatgggcaattacacctgccatgcttccggccacgagcagctgttccagacccacgtcctgcaggtgaatgtgccgccagtcatccgtgtctatccagagagccaggcacaggagcctggagtggcagccagcctaagatgccatgctgagggcattcccatgcccagaatcacttggctgaaaaacggcgtggatgtctcaactcagatgtccaaacagctctcccttttagccaatgggagcgaactccacatcagcagtgttcggtatgaagacacaggggcatacacctgcattgccaaaaatgaagtgggtgtggatgaagatatctcctcgctcttcattgaagactcagctagaaagacccttgcaaacatcctgtggcgagaggaaggcctcagcgtgggaaacatgttctatgtcttctccgacgacggtatcatcgtcatccatcctgtggactgtgagatccagaggcacctcaaacccacggaaaagattttcatgagctatgaagaaatctgtcctcaaagagaaaaaaatgcaacccagccctgccagtgggtatctgcagtcaatgtccggaaccggtacatctatgtggcccagccagcactgagcagagtccttgtggtcgacatccaagcccagaaagtcctacagtccataggtgtggaccctctgccggctaagctgtcctatgacaagtcacatgaccaagtgtgggtcctgagctggggggacgtgcacaagtcccgaccaagtctccaggtgatcacagaagccagcaccggccagagccagcacctcatccgcacaccctttgcaggagtggatgatttcttcattcccccaacaaacctcatcatcaaccacatcaggtttggcttcatcttcaacaagtctgatcctgcagtccacaaggtggacctggaaacaatgatgcccctcaagaccatcggcctgcaccaccatggctgcgtgccccaggccatggcacacacccacctgggcggctacttcttcatccagtgccgacaggacagccccgcctctgctgcccgacagctgctcgttgacagtgtcacagactctgtgcttggccccaatggtgatgtaacaggcaccccacacacatcccccgacgggcgcttcatagtcagtgctgcagctgacagcccctggctgcacgtgcaggagatcacagtgcggggcgagatccagaccctgtatgacctgcaaataaactcgggcatctcagacttggccttccagcgctccttcactgaaagcaatcaatacaacatctacgcggctctgcacacggagccggacctgctgttcctggagctgtccacggggaaggtgggcatgctgaagaacttaaaggagccacccgcagggccagctcagccctgggggggtacccacagaatcatgagggacagtgggctgtttggacagtacctcctcacaccagcccgagagtcactgttcctcatcaatgggagacaaaacacgctgcggtgtgaggtgtcaggtataaagggggggaccacagtggtgtgggtgggtgaggtatgaagggcccagagcagagccctgggccaaggaacaccccctagtcctgacactgcagcctcaagcaggtacgctgtacatttttacagacaaaagcaaaaacctgtactcgctttgtggttcaacactggtctccttgcaagtttcctagtataaggtatgcgctgctaccaagattggggttttttcgttaggaagtatgatttatgccttgagctacgatgagaacatatgctgctgtgtaaagggatcatttctgtgccaagctgcacaccgagtgacctggggacatcatggaaccaagggatcctgctctccaagcagacacctctgtcagttgccttcacatagtcattgtcccttactgccagacccagccagactttgccctgacggagtggcccggaagcagaggctgaccaggagcaggggcctccctcccgaactgaaagcccatccgtcctcgcgtgggaccgcatcttctccctcgcagctgcttcttgcttttctttccatttgacttgctgtaagcctgagggagagccaacaagacttactgcatcttgggggatggggaaatcactcactttattttggaaatttttgattaaaaaaaaattttataatctcaaatgctagtaagcagaaagatgctctccgaggtccaactatatccttccctgccttaggccgagtctcgggggtggtcacaaccccacatcccacagccagaaagaacaatggtcatctgagaatactggccctgtcgactattgccaccctgcttctccaagagcagaccaggccacctcatccgtaaggactcggttctgtgttgggaccccaaaaaaccagaacaagttctgtgtgcctcctttcagcacagaagggagacatctcattagtcaggtctggtaccccagattcagggcagactgggcttgcctggcaaggtatgggtggcctccaggctcaatgcagaaaccccaaggacacgagtggggccaggtgagttcctgaagctataccttttcaaaacagattttgttttcctacctgtggcccatccactcctctctggtaccccatccccgcatcagcactgcagagagaacacatttcggcgagggttttcttacccacattccccaatcaatacacacacactgcagaacccagaacagaaggccacaggctggcactactgcattctccttatgtgtctcaggctgtggtgactctcacatgggcatcgaagaagtacaacccacatagccctctggagaccgcctagatcagagactcagcaaaaacaggctcgccttccctctcccacatatgagtggaacttacatgtgtcctggtttgaatgatcattttgcaagccacacgggttgggagaggtggtctcaccacagacgtctttgctaatttggccaccttcacctactgacatgaccaggattttcctttgccattaaggaatgaactctttcaaggagaggaaaccctagactctgtgtcactctcaacacacacagctcctttcactcctgcctgactgccaagccacctgcatcccccgccccagatctcatgagatcaatcacttgtatgtctcacgcaacttggtccaccaaacgcctgtcccctgtaactcctaggggtgcgcctagacaggtacgtctgttttttattttaaaagatatgctatgtagatataagttgaggaagctcacctcaaaagcctagaatgcagtttcacagtagctgggatgcatggatgacccatctcacccctttttttttcctgcctcaatatcttgatatgttatgtttactcccaatctcccatttttaccactaaaattctccaactttcataaacttttttttggaaaaatttccattgtatcagcccctgacagaaaaaggatctctgagcctaaaggaggaaaagtcccaccaactaccagaccagaacacgagcccctctgggcagcaggattcctaagtcaaagaccagtttgacccaaactggccttttaaaataatcaggagtgacagagtcaacttctgcagcacctgcttctcccccactgtcccttccatcttggaatgtgtctaaaaaagcatagctgccctttgctgtcctcagagtgcatttcctggagacggcaggcttaggtctcactgacagcatgccagacacaactgaatcgaagcaggcctgaagcctaggtcagggtttcaggagtccagccccaggaggcaaagtcaccaatgcagggaggtaaatgccttttggcaggaaaaccaatagagttggttgggtggggagtcaggggtgggaggagaaggaggaagaggaggaaggccagactggcctgccctttctcccatacttcaccccagcagaggttcatgggacacagttggaaagccactgggaggaaatgcctcactacaggggggcctcctgtagcaagcccagccggtaatcctcctaatgaacccacaaggtcaattcacaactgatatcttagctattaaagaagtactgactttaccaaaagaatcatcaagaaagctatttatataaaccccctcagtcattttgaaataaaattaattttacaaaaa

SEQ ID NO: 264 - DNA, 5174 bp, Homo sapiens
  source 1..5174: mol_type = genomic DNA
ggactgcgaaaggagcagggttgcggagctagggctccagcctgcggccgcgcattcttgcgtctggccagccgcgagctctaagggtcggccccgcccggtccgcccccgcggctccctgccaggctctcgcgggcgcgctcggggtggggcctcgcggctggcggagatgcggccggggctgcgcggtggtgatgcgagcctgcagggcggcgcgccggggcagccggagccgcgcgccgcggcgctgtaatcggacaccaagagcgctcgcccccggcctccggccactttccattcactccgaggtgcttgattgagcgacgcggagaagagctccgggtgccgcggcactgcagcgctgagattcctttacaaagaaactcagaggaccgggaagaaagaatttcacctttgcgacgtgctagaaaataaggtcgtctgggaaaaggactggagacacaagcgcatccaaccccggtagcaaactgatgacttttccgtgctgatttctttcaacctcggtattttcccttggatattaacttgcatatctgaagaaatggcattccggacaatttgcgtgttggttggagtatttatttgttctatctgtgtgaaaggatcttcccagccccaagcaagagtttatttaacatttgatgaacttcgagaaaccaagacctctgaatacttcagcctttcccaccatcctttagactacaggattttattaatggatgaagatcaggaccggatatatgtgggaagcaaagatcacattctttccctgaatattaacaatataagtcaagaagctttgagtgttttctggccagcatctacaatcaaagttgaagaatgcaaaatggctggcaaagatcccacacacggctgtgggaactttgtccgtgtaattcagactttcaatcgcacacatttgtatgtctgtgggagtggcgctttcagtcctgtctgtacttacttgaacagagggaggagatcagaggaccaagttttcatgattgactccaagtgtgaatctggaaaaggacgctgctctttcaaccccaacgtgaacacggtgtctgttatgatcaatgaggagcttttctctggaatgtatatagatttcatggggacagatgctgctatttttcgaagtttaaccaagaggaatgcggtcagaactgatcaacataattccaaatggctaagtgaacctatgtttgtagatgcacatgtcatcccagatggtactgatccaaatgatgctaaggtgtacttcttcttcaaagaaaaactgactgacaataacaggagcacgaaacagattcattccatgattgctcgaatatgtcctaatgacactggtggactgcgtagccttgtcaacaagtggaccactttcttaaaggcgaggctggtgtgctcggtaacagatgaagacggcccagaaacacactttgatgaattagaggatgtgtttctgctggaaactgataacccgaggacaacactagtgtatggcatttttacaacatcaagctcagttttcaaaggatcagccgtgtgtgtgtatcatttatctgatatacagactgtgtttaatgggccttttgcccacaaagaagggcccaatcatcagctgatttcctatcagggcagaattccatatcctcgccctggaacttgtccaggaggagcatttacacccaatatgcgaaccaccaaggagttcccagatgatgttgtcacttttattcggaaccatcctctcatgtacaattccatctacccaatccacaaaaggcctttgattgttcgtattggcactgactacaagtatacaaagatagctgtggatcgagtgaacgctgctgatgggagataccatgtcctgtttctcggaacagatcggggtactgtgcaaaaagtggttgttcttcctactaacaactctgtcagtggcgagctcattctggaggagctggaagtctttaagaatcatgctcctataacaacaatgaaaatttcatctaaaaagcaacagttgtatgtgagttccaatgaaggggtttcccaggtatctctgcaccgctgccacatctatggtacagcctgtgctgactgctgcctggcgcgggacccttattgcgcctgggatggccattcctgttccagattctacccaactgggaaacggaggagccgaagacaagatgtgagacatggaaacccactgactcaatgcagaggatttaatctaaaagcatacagaaatgcagctgaaattgtccagtatggagtaaaaaataacaccacttttctggagtgtgcccccaagtctccgcaggcatctatcaagtggctgttacagaaagacaaagacaggaggaaagaggttaagctgaatgaacgaataatagccacttcacagggactcctgatccgctctgttcagggttctgaccaaggactttatcactgcattgctacagaaaatagtttcaagcagaccatagccaagatcaacttcaaagttttagattcagaaatggtggctgttgtgacggacaaatggtccccatggacctgggccagctctgtgagggctttacccttccacccgaaggacatcatgggggcattcagccactcagaaatgcagatgattaaccaatattgcaaagacactcggcagcaacatcagcagggagatgaatcacagaaaatgagaggggactatggcaagttaaaggccctcatcaatagtcggaaaagtagaaacaggaggaatcagttgccagagtcataatattttcttatgtgggtcttatgcttccattaacaaatgctctgtcttcaatgatcaaattttgagcaaagaaacttgtgctttaccaaggggaattactgaaaaaggtgattactcctgaagtgagttttacacgaactgaaatgagcatgcattttcttgtatgatagtgactagcactagacatgtcatggtcctcatggtgcatataaatatatttaacttaacccagattttatttatatctttattcaccttttcttcaaaatcgatatggtggctgcaaaactagaattgttgcatccctcaattgaatgagggccatatccctgtggtattcctttcctgctttggggctttagaattctaattgtcagtgattttgtatatgaaaacaagttccaaatccacagcttttacgtagtaaaagtcataaatgcatatgacagaatggctatcaaaagaaatagaaaaggaagacagcatttaaagttgtataaaaacatgagttattcataaagagaaaatgatgagtttttatggttccaatgaaatatgttggggtttttttaagattgtaaaaataatcagttactggtatctgtcactgacctttgtttccttattcaggaagataaaaatcagtaacctaccccatgaagatatttggtgggagttatatcagtgaagcagtttggtttatattcttatgttatcaccttccaaacaaaagcacttactttttttggaagttatttattttagactcaaagaatataatctggcactactcagttattactgtttgttctcttattccctagtctgtgtggcaaattaaacaatataagaaggaaaaatttgaagtattagacttctaaataaggtgtgaaatcatcaaaaagaaaaatcaaagtagaaactactaattttttaagaggaatttataacaaatatggctagttttcaacttcagtactcaaattcaatgattcttccttttattaaaaccagtctcagatatcatactgatttttaagtcaacactatatattttatgatcttttcagtgtgatggcaaggtgcttgttatgtctagaaagtaagaaaacaatatgaggagacattctgtctttcaaaaggtaatggtacatacgttcactggtctctaagtgtaaaagtagtaaattttgtgatgaataaaataattatctcctaattgtatgttagaataattttattagaataatttcatactgaaattattttctccaaataaaaattagatggaaaaatgtgaaaaaaattattcatgctctcatatatattttaaaaacactacttttgcttttttatttaccttttaagacattttcatgcttccaggtaaaaacagatattgtaccatgtacctaatccaaatatcatataaacattttatttatagttaataatctatgatgaaggtaattaaagtagattatggcctttttaagtattgcagtctaaaacttcaaaaactaaaatcattgtcaaaattaatatgattattaatcagaatatcagaatatgattcactatttaaactatgataaattatgataatatatgaggaggcctcgctatagcaaaaatagttaaaatgctgacataacaccaaacttcattttttaaaaaatctgttgttccaaatgtgtataattttaaagtaatttctaaagcagtttattataatggtttgcctgcttaaaaggtataattaaacttcttttctcttctacattgacacacagaaatgtgtcaatgtaaagccaaaaccatcttctgtgtttatggccaatctattctcaaagttaaaagtaaaattgtttcagagtcacagttccctttatttcacataagcccaaactgatagacagtaacggtgtttagttttatactatatttgtgctatttaattctttctattttcacaattattaaattgtgtacactttcattacttttaaaaatgtagaaattcttcatgaacataactctgctgaatgtaaaagaaaattttttttcaaaaatgctgttaatgtatactactggtggttgattggttttattttatgtagcttgacaattcagtgacttaatatctattccatttgtattgtacataaaattttctagaaatacacttttttccaaagtgtaagtttgtgaatagattttagcatgatgaaactgtcataatggtgaatgttcaatctgtgtaagaaaacaaactaaatgtagttgtcacactaaaatttaattggatattgatgaaatcattggcctggcaaaataaaacatgttgaattcccca

SEQ ID NO: 265 - DNA, 5659 bp, Homo sapiens
  source 1..5659: mol_type = genomic DNA
aagcaccactgcagcagaccttgttaattttttttttttttctttccacacaacagttgtgcctcattatccggtgcctggctcggaatttttttttttttttttctttttggagggtttgaagtttctgtgcttcagtgactgttacagaagaagaggtgttagtgttgccatgaggtcttgattgtctgcatttatgaatgaaactgacctaaatcacctgttacctccagtttccagattgtttgaacttctctggccgcacaatacaggaaggaagactaaagcagcaaagggacctacagcgtctgcagcatgggctggttaactaggattgtctgtcttttctggggagtattacttacagcaagagcaaactatcagaatgggaagaacaatgtgccaaggctgaaattatcctacaaagaaatgttggaatccaacaatgtgatcactttcaatggcttggccaacagctccagttatcataccttccttttggatgaggaacggagtaggctgtatgttggagcaaaggatcacatattttcattcgacctggttaatatcaaggattttcaaaagattgtgtggccagtatcttacaccagaagagatgaatgcaagtgggctggaaaagacatcctgaaagaatgtgctaatttcatcaaggtacttaaggcatataatcagactcacttgtacgcctgtggaacgggggcttttcatccaatttgcacctacattgaaattggacatcatcctgaggacaatatttttaagctggagaactcacattttgaaaacggccgtgggaagagtccatatgaccctaagctgctgacagcatcccttttaatagatggagaattatactctggaactgcagctgattttatggggcgagactttgctatcttccgaactcttgggcaccaccacccaatcaggacagagcagcatgattccaggtggctcaatgatccaaagttcattagtgcccacctcatctcagagagtgacaatcctgaagatgacaaagtatactttttcttccgtgaaaatgcaatagatggagaacactctggaaaagctactcacgctagaataggtcagatatgcaagaatgactttggagggcacagaagtctggtgaataaatggacaacattcctcaaagctcgtctgatttgctcagtgccaggtccaaatggcattgacactcattttgatgaactgcaggatgtattcctaatgaactttaaagatcctaaaaatccagttgtatatggagtgtttacgacttccagtaacattttcaagggatcagccgtgtgtatgtatagcatgagtgatgtgagaagggtgttccttggtccatatgcccacagggatggacccaactatcaatgggtgccttatcaaggaagagtcccctatccacggccaggaacttgtcccagcaaaacatttggtggttttgactctacaaaggaccttcctgatgatgttataacctttgcaagaagtcatccagccatgtacaatccagtgtttcctatgaacaatcgcccaatagtgatcaaaacggatgtaaattatcaatttacacaaattgtcgtagaccgagtggatgcagaagatggacagtatgatgttatgtttatcggaacagatgttgggaccgttcttaaagtagtttcaattcctaaggagacttggtatgatttagaagaggttctgctggaagaaatgacagtttttcgggaaccgactgctatttcagcaatggagctttccactaagcagcaacaactatatattggttcaacggctggggttgcccagctccctttacaccggtgtgatatttacgggaaagcgtgtgctgagtgttgcctcgcccgagacccttactgtgcttgggatggttctgcatgttctcgctattttcccactgcaaagagacgcacaagacgacaagatataagaaatggagacccactgactcactgttcagacttacaccatgataatcaccatggccacagccctgaagagagaatcatctatggtgtagagaatagtagcacatttttggaatgcagtccgaagtcgcagagagcgctggtctattggcaattccagaggcgaaatgaagagcgaaaagaagagatcagagtggatgatcatatcatcaggacagatcaaggccttctgctacgtagtctacaacagaaggattcaggcaattacctctgccatgcggtggaacatgggttcatacaaactcttcttaaggtaaccctggaagtcattgacacagagcatttggaagaacttcttcataaagatgatgatggagatggctctaagaccaaagaaatgtccaatagcatgacacctagccagaaggtctggtacagagacttcatgcagctcatcaaccaccccaatctcaacacaatggatgagttctgtgaacaagtttggaaaagggaccgaaaacaacgtcggcaaaggccaggacataccccagggaacagtaacaaatggaagcacttacaagaaaataagaaaggtagaaacaggaggacccacgaatttgagagggcacccaggagtgtctgagctgcattacctctagaaacctcaaacaagtagaaacttgcctagacaataactggaaaaacaaatgcaatatacatgaacttttttcatggcattatgtggatgtttacaatggtgggaaattcagctgagttccaccaattataaattaaatccatgagtaactttcctaataggctttttttcctaataccaccacctaacagagaacacaggtgaatgcagatgttcactttagcagacttaatgtttcctatgagatttcactgtacaggtttgtctttcttctttgcctgagaaataaaaatgtcatttgccatattgccatctaaaggagaaaaactgcatcagcaaagccattgtattgaactaaaagtttaaaatgaactgcatggatttactaagctgatgaatattccaaaacgtggttggattcaaggatatattttgtctaccggccctcatgtttgtatgtacttgaggagtaaaatgagtaaaatgatactgaatgaaatgttctgtggaaatattaaaaaaaaaaaaaaacataagccatccatcatccagaagaaaaatggaatacactgatctactactgatgtcttctttcagctttgatctaaagatgtattttattaaaactataatttaaatgtaccatgaaaaatatgcagtaaaaattagttgttttctaagctagagtaggatttgtcttacaattattgtgctatgtagtttttgttttaaaaattccaatggtgtgctgctttctttggacattttattttcaattctataagagggatagatgacattgttctagaaacacatatacatcattaagagtgaatctctaaaaccaggatataaattatgctttatttctctgagaaaatcaaacaaatggaagctgttcacacctccccttctttaagcattatctaaattaatttttacttgcataatgttcttagaaaaaaaaacagaacatttaagcaggaaaaaaggaagaaacaagttgatttttaagtgcattttactataatgaatcaatgaagggaaaaggaactgcatatttcatgaaaataataagcattgtcttaatatactgttaatagaaaatgtgtcttaattccgtgcttgaatccctgcatgatatttgagactaagatctctcttatgattctaccaagaattatatctgtgtcacttaatttttttaaaagagagagatcaataactattcagagcaacatgttaaaggcaaagtttccaatcatttacatctgtatcaggtgcctcttacctttccttatttaagacaattatttgtacaagaaacacatgactcttttcatatcaatgggagggacttttctacaaagtattttccaggatgcaacccacatttaaacaatgtaaaattctttgtttcctgcaacaacttacaaaataaggtaaaagactaaaattcaagatttgcttccttcattgtcctaagacgattcgttgagaatcactgactttgagatatttaaaactttcagcattatactgtggtttcttttgcactgcactcacctattcaggactcctcccccaggttcctcatcatgcacaaaaatgcaaagaaaacatcttattagtaattaatgaagcaacattgaaattctaactctagctgtctttggattctaattaactcagcatcaatttctcacctcagactacagtgaatttttatttcctatcagctgaaatatttcacagatggaagctcatgtttcagttttaatgactgccttgaataaacaagttgttgccacttgtttcaaacaaaagcctaaaaataatctacattcaattttaggctccattgactaatatggtgttgcttttggaagtactgtatatcctcacatggaagccaaattgttaaattatttgaaggacacaccactgtacagaaagtagtgtttcaaatataaatcgaagaacaaagagtgctccaaaaaataggtcattcttttattttcataaagtatctaaactgtactaacattcagtgttgtgtttcattctaaatttgcagctgaaataaatttatttgcgatagcagaaatatcttattattcatcctcagaaataaaggatttgaagggatagagattatatgataaatttatagaagactttcagaatttgaatgcattttgtttagtgttatgaaatgacaatagaaaaaagtctcgacttcaattaaaagttacacaaacaaacaaatctacaggcatgtctttatataccatcaggtctaagttttcaaagaaaattgtagatataacttgcagataactcattacagtcataatctctgcccatgtgtattgagagggggcagtttgcacgaaaaagaattattggcccatttaataattcagctttaaatagactttgtcatatgcatgaatcatcagagatgaaactgtttgagagactcatgtgaccttacgaaaattacaacagcagtcttaaagtatgaaaaagatgcatcacagcagagacattatggcccagttgatatcaaatgtaaaatgtaaatgcatgtaaatgcacacttcattttatgtattatttagtaatttgcagtggtatgtgtttaatatttttgctacctacacattaggcaaaaaaaagatgtaaataatttgggagaaaaagaggaagaacagtgtaaaataaaactttctataagtactccatttcaatgtgttcaacatcatcctaaaaggcaagattttcccacgcaggtgacaaggtggtttatgtactatttaagggcggaaggtgcgtgcccgttcaataagcatgttttttgccaggtaggaaatatgttccatatctttacttatcattgcatttcagatgggaactagaaaaactggagagaaaaatgtaatgaaactgctgctgtaaattattccttttagcatgtattcacttgctaaatacacatttcttcaaaata

SEQ ID NO: 266 - DNA, 7925 bp, Homo sapiens
  source 1..7925: mol_type = genomic DNA
gggagacgcaggcggcgaaacggcagaggagccgagccccctccgcccaaggcgccctccctccgtccgcgcacaggcgccgtcgcttggaggagcaaggtgcctcccagcccgcaggggcgccgcgcgcaagcccgcgggctcttcggtggctctgccccgggactgcacctggaggcggccccggacggggatggtcagcggctgctgccgtctggctcgcgagcgggacgctgtgagggcaccatggcgctgactcccgggtgggggtcctcggcggggccggtccggccggagctctggctgctgctgtgggcagccgcgtggcgcctgggtgcctcggcgtgccccgccctctgcacctgcaccggaaccacggtggactgccacggcacggggctgcaggccattcccaagaatatacctcggaacaccgagcgcctggaactcaatggcaacaacatcactcggatccataagaatgactttgcggggctcaagcagctgcgggtgctgcagctgatggagaaccagattggagcagtggaacgtggtgcttttgatgacatgaaggagctggagcggctgcgactgaaccgaaaccagctgcacatgttaccggaactgctgttccagaacaaccaggctttgtcaagactggacttgagtgagaacgccatccaggccatccccaggaaagcttttcggggagctacggaccttaaaaatttacagctggacaagaaccagatcagctgcattgaggaaggggccttccgtgctctgcgggggctggaggtgctgaccctgaacaacaacaatatcaccaccatccccgtgtccagcttcaaccatatgcccaagctacggaccttccgcctgcactccaaccacctgttttgcgactgccacctggcctggctctcgcagtggctgaggcagcggccaaccatcgggctcttcacccagtgctcgggcccagccagcctgcgtggcctcaatgtggcagaggtccagaagagtgagttcagctgctcaggccagggagaagcggggcgcgtgcccacctgcaccctgtcctccggctcctgcccggccatgtgcacctgcagcaatggcatcgtggactgtcgtggaaaaggcctcactgccatcccggccaacctgcccgagaccatgacggagatacgcctggagctgaacggcatcaagtccatccctcctggagccttctcaccctacagaaagctacggaggatagacctgagcaacaatcagatcgctgagattgcacccgacgccttccagggcctccgctccctgaactcgctggtcctctatggaaacaagatcacagacctcccccgtggtgtgtttggaggcctatacaccctacagctcctgctcctgaatgccaacaagatcaactgcatccggcccgatgccttccaggacctgcagaacctctcactgctctccctgtatgacaacaagatccagagcctcgccaagggcactttcacctccctgcgggccatccagactctgcacctggcgcagaaccctttcatttgcgactgtaacctcaagtggctggcagacttcctgcgcaccaatcccatcgagacgagtggtgcccgctgtgccagtccccggcgcctcgccaacaagcgcatcgggcagatcaagagcaagaagttccggtgctcagccaaagagcagtacttcattccaggcacggaggattaccagctgaacagcgagtgcaacagcgacgtggtctgtccccacaagtgccgctgtgaggccaacgtggtggagtgctccagcctgaagctcaccaagatccctgagcgcatcccccagtccacggcagaactgcgattgaataacaatgagatttccatcctggaggccactgggatgtttaaaaaacttacacatctgaagaaaatcaatctgagcaacaacaaggtgtcagaaattgaagatggggccttcgagggcgcagcctctgtgagcgagctgcacctaactgccaaccagctggagtccatccggagcggcatgttccggggtctggatggcttgaggaccctaatgctgcggaacaaccgcatcagctgcatccacaacgacagcttcacgggcctgcgcaacgtccggctcctctcgctctacgacaaccagatcaccaccgtatccccaggagccttcgacaccctccagtccctctccacactgaatctcctggccaaccctttcaactgcaactgccagctggcctggctaggaggctggctacggaagcgcaagatcgtgacggggaacccgcgatgccagaaccctgactttttgcggcagattcccctgcaggacgtggccttccctgacttcaggtgtgaggaaggccaggaggaggggggctgcctgccccgcccacagtgcccacaggagtgcgcctgcctggacaccgtggtccgatgcagcaacaagcacctgcgggccctgcccaagggcattcccaagaatgtcacagaactctatttggacgggaaccagttcacgctggttccgggacagctgtctaccttcaagtacctgcagctcgtggacctgagcaacaacaagatcagttccttaagcaattcctccttcaccaacatgagccagctgaccactctgatcctcagctacaatgccctgcagtgcatcccgcctttggccttccagggactccgctccctgcgcctgctgtctctccacggcaatgacatctccaccctccaagagggcatctttgcagacgtgacctccctgtctcacctggccattggtgccaaccccctatactgtgactgccacctccgctggctgtccagctgggtgaagactggctacaaggaaccgggcattgctcgttgtgctgggccccaggacatggagggcaagctgctcctcaccacgcctgccaagaagtttgaatgccaaggtcctccaacgctggctgtccaggccaagtgtgatctctgcttgtccagtccgtgccagaaccagggcacctgccacaacgacccccttgaggtgtacaggtgcgcctgccccagcggctataagggtcgagactgtgaggtgtccctggacagctgttccagtggcccctgtgaaaatgggggcacctgccatgcacaggagggcgaggatgccccgttcacgtgctcctgtcccaccggctttgaaggaccaacctgtggggtgaacacagatgactgtgtggatcatgcctgtgccaatgggggcgtctgtgtggatggtgtgggcaactacacctgccagtgccccctgcagtatgagggaaaggcctgtgagcagctggtggacttgtgctctccggatctgaacccatgtcaacacgaggcccagtgtgtgggcaccccggatgggcccaggtgtgagtgcatgccaggttatgcaggtgacaactgcagtgagaaccaggatgactgcagggaccaccgctgccagaatggggcccagtgtatggatgaagtcaacagctactcctgcctctgtgctgagggctacagtggacagctctgtgagatccctccccatctgcctgcccccaagagcccctgtgaggggactgagtgccagaatggggccaactgtgtggaccagggcaacaggcctgtgtgccagtgcctcccaggcttcggtggccctgagtgtgagaagttgctcagtgtcaactttgtggatcgggacacttacctgcagttcactgacctgcaaaactggccacgggccaacatcacgttgcaggtctccacggcagaggacaatgggatccttctgtacaacggggacaacgaccacattgcagttgagctgtaccagggccatgtgcgtgtcagctacgacccaggcagctaccccagctctgccatctacagtgctgagacgatcaacgatgggcaattccacaccgttgagctggttgcctttgaccagatggtgaatctctccattgatggcgggagccccatgaccatggacaactttggcaaacattacacgctcaacagcgaggcgccactctatgtgggagggatgcccgtggatgtcaactcagctgccttccgcctgtggcagatcctcaacggcaccggcttccacggttgcatccgaaacctgtacatcaacaacgagctgcaggacttcaccaagacgcagatgaagccaggcgtggtgccaggctgcgaaccctgccgcaagctctactgcctgcatggcatctgccagcccaatgccaccccagggcccatgtgccactgcgaggctggctgggtgggcctgcactgtgaccagcccgctgacggcccctgccatggccacaagtgtgtccatgggcaatgcgtgcccctcgacgctctttcctacagctgccagtgccaggatgggtactcgggggcactgtgcaaccaggccggggccctggcagagccctgcagaggcctgcagtgcctgcatggccactgccaggcctcaggcaccaagggggcacactgtgtgtgtgaccccggcttttcgggcgagctgtgtgagcaagagtccgagtgccggggggaccctgtccgggactttcaccaggtccagaggggctatgccatctgccagaccacgcgccccctgtcatgggtggagtgccggggctcgtgcccaggccagggctgctgccagggccttcggctgaagcggaggaagttcacctttgagtgcagcgatgggacctcttttgccgaggaggtggaaaagcccaccaagtgtggctgtgccctctgcgcatagcgctgggcgtggacaggccggtgagggcgggcaaggggccccagccgctgcagcagcggagacagtcgccagcagctgggctggggtgcaggtcatcacaggacggctcctgggcagctgggccctcctgggtggggtggtgccagagcagccttttaaaagcaaattgcgccatagctgggggcagcgggggtgggcgaggcctgagctgcgggctgccctctccggaagtgccttgcacaaataggcgcttaataaatatttgttgagtgaatgtgtgcgtgaggtcaggccaagaagtgcagaacgatgacacccctccttacctgctatctgaatctggagaagaaaaatgacagccttccaaaccaacccttccctttggcctgtggcccaggctggcttggaactgggtctgtggccccagaagcctcttacccctctgcgggcaaccatgaagtactgtcagcctccccgggaagccagcctggttcattctgctgctacagaatctgctggtggtaggccaggctctggagcgggggtgccgcctcctgctggccagggagggtcggacccttgccccctgggctgactggcagctctgcagccacggcttgggaacgaggctgtgggtggaggtggttcttaggaccaggcctctgaatcctaaagttctagcatgactactgtagctgcgagggcttatgtggaggaaacagtcacaggggctgctcagggtggcagaccccactaaagagggcagagggttctttgctctagataaacaaacatcatctgcctccagacactggccacagtaggagtattggtcctgggcttccccagccaccagtcagccacaagctgtcggtgacctattggtagagggactgggtgtgagggtctgggccagggtgcttgacctgggagcagctggttcagagtccttcacaccgcaggccagtagggagcagtggaagggacagtgctccaggcattgggaagtccctgctggctctatcactcggggcaaacttctccccacctgggccttgggttcttcagctataaaatggccagaggtggggggcgggatgactaaaggaacagtgcagactcccccactgtggtcttgggaggccagaggagttagaagacctatctatctatctatctatctacattgatcacatcaaaagtatttatgtgcctaacccggggctggggattgtggacgttctggcctaatggacagatgtgaactcatcccagagcatcgcaggaatgaccaggatgcccgggaagagttgagctgagtgggggctccagccacagacagcggcccaggccagggagttgctggcaacgaaggagccagtggtggaagaagaagaggccctgaatatacgattgcctgcccacgttgtcttctcttccatacacagtgaaaatgtagaaagatggtttgtgaggccaaactgtgaatgggctaaagggaggcaaagttgcactctccttccccagagggctcaccaagagggcacacccccgggggttctggtgggcaacgggggtgagcatgtccctgccctggctccctccatctgtgaccaggaggcatggctgggtgtatgttcaggtgaggctcagagtggcattgtgtccctgtcccctgcccagggcagtgaggggagcccttgatgctgattagaaggctagaactggggtagaggtgcctggcatgtctcatgccatggggactcaatctagcaactgtgagtcctggggtccctgtgatgggaagagggcagtgccctgcccaatgtggcaggtgtcctcatggcaggatctgcccctcaccagggggctgggatctacttgcttggagctctgagcaaggccacaatgcccgcccccacccccaagtagactgcagcctgggcctcatggggcttctcccaggcccacatggcatccctctctgagtttccaggccaccgtgggaccctgcagagcatctgcaccgggctggatagggcagaaaagctcaagggcagctagcttgcctcttccctggaagaaaggtgctctgggactcaccaaccctgagaaagatagctttcctggccaccaccattccccaccaccctggagaagccaattcccaggcttgaagggcactggctggcaggaggcctcttcattctgcaggaggtggaaaggacacctgtagacaggtgatgctcacccctcacctggcgccatggggctgggaggtgagcggctggcatgtttgttcctagggagcaccatgtgagcttaaggctcccctgaccggccccaccacatggcccagcctcctagcacagcagcgctgacctcagtgcagtctgaggattggaatccaccatgagatgatgtgagagctgtgtgccccaggatcaactttttctccaacttggccatcagccagcgagttgctaaggacctgagtcagcactcacgttgcctattcacactccgcttgaaagtccggaaggtggctactgcaaaatcacccctctgagaagtcctctctccacatcttgtccccctttgtgaagacccctagttcgctctgcattttaggcatgaagagatacagcagggtgcgtccggagggagctgtggccttgcaacaccactggcaacagggccggggctcccggtgaaggtgtcaggaagtggaaaaggctggactttgtctcctctttgcctgctggtagcctaaccgcaaaagtatctctttatacagaatacttacagattctaatatatatttgtatttcattttgttacagtatttttatatgttaaagtcaacatccagcgtcttgttttgcctttcagatgctatgtggtcgtggcacgttttgttgggggtttctgtagtcgtcttgtttggatcaactcctagaggctggtttagaacaggcccatgagggagctgcacctgccctggaagtattgttttagactatgtcgatattgtctgttgtcttccatgtgaacatgacattgagtcactctgc

SEQ ID NO: 267 - DNA, 592 bp, Homo sapiens
  source 1..592: mol_type = genomic DNA
catgaagtcctgggggcgccatgggaggagatcccaggtggctcctaatgagccctgcatttccatttgcctgctctagattcccctaaggctactgtgaggctgggggtgggggaacagcaggtataagaggttggggtggctgtaggagggtaggtggcagcatggattctaggcaggctgctgcactgctggtgctgctgctgttaatagacgggggctgtgctgaagggccaggaggccagcaggaagaccagctctccgcggaggaagacagcgaacccctcccaccacaggatgcccagacctctgggtcactgttgcactacctgctccaggcaatggagagacctggccggagccaagccttcctgtttcagccccagaggtttggcagaaatacccagggatcctggaggaatgaatggctgagtccccgggctggagaggggctgaattcccagttctggagcctggctgcccctcaacgctttgggaagaagtgacatgtcatcccttgatatgtctgcatgcaaggtccacacccaaaagtgtcaatgtttgccccccaaataaaattgtctggcttctg

SEQ ID NO: 268 - DNA, 2835 bp, Homo sapiens
  source 1..2835: mol_type = genomic DNA
gacagagccctgcagggagcagaccttcacttggctctgcctccgctgactctagcgccatggcccggcacctgctcctcccccttgtgatgcttgtcatcagtcccatcccaggagccttccaggactcagctctcagtcctacccaggaagaacctgaagatctggactgcgggcgccctgagccctcggcccgcatcgtggggggctcaaacgcgcagccgggcacctggccttggcaagtgagcctgcaccatggaggtggccacatctgcgggggctccctcatcgccccctcctgggtcctctccgctgctcactgtttcatgacgaatgggacgctggagcccgcggccgagtggtcggtactgctgggcgtgcactcccaggacgggcccctggacggcgcgcacacccgcgcagtggccgccatcgtggtgccggccaactacagccaagtggagctgggcgccgacctggccctgctgcgcctggcctcacccgccagcctgggccccgccgtgtggcctgtctgcctgccccgcgcctcacaccgcttcgtgcacggcaccgcctgctgggccaccggctggggagacgtccaggaggcagatcctctgcctctcccctgggtgctacaggaagtggagctaaggctgctgggcgaggccacctgtcaatgtctctacagccagcccggtcccttcaacctcactctccagatattgccagggatgctgtgtgctggctacccagagggccgcagggacacctgccagggtgactctggggggcccctggtctgtgaggaaggcggccgctggttccaggcaggaatcaccagctttggctttggctgtggacggagaaaccgccctggagttttcactgctgtggctacctatgaggcatggatacgggagcaggtgatgggttcagagcctgggcctgcctttcccacccagccccagaagacccagtcagatccccaggagcccagggaggagaactgcaccattgccctgcctgagtgcgggaaggccccgcggccaggggcctggccctgggaggcccaggtgatggtgccaggatccagaccctgccatggggcgctggtgtctgaaagctgggtcttggcacctgccagctgctttctggacccgaacagctccgacagcccaccccgcgacctcgacgcctggcgcgtgctgctgccctcgcgcccgcgcgcggagcgggtggcgcgcctggtgcagcacgagaacgcttcgtgggacaacgcctcggacctggcgctgctgcagctgcgcacgcccgtgaacctgagcgcggcttcgcggcccgtgtgcctaccccacccggaacactacttcctgcccgggagccgctgccgcctggcccgctggggccgcggggaacccgcgcttggcccaggcgcgctgctggaggcggagctgttaggcggctggtggtgccactgcctgtacggccgccagggggcggcagtaccgctgcccggagacccgccgcacgcgctctgccctgcctaccaggaaaaggaggaggtgggcagctgctggaatgactcgcgttggagccttttgtgccaggaggaggggacctggtttctggctggaatcagagactttcccagtggctgtctacgtccccgagccttcttccctctgcagactcatggcccatggatcagccatgtgactcggggagcctacctggaggaccagctagcctgggattggggccctgatggggaggagactgagacacagacttgtcccccacacacagagcatggtgcctgtggcctgcggctggaggctgctccagtgggggtcctgtggccctggctggcagaggtgcatgtggctggtgatcgagtctgcactgggatcctcctggccccaggctgggtcctggcagccactcactgtgtcctcaggccaggctctacaacagtgccttacattgaagtgtatctgggccgggcaggggccagctccctcccacagggccaccaggtatcccgcttggtcatcagcatccggctgccccagcacctgggactcaggccccccctggccctcctggagctgagctcccgggtggagccctccccatcagccctgcccatctgtctccacccggcgggtatccccccgggggccagctgctgggtgttgggctggaaagaaccccaggaccgagtccctgtggctgctgctgtctccatcttgacacaacgaatctgtgactgcctctatcagggcatcctgccccctggaaccctctgtgtcctgtatgcagaggggcaggagaacaggtgtgagatgacctcagcaccgcccctcctgtgccagatgacggaagggtcctggatcctcgtgggcatggctgttcaagggagccgggagctgtttgctgccattggtcctgaagaggcctggatctcccagacagtgggagaggccaacttcctgccccccagtggctccccacactggcccactggaggcagcaatctctgccccccagaactggccaaggcctcgggatccccgcatgcagtctacttcctgctcctgctgactctcctgatccagagctgaggggctagggtcccagcaccacttcccccttctccaccctctacttcccgcccagtggggctggaatgtggcccagccggctggaacctcaagggccccacccaccgagattgcagcggctctggctaattgggcctcagtgcccgggctattttgaacccaggaatccttgggggtggtgggaggagcggacaataaaggtgtaaac

SEQ ID NO: 269 - DNA, 1847 bp, Homo sapiens
  source 1..1847: mol_type = genomic DNA
tcaccagcccccctcttttgtccaccagcccagcctgactcctggagattgtgaatagctccatccagcctgagaaacaagccgggtggctgagccaggctgtgcacggagcgcctgacgggcccaacagacccatgctgcatccagagacctcccctggccgggggcatctcctggctgtgctcctggccctccttggcaccacctgggcagaggtgtggccaccccagctgcaggagcaggctccgatggccggagccctgaacaggaaggagagtttcttgctcctctccctgcacaaccgcctgcgcagctgggtccagccccctgcggctgacatgcggaggctggactggagtgacagcctggcccaactggctcaagccagggcagccctctgtggaatcccaaccccgagcctggcgtccggcctgtggcgcaccctgcaagtgggctggaacatgcagctgctgcccgcgggcttggcgtcctttgttgaagtggtcagcctgtggtttgcagaggggcagcggtacagccacgcggcaggagagtgtgctcgcaacgccacctgcacccactacacgcagctcgtgtgggccacctcaagccagctgggctgtgggcggcacctgtgctctgcaggccagacagcgatagaagcctttgtctgtgcctactcccccagaggcaactgggaggtcaacgggaagacaatcatcccctataagaagggtgcctggtgttcgctctgcacagccagtgtctcaggctgcttcaaagcctgggaccatgcaggggggctctgtgaggtccccaggaatccttgtcgcatgagctgccagaaccatggacgtctcaacatcagcacctgccactgccactgtccccctggctacacgggcagatactgccaagtgaggtgcagcctgcagtgtgtgcacggccggttccgggaggaggagtgctcgtgcgtctgtgacatcggctacggggagcccagtgtgccaccaaggtgcattttcccttccacacctgtgacctgaggatcgacggagactgcttcatggtgtcttcagaggcagacacctattacagagccaggatgaaatgtcagaggaaaggcggggtgctggcccagatcaagagccagaaagtgcaggacatcctcgccttctatctgggccgcctggagaccaccaacgaggtgattgacagtgacttcgagaccaggaacttctggatcgggctcacctacaagaccgccaaggactccttccgctgggccacaggggagcaccaggccttcaccagttttgcctttgggcagcctgacaaccacgggtttggcaactgcgtggagctgcaggcttcagctgccttcaactggaacgaccagcgctgcaaaacccgaaaccgttacatctgccagtttgcccaggagcacatctcccggtggggcccagggtcctgaggcctgaccacatggctccctcgcctgccctgggagcaccggctctgcttacctgtctgcccacctgtctggaacaagggccaggttaagaccacatgcctcatgtccaaagaggtctcagaccttgcacaatgccagaagttgggcagagagaggcagggaggccagtgagggccagggagtgagtgttagaagaagctggggcccttcgcctgcttttgattgggaagatgggcttcaattagatggcgaaggagaggacaccgccagtggtccaaaaaggctgctctcttccacctggcccagaccctgtggggcagcggagcttccctgtggcatgaaccccacggggtattaaattatgaatcagctg

SEQ ID NO: 270 - DNA, 2126 bp, Homo sapiens
  source 1..2126: mol_type = genomic DNA
cagctcccggctacggcccctcccagcgcaggcccatccccgttatggagcatgcgcagtcctcctgccgtcccgcccctccctttccagagcccccagttccttagaaaccaggcggcgcgttcccggtggcggcgccctggactcccgggcccgcgcatccccgccagccttccttaaggcggatgggtggcccccgagaccccgtcggacccatggtttccagtgcagcgcggagtgggcgatgccagcgtgccaggagccatgtctgaccaggacgtttggaagatcatatccatgccagaggctcttgtgaggagatgagttggtaaagagagaggctgggatgaagatgctgccaggagtgggcgtgtttgggactggcagctccgcccgagttctggtcccactgctgagggcagaagggttcactgttgaggccctgtgggggaagactgaggaggaggcgaagcagcttgctgaggagatgaacatcgccttctacaccagccggactgatgacatcttgctgcatcaagatgtggatctggtgtgcatcagcatcccccctccactcacccggcagatatccgtgaaggctctaggtattgggaagaatgtggtttgcgagaaggcagcaacatcggtggatgccttccggatggtgacagcctcgcgctactacccgcagctcatgagcctggtagggaacgtgctgcgcttcctgcctgccttcgtgcgcatgaaacagctgatttcggaacactatgtgggagcggtgatgatctgtgatgcccgcatctactcaggcagcctgctgagccccagctatggctggatctgtgatgagctcatgggcggcgggggcttgcacaccatggggacctacattgtggacctgctgacccacctgaccggccggagagccgagaaggtgcacgggctgctcaagacattcgtgaggcagaacgctgccatccgtggcatccggcacgtcactagcgatgacttctgtttcttccagatgctcatgggtgggggtgtgtgtagcacagtgacactcaacttcaacatgccaggcgcctttgtgcatgaagtcatggtggtaggctctgcaggacgcctcgtcgcccggggagccgacctctatgggcagaagaactctgccacgcaagaggagctgctcttgagggactcgctggcagtgggcgcaggactgcctgagcaggggccccaggatgtcccgctgctgtacctgaagggcatggtctacatggtgcaggccttgcgccagtccttccaggggcagggcgaccgccgcacctgggaccgcacccctgtctccatggccgcctccttcgaggatgggctgtacatgcagagcgtggtggatgccatcaagaggtcgagccgatccggggagtgggaggctgtggaggtgctgacggaggagcccgacaccaaccagaacctgtgtgaggcacttcagcggaacaacctatgagcctgcacctgggctccttgccacagggcagagggaccagggaggggaacaggagccagacatgacagggacttggccctagcagagacagtgtctttcatttaatgagtctgggtgaagccagaggtggctctgggacttcgccccctccagtggctcatctgctcctcagacttgcagggtggcaaatgttcctgttgccaggttaccacggtgtgcacagggcagagctgccgccaggcctcctcatggtgatgccagtgagtcggaccaggaaaggctcaccctggggagcccttcagcctgatccgcagtcctaacagggtgagaaagcacaagaggggccagctcggctgaggcctgaggagaaatgatgagaagttttgtttcgttcttgggctggggcatctcaggaacagtgagggcaacaagctgtccctcagggaccctcacctgccctcccatgtgaccaggcccttcccaggtggggactggggcttgctttattaagtgagctcttgggcttttgaagtaggacagagggccctggtttggcagagaggaggcaagggagggctttagaacatctgagaaatgttaataaataattcagaaaatagga

SEQ ID NO: 271 - DNA, 1834 bp, Homo sapiens
  source 1..1834: mol_type = genomic DNA
gagagcccaccgcgccacagcttggaggaagagcctgcggggaactggctgcaggacgctctcttcttgagtgcaggtgctggctctgctgtgaccatgcccgtgacctttgccctcctgctcctcctgggccaggccactgcggacccatgctacgatccacagggccgcccccaattctgcctcccgccagtgacacagctggctgccgtggcggcctcctgccctcaggcctgtgccctgtccccaggaaaccaccttggcgccagggaaacctgcaatggcagcctgactttggccctgggtggccccttcctcctgacatctgtcagcttgcgcttctgtaccccaggacccccagccctcatcctgtctgctgcctgggcctcagggggtccctggaggctgctgtggcacaggcccgcctggcctggggccttagggggccctgaaagggtgaccttccactccacaccaggtcctaaggccactgtggcggccagccacctccgtgtggagtttgggggccaggccgggctagcggcagctgggctgagaggccgctgccagtgtcatggccacgctgcccgctgtgccgcccgtgcccggcccccccgctgccactgccgccaccataccactggcccggggtgcgagagctgccgcccgtcccatcgagactggccctggcggcctgccacgccccggcacccccacccttgcctaccctgctcctgcaaccagcacgcccgacgctgccggttcaactctgagctgttcagactgtcgggcggccggagtgggggtgtttgtgagcggtgccgccaccacacagctgggcggcactgccactactgccaacctgggttctggagggaccctagccagcctatcttcagccgcagggcctgcagagcctgccagtgccaccctattggggcaacaggaggaacctgcaaccagaccagtgggcagtgcacctgcaagttaggggtcacaggcctgacctgcaaccgctgtggccctggctaccagcagagccgctcccccaggatgccctgccagcgaattccagaggcaacaaccacccttgccactactcctggtgcttatagctctgaccctcagtgtcaaaactactgcaatatgtcggacaccagggtacacatgagccttcggaggtactgccagcaggaccatgttctccgcgcgcaggtgctagcgtccgaggcggcgggcccggcatggcagcggctggccgtgcgcgtgctggccgtttacaagcagcgggcgcagcccgtgcgacgcggcgaccaggacgcctgggtgccccgcgccgacctgacctgcggctgcctgcgcctgcagccaggcaccgactacctgctgctgggcagcgccgtgggcgaccccgaccccacgcgcctcatcctcgaccgccacggcctcgcgctgccatggaggccgcgctgggcccggcccctgaagcggctgcagcaggaggagcgcgccggaggctgccgcggcgtgcgggcacccacacccagtcccaggccggagcactagacgtgagatggggctgcctcgagcaccaacaaagtaatttgggagcgactaggagctgagccttctacctcgacggtgcactgcagagagccaatcagacgtcgcagagccccgacgacactatgcttgcgcccacgccgagcaggcgtgcggaacttttagcaaaaggcggcaagcgggacttctggtcccaacatttcctcctttggcctgtggcttattccccgccagtgatctgtttcccccaataaagtctcaaatctttggg

SEQ ID NO: 272 - DNA, 9232 bp, Homo sapiens
  source 1..9232: mol_type = genomic DNA
gccctctctcccctcccttccacttcccactcccgtcttgccttggctgtgcaccctcagccccaagacccttctctaacatcacacctcctccaggaagcctcctctgactgttcaccgcttcccggttggggctggatgcctccttgggctcccagaggccccggggctgccccatttggcaaccaccctgccctcctcgttgtgttgggtcccccatggctagggtggggggctcatctagggctgactctgcttcctctccgcagcctccaggggacacgccatgactctggagggtctgtatttggcaaggggccccctggcccggctcctgctggcctggtcggccctgttgtgcatggcaggtggccaaggccgctgggacggggccttggaggctgcaggtcctggacgtgtgcggaggcggggcagcccaggcatcttgcaggggccgaatgtgtgcggctcccggttccatgcctactgctgtccaggctggaggacattccctggcaggagccagtgtgtcgtacccatctgtaggcgcgcctgcggtgaaggcttctgctcccagcccaacctgtgcacctgtgcggatgggacgctggctcccagctgcggggtgagccgagggtcagggtgcagtgtgagctgtatgaatgggggcacctgccggggggcgtcctgtctgtgtcagaagggctacacaggcaccgtgtgtgggcagcccatctgtgaccgcggctgccacaatgggggtcgctgcattgggcccaaccgctgcgcctgtgtgtatggcttcatgggacctcaatgtgagagagattaccggacgggaccctgctttggccaagtaggccccgaggggtgccagcatcagctgacgggcctcgtgtgcaccaaggcactttgctgtgccactgtgggccgtgcctggggccttccatgtgaactttgccctgcacagccacacccctgccgccgcggcttcatccccaatatccacacgggggcctgccaagatgtggatgagtgccaggctgtgccaggcctgtgccagggaggcagctgcgtcaacatggtgggctccttccattgccgctgtccagttggacaccggctcagtgacagcagcgccgcatgtgaagactaccgggccggcgcctgcttctcagtgcttttcgggggccgctgtgctggagacctcgccggccactacactcgcaggcagtgctgctgtgacaggggcaggtgctgggcagctggcccggtccctgagctgtgtcctcctcggggctccaatgaattccagcaactgtgcgcccagcggctgccgctgctacccggccaccctggcctcttccctggcctcctgggcttcggatccaatggcatgggtccccctcttgggccagcgcgactcaacccccatggctctgatgcgcgtgggatccccagcctgggccctggcaactctaatattggcactgctaccctgaaccagaccattgacatctgccgacacttcaccaacctgtgtctgaatggccgctgcctgcccacgccttccagctaccgctgcgagtgtaacgtgggctacacccaggacgtgcgcggcgagtgcattgatgtagacgaatgcaccagcagcccctgccaccacggtgactgcgtcaacatccccggcacctaccactgccggtgctacccgggcttccaggccacgcccaccaggcaggcatgcgtggatgtggacgagtgcattgtcagtggtggcctttgtcacctgggccgctgtgtcaacacagagggcagcttccagtgtgtctgcaatgcaggcttcgagctcagccctgacggcaagaactgtgtggaccacaacgagtgtgccaccagcaccatgtgcgtcaacggcgtgtgtctcaacgaggatggcagcttctcctgcctctgcaaacccggcttcctgctggcgcctggcggccactactgcatggacattgacgagtgccagacgcccggcatctgcgtgaacggccactgtaccaacaccgagggctccttccgctgccagtgcctgggggggctggcggtaggcacggatggccgcgtgtgcgtggacacccacgtgcgcagcacctgctatggggccatcgagaagggctcctgtgcccgccccttccctggcactgtcaccaagtccgagtgctgctgtgccaatccggaccacggttttggggagccctgccagctttgtcctgccaaagactccgctgagttccaggcactgtgcagcagtgggcttggcattaccacggatggtcgagacatcaacgagtgtgctctggatcctgaggtttgtgccaatggcgtgtgcgagaaccttcggggcagctaccgctgtgtctgcaacctgggttatgaggcaggtgcctcaggcaaggactgcacagacgtggatgagtgtgccctcaacagcctcctgtgtgacaacgggtggtgccagaatagccctggcagctacagctgctcctgcccccccggcttccacttctggcaggacacggagatctgcaaagatgtcgacgaatgcctgtccagcccgtgtgtgagtggcgtctgtcggaacctggccggctcctacacctgcaaatgtggccctggcagccggctggacccctctggtaccttctgtctagacagcaccaagggcacctgctggctgaagatccaggagagccgctgtgaggtgaaccttcagggagccagcctgcggtctgagtgctgcgccaccctcggggcagcctgggggagcccctgcgaacgctgcgagatcgaccctgcctgtgcccggggctttgcccggatgacgggtgtcacctgcgatgatgtgaacgagtgtgagtccttcccgggagtctgtcccaacgggcgttgcgtcaacactgctgggtctttccgctgtgagtgtccagagggcctgatgctggacgcctcaggccggctgtgcgtggatgtgagattggaaccatgtttcctgcgatgggatgaggatgagtgtggggtcaccctgcctggcaagtaccggatggacgtctgctgctgctccatcggggccgtgtggggagtcgagtgcgaggcctgcccggatcccgagtctctggagttcgccagcctgtgcccgcgggggctgggcttcgccagccgggacttcctgtctggccgaccattctataaagatgtgaatgaatgcaaggtgttccctggcctctgcacgcacggtacctgcagaaacacggtgggcagcttccactgcgcctgtgcggggggcttcgccctggatgcccaggaacggaactgcacagatatcgacgagtgtcgcatctctcctgacctctgcggccagggcacctgtgtcaacacgccgggcagctttgagtgcgagtgttttcccggctacgagagtggcttcatgctgatgaagaactgcatggacgtggacgagtgtgcaagggacccgctgctctgccggggaggcacttgcaccaacacggatgggagctacaagtgccagtgtccccctgggcatgagctgacggccaagggcactgcctgtgaggacatcgatgagtgctccctgagtgatggcctgtgtccccatggccagtgtgtcaatgtcatcggtgccttccagtgctcctgccatgccggcttccagagcacacctgaccgccagggctgcgtggacatcaacgaatgccgggtccagaatggtgggtgtgacgtgcactgtattaacactgagggcagctaccggtgcagctgtgggcagggctactcgctgatgcccgacggaagggcatgtgcagacgtggacgagtgtgaagagaacccccgcgtttgtgaccaaggccactgcaccaacatgccagggggtcaccgctgcctgtgctatgatggcttcatggccacgccagacatgaggacatgtgttgatgtggatgagtgtgacctgaaccctcacatctgcctccatggggactgcgagaacacgaagggttcctttgtctgccactgtcagctgggctacatggtcaggaagggggccacaggctgctctgatgtggatgaatgcgaggttggaggacacaactgtgacagtcacgcctcctgtctcaacatcccggggagtttcagctgtaggtgcctgccaggctgggtgggggatggcttcgaatgtcacgacctggatgaatgcgtctcccaggagcaccggtgcagcccaagaggtgactgtctcaatgtccctggctcctaccgctgcacctgccgccagggctttgccggggatggcttcttctgcgaagacagggatgaatgtgccgagaacgtggacctctgtgacaacgggcagtgcctcaatgcgcccggcgggtaccgctgtgaatgtgagatgggctttgaccccaccgaggaccaccgggcctgccaggatgtggacgagtgtgcgcaagggaacctctgtgcatttgggagctgtgagaacctgcctggaatgttccgctgcatctgcaatggtggctacgaactggaccgagggggtggcaactgcacagacatcaacgagtgtgcagacccagtaaactgcatcaacggcgtgtgcattaacacccccggcagctacctctgcagctgcccccaggattttgagctgaaccccagcggagtgggctgcgtggacactcgggccgggaactgtttcctggagacgcatgaccgaggggacagtggcatttcctgcagtgccgagatcggagttggtgtcacccgagcttcctgctgttgctccctgggccgggcttggggcaatccctgtgagctgtgccctatggccaacaccactgagtacagaaccctgtgcccgggtggtgagggcttccagcctaaccgcatcactgtcattctggaagacatcgacgagtgccaagagctgccagggctgtgtcaggggggtgactgcgtcaacacgtttggcagtttccagtgtgagtgcccacctggctaccacctcagtgagcacacccgcatctgtgaggatattgacgaatgctccacacactccggcatctgtggccctggcacctgctacaacaccctggggaactacacctgtgtctgccctgcagagtacctccaagtcaatggtggcaacaactgcatggatatgaggaagagtgtctgcttccggcactataacggcacatgtcaaaatgagctggccttcaacgtgacccggaaaatgtgttgctgctcctacaacattggccaggcctggaatagaccctgtgaggcctgccccactcccatcagtcctgactaccagatcctgtgtggaaatcaggccccgggattcctcactgacatccacacggggaagccccttgacattgatgagtgtggggagatccccgccatctgtgccaatggcatctgcataaaccagatcgggagtttccgctgcgagtgccccgcaggcttcaactacaacagcatcctgctggcttgtgaagatgtcgatgagtgtggcagcagggagagtccctgccagcagaatgctgactgcatcaacatccccggtagctaccgctgcaagtgcacccgagggtacaaactgtcgccaggcggggcttgtgtgggacggaatgagtgtcgggagatcccgaatgtctgtagccatggtgactgcatggacacagaaggcagctacatgtgtctgtgtcaccgtggattccaggcctctgcagaccagaccctgtgcatggacattgacgagtgtgaccggcagccttgtggaaatgggacctgcaagaacatcattggctcctacaactgcctctgcttccctggctttgtggtgacacacaatggggattgtgtggattttgatgagtgtactaccctggtggggcaggtgtgccgatttggccattgcctcaacacagctggttccttccactgcctctgccaggatggctttgagctcacagctgatgggaagaactgtgtggacaccaatgagtgcctcagccttgcaggaacctgcctacccggcacttgccagaacctcgagggctccttccgctgcatctgtccccctggcttccaggtgcagagtgaccactgcattgatatcgacgagtgctcagaggagcccaacctctgcctctttggcacctgtaccaacagccctgggagcttccagtgcctctgcccacctggctttgtcctctctgacaatgggcaccgttgctttgacacacggcagagtttctgcttcacccgttttgaggctgggaagtgctcggtgcccaaagctttcaacaccaccaagacccgctgctgctgcagtaagaggcctggggagggctggggagacccctgcgaactgtgtccccaggagggcagcgctgcctttcaggagctctgcccctttggccacggggcagtcccaggcccggatgactcccgagaagacgtgaatgagtgtgcagagaaccctggcgtctgcactaacggcgtctgtgtcaacaccgatggatccttccgctgtgagtgtccctttggctacagcctggacttcactggcatcaactgtgtggacacagacgagtgctctgtcggccacccctgtgggcaagggacatgcaccaatgtcatcggaggcttcgaatgtgcctgtgctgacggctttgagcctggcctcatgatgacctgcgaggacatcgacgaatgctccctgaacccgctgctctgtgccttccgctgccacaataccgagggctcctacctgtgcacctgtccagccggctacaccctgcgggaggatggggccatgtgtcgagatgtggacgagtgtgcagatggtcagcaggactgccacgcccggggcatggagtgcaagaacctcatcggtaccttcgcgtgcgtctgtcccccaggcatgcggcccctgcctggctctggggagggctgcacagatgacaatgaatgccacgctcagcctgacctctgtgtcaacggccgctgtgtcaacaccgcgggcagcttccggtgcgactgtgatgagggattccagcccagccccacccttaccgagtgccacgacatccggcaggggccctgctttgccgaggtgctgcagaccatgtgccggtctctgtccagcagcagtgaggctgtcaccagggccgagtgctgctgtgggggtggccggggctgggggccccgctgcgagctctgtcccctgcccggcacctctgcctacaggaagctgtgcccccatggctcaggctacactgctgagggccgagatgtagatgaatgccgtatgcttgctcacctgtgtgctcatggggagtgcatcaacagccttggctccttccgctgccactgtcaggccgggtacacaccggatgctactgctactacctgcctggatatggatgagtgcagccaggtccccaagccatgtaccttcctctgcaaaaacacgaagggcagtttcctgtgcagctgtccccgaggctacctgctggaggaggatggcaggacctgcaaagacctggacgaatgcacctcccggcagcacaactgtcagttcctctgtgtcaacactgtgggcgccttcacctgccgctgtccgcccggcttcacccagcaccaccaggcctgcttcgacaatgatgagtgctcagcccagcctggcccatgtggtgcccacgggcactgccacaacaccccgggcagcttccgctgtgaatgccaccaaggcttcaccctggtcagctcaggccatggctgtgaagatgtgaatgaatgtgatgggccccaccgctgccagcatggctgtcagaaccagctagggggctaccgctgcagctgcccccagggtttcacccagcactcccagtgggcccagtgtgtggatgagaatgagtgtgccctgtcgccccccacctgcgggagcgcctcctgtcgcaacactcttggtggcttccgctgcgtctgcccctctggctttgactttgatcaggccctcgggggctgccaggaggtggatgagtgcgccggacggcgtggcccctgtagctacagctgtgccaacacgcctggtggcttcctgtgcggctgtcctcaaggctacttccgggctgggcaagggcactgtgtctccggcctgggcttcagccccggaccccaggacaccccggacaaagaggagctgctctcgtctgaagcctgctacgaatgcaagatcaatggcctctcccctcgggaccggccacgacgcagtgcccacagggaccaccaggtgaacctggccacccttgactccgaggccctgctgaccttgggcctgaacctctcacacctgggccgggccgagcgcatcctggagctccggccggccctggagggtctagagggccggatccgctacgtcatcgtccgcggaaacgagcaaggtttctttcgcatgcatcacctccgtggcgtcagctccctgcagctggggcggaggcggccggggcctggaacctaccggctggaggtggtgagccacatggcaggaccctggggtgtccagccagaggggcagccagggccatggggccaggccttgaggctgaaggtgcagctgcagttgctttagttgggaggagcctcagtgggccccagctgtccagagaagggggattctggaactgggaaggactgatccccagaagcgatggctgaccagattgaaccccgaaactcaggaagagtgaaatgctacacgacaacctcaggcaagcccggcctctgcctgggcctctgtgccagccccgggggccccccagttactcagtctttcctggagacagcaagaagctgcaatgtgcaatccccctgcccccacagccaaggtcaggaagaggccctgtggtcaccgtgtctggccaatctcaggctttcacttctgtactgcactgtggcttgccctggcggggggcagggggttggcaggacatggcaatgggcaactggggtgggcacagggcttattcctcggagtagaagggtgtacagggggcccagactccacagtgacttgccacatttgccccccatttggagaatgcttttatatcaaaagtggagacgataataaagttattttgggtta

SEQ ID NO: 273 - DNA, 459 bp, Homo sapiens
  source 1..459: mol_type = genomic DNA
gtaggggactgtgcgggaagctgggggtggatgcatggtggggcccggggttctgggccgggatgcagccctactgagcccctttctggttctccacaggtgatggagacccgccaggtgtccaggagccctcgggttcggctgctgctgctgctgctgctgctgctggtggtgccctggggcgtccgcactgcctcgggagtcgccctgcccccggtcggggtcctcagcctccgccccccaggacgggcctgggcggatcccgccacccccaggccgcggaggagcctggcgctggcggacgacgcggccttccgggagcgcgcgcggttgctggccgccctcgagcgccgccactggctgaactcgtacatgcacaagctgctggtgttggatgcgccctgagcgcgctgcccgtccccatcttaataaagaccatgccctgcgctccggactgcg

SEQ ID NO: 274 - DNA, 2187 bp, Homo sapiens
  source 1..2187: mol_type = genomic DNA
cgcagagccaggaggcggaggcgcgcgggccagcctgggccccagcccacaccttcaccagggcccaggagccaccatgtggcgatgtccactggggctactgctgttgctgccgctggctggccacttggctctgggtgcccagcagggtcgtgggcgccgggagctagcaccgggtctgcacctgcggggcatccgggacgcgggaggccggtactgccaggagcaggacctgtgctgccgcggccgtgccgacgactgtgccctgccctacctgggcgccatctgttactgtgacctcttctgcaaccgcacggtctccgactgctgccctgacttctgggacttctgcctcggcgtgccacccccttttcccccgatccaaggatgtatgcatggaggtcgtatctatccagtcttgggaacgtactgggacaactgtaaccgttgcacctgccaggagaacaggcagtggcagtgtgaccaagaaccatgcctggtggatccagacatgatcaaagccatcaaccagggcaactatggctggcaggctgggaaccacagcgccttctggggcatgaccctggatgagggcattcgctaccgcctgggcaccatccgcccatcttcctcggtcatgaacatgcatgaaatttatacagtgctgaacccaggggaggtgcttcccacagccttcgaggcctctgagaagtggcccaacctgattcatgagcctcttgaccaaggcaactgtgcaggctcctgggccttctccacagcagctgtggcatccgatcgtgtctcaatccattctctgggacacatgacgcctgtcctgtcgccccagaacctgctgtcttgtgacacccaccagcagcagggctgccgcggtgggcgtctcgatggtgcctggtggttcctgcgtcgccgaggggtggtgtctgaccactgctaccccttctcgggccgtgaacgagacgaggctggccctgcgcccccctgtatgatgcacagccgagccatgggtcggggcaagcgccaggccactgcccactgccccaacagctatgttaataacaatgacatctaccaggtcactcctgtctaccgcctcggctccaacgacaaggagatcatgaaggagctgatggagaatggccctgtccaagccctcatggaggtgcatgaggacttcttcctatacaagggaggcatctacagccacacgccagtgagccttgggaggccagagagataccgccggcatgggacccactcagtcaagatcacaggatggggagaggagacgctgccagatggaaggacgctcaaatactggactgcggccaactcctggggcccagcctggggcgagaggggccacttccgcatcgtgcgcggcgtcaatgagtgcgacatcgagagcttcgtgctgggcgtctggggccgcgtgggcatggaggacatgggtcatcactgaggctgcgggcaccacgcggggtccggcctgggatccaggctaagggccggcggaagaggccccaatggggcggtgaccccagcctcgcccgacagagcccggggcgcaggcgggcgccagggcgctaatcccggcgcgggttccgctgacgcagcgccccgcctgggagccgcgggcaggcgagactggcggagcccccagacctcccagtggggacggggcagggcctggcctgggaagagcacagctgcagatcccaggcctctggcgcccccactcaagactaccaaagccaggacacctcaagtctccagccccactaccccaccccactcctgtattcttttttttttttttttagacagggtcttgctccgttgcccaggttggagtgcagtggcccatcagggctcactgtaacctccgactcctgggttcaagtgaccctcccacctcagcctctcaagtagctgggactacaggtgcaccaccacacctggctaatttttgtattttttgtaaagaggggggtctcactgtgttgcccaggctggtctcgaactcctgggctcaagcggtccacctgcctccgcctcccaaagtgctgggattgcaggcatgagccactgcacccagccctgtattcttattcttcagatatttatttttcttttcactgttttaaaataaaaccaaagtattgataa

SEQ ID NO: 275 - DNA, 3061 bp, Homo sapiens
  source 1..3061: mol_type = genomic DNA
atgttttacgtttgttcaagttgtgtttttctgtgtggttctaattttccaaactttccttttcaggttgcttcagcaaaatcagctcctgaaatacccactattgatcaggcatattcaaaactcagcaacagtatcactgtagaatgggctacagtgccgggtgccaccagttacctcctcacggctgaagacggggacacagtcattgaaaccacggtggccaattccccaggcactgtgacgggactaaaggctgcaacctggtatgaaatcaccatcagatccatcagcgctgctgggagaagccaggcgtcacctccaaagcaggcaaagacagtgttggctgcaccaattctagaagtaagctctccaagttcagactccattcttgtgcagtgggaagctgtatatatggcaattgcattctccgtgtccattatgcgagccaatggcttggggagtatatggaaagagaatactacaaacacctccttgacattcaccagtttagaagccggaactctctacaccataaaggcctatgcatggaatgccaacagaatccctggggatgactccacctgcaatcagagaacaagtcctcgggcccctgccaacattcaagtctctttcgatagtggagctctgaaggcatctttttcctgggcacgggcagaaggagctttcaattatactgtgatggctttgagcgactcttcagagctgacctgcagtacaactttcagttcctgcaccatctcttccctccagtgtggaactgaatacttgatttcagttttagcaagtaatgatgctggatctagcaaatcatcttcagcaatgaccctgaaaactgttgcttgtgcacccggaagagtgacgatccaagaagatccccctggccacctgtctgtggcttggtccagtgtagatctgggtgactactatgtggtctttgtgaagagtgatgatggcttggaagtacactgcaacacatctctcactcagtgcaacttcttatctgagtgtggcttcacttattttattagtgtttttgtctataacaaggcagggcaaagtcctttgggtgacatattcaattataccacagctccctgttgtcctagtgacattaaccccgtgttggtgtccagtgacagagttgagattgtctggtctcctgtccgtggtgccgaactgtatgaaaccaaggctgtagatgggtacaacatggttgagtgcaatgacactactcctgcgtgcaccctttcggctctagagtgtgacaccaagtacaacatcacagtgtattcattcaatgaagtccgaggcagcaatatgtcatgtactccccagttcataaccacagctccttgcagtcctgaaataaaaaatgtttcaagggatgcattctccatgattaatgtgcactggcgatccactaatgatgatgctacttacacggtgactgcccaaggggagaaaggactgtatcagtgcagcagcacaggagagtcctgcaccatgcggggcttgccctgtggctcagtgttctctgtcactgctgtggccgaaacacaggcaggacggagcctgcccagctacagtgtgcccctggaaacagtgccatgctgtccaaccggtctgacagtaactcaaatcacccagtcagtaatcaacgtgagctggactattgggagagtggctcaaacccatgttgcagttctggagtcacacactggacagtctaagtgtcacactcatcaaaaccactgcctcctaggatgcatcacatgtggcatcaattacacagtgacattaaaagcaattagtgccaccgggttgactgcagattgctcctaccaaagttatttctctggtgcctgctgccctttgggggtgaaattatataggctgggccctaatggcatccggatctactggcaagcctccaggggctctgccaattacagcactgacctctatggctccaaaggcattttcacgtgcaccccgagtgctggcctcagtttctgtgatgtcactgagataccctgtggggatgtatacactgtgatggtctcaccagttgctaaaacaggattgaagcttactttctgtccaaaaaaaatatattcagtaacttgctctggaagtacacttggaatggtgatttatagagggaagagaaatgaagaatgacaaagtgagccccagataaaaacaaaaacttgaccaaagttgtctcatttgttagtgattagagatggaaaagatctactagaatgtagaataaaaatgcctctaggataggaaaagctcctttggcctttagaagaacaactctgactctgcttcctgagggcaaggtcaggtgtgtcctcacctgcacagcagttggagatctgctatgtgaggactctggagagaaatgaatccagaaagtcccctggacggctgctagcctgagttggcacactgtgagaaccctggaaacaagaaagttctgcttagcagaaattctgagatttcacatccacacacaccacagacttcaacacatccacttcatgagtgttttacaacagcacttgtctgcagccccctcaggggctggaaatgttcactcccagaaagtcaagccacccacatgcagacagcacttatcccaagacaaacctccagcaggacttcagtataggttggaaagcagtagctgccagggcaacctgagataacaaacgccctcatcgcaagttaggagcaaagctgagctgcttgcagggttcgctgagccaaagcatcaggtggcgtgacatctatgggagcatctgggaaagcagagctgccagcctgttgctagaagggttgcagttatgctttctgcatgagagaagatgtcaaatggagagcctcaaactgtggccgactgacatgcgtgcatcttttgggggaggaccatccatcttattggccatatcccccactcatattgtaattacttttttcatctttggagggggaaggcaatgaaatataacataaatctctcatacct

SEQ ID NO: 276 - DNA, 3971 bp, Homo sapiens
  source 1..3971: mol_type = genomic DNA
ggcgcggcaagatgctggatgggtccccgctggcgcgctggctggccgcggccttcgggctgacgctgctgctcgccgcgctgcgcccttcggccgcctacttcgggctgacgggcagcgagcccctgaccatcctcccgctgaccctggagccagaggcggctgcccaggcgcactacaaggcctgcgaccggctgaagctggagcggaagcagcggcgcatgtgccgccgggacccgggcgtggcagagacgctggtggaggccgtgagcatgagtgcgctcgagtgccagttccagttccgctttgagcgctggaactgcacgctggagggccgctaccgggccagcctgctcaagcgaggcttcaaggagactgccttcctctatgccatctcctcggctggcctgacgcacgcactggccaaggcgtgcagcgcgggccgcatggagcgctgtacctgcgatgaggcacccgacctggagaaccgtgaggcctggcagtgggggggctgcggagacaaccttaagtacagcagcaagttcgtcaaggaattcctgggcagacggtcaagcaaggatctgcgagcccgtgtggacttccacaacaacctcgtgggtgtgaaggtgatcaaggctggggtggagaccacctgcaagtgccacggcgtgtcaggctcatgcacggtgcggacctgctggcggcagttggcgcctttccatgaggtgggcaagcatctgaagcacaagtatgagacggcactcaaggtgggcagcaccaccaatgaagctgccggcgaggcaggtgccatctccccaccacggggccgtgcctcgggggcaggtggcagcgacccgctgccccgcactccagagctggtgcacctggatgactcgcctagcttctgcctggctggccgcttctccccgggcaccgctggccgtaggtgccaccgtgagaagaactgcgagagcatctgctgtggccgcggccataacacacagagccgggtggtgacaaggccctgccagtgccaggtgcgttggtgctgctatgtggagtgcaggcagtgcacgcagcgtgaggaggtctacacctgcaagggctgagttcccaggccctgccagccctgctgcacagggtgcaggcattgcacacggtgtgaagggtctacacctgcacaggctgagttcctgggctcgaccagcccagctgcgtggggtacaggcattgcacacagtgtgaatgggtctacacctgcatgggctgagtccctgggctcagacctagcagcgtggggtgagtccctgggctcagtcctagctgcatggggtgcaggcattgcacagagcatgaatgggcctacacctgccaaggctgaatccctgggcccagtcagccctgctgcacatggcacaggcattgcacacggtgtgaggagtgtacacctgcaagggctgaggccctgggcccagtcagccctgctgctcagagtgcaggcattgcacatggtgtgagaaggtctacacctgcaagggacgagtccccgggcctggccaaccctgctgtgcagggtgagggccatgcatgcagtatgaggggtctacacctgcaaggactgagaggcttttctagcacgtcggggcgtacagctggagcagggtgccgggggtcctctgggttggctgtccaagccctgtatctccccctctccaggacccagaggcgggggttggctctggtctggcgtatgcaacctctctgcttgtgccctgggcctcagcttcctccctctgacccgagagcattgcaccaatgctttctgagctttctcccatccctaacacaccagtccctgggaagcggctccccatgccagtccattggctttccctccccacctcctctgaggcatgggtggcaggtgcaccttggtgaccatgcggcctccgtgtgggccacccgttggggactggcctggcccaggctgccccaacaccagcactgtcttcagagactcaaaccactagaagaggacgcagcctgttctgcactcccagggcccggccgtgcgggtgcccaggctcggggggacactgccgacctctgacgttgagcacttctctttggagtaaatatcagtgacttttaaattattatgattatttaactaatataataattattattttctccatccctgccacctccccggctgcagctccccgctctcggccaagccccagtctgggagggccccgccttccgtccctgacatattccctcctaaccctgcctctgatctgcttagttgtttgaaaccactaaatcgagatagatgtgtgtagttaaggaaatacagtgagctgcgtctggccacagcccttggggcttctggaagccagctcccccagccccatgccagccagccactgccacgtggtgggccagccggcggcccctgccctgcaccctgtgggcagacgcccggcctccaggcagctcagtgcagattctcgagctgggggtggtggagaggggcgggcatggtgagggggcagggcagccctttgattggttcatgtcatgtcatgaggaagctgcttgctttgtgtcactgggggacagattgggacagatgccggtggaggcagtcttgggctcgcatctggccatggaacgccatgctttatggccctgctgttgtgtgtgctggggacagggtgacctgcactgacctggcttggtttgagggtgtagtgtgtgtgtgtgttgtgagagtgtgtgtgctggcgtggtcagtgtgcatacgtgtgcgtatgttgtgagtgttgtgagtgcgtgtgtgctggcgtggtcaatgtgtgtaagcgtgtgttgtataaatgcatgctggcatggtctgtgtgtgtgtgtgtgtgtgtgtgtgtgtgtgtgtgtatactggcatggtcagcttggctgtgctgtgctgtcagtggcatggcggtgccttaggttcccagagcctctcgccctgggctccgtcttgtgggtgtcctgatggctgtgggctgggttctgggcgggttgctggtatggatacaggaactactgagtgaataggtgtctcagagccctaagggtctccagaaagccggggtgtctgtgtttttaaaagaaaacctatttatgttgctgtgggtctctgccgtccctgtgttatagtacataagaacctttattctcctgtggttcagagagcaccccgacatgtgcctgcagctgcatccccgtaccacagtgtgggtgcaagacgctgggtttgtcctttgtctggtgaagcctggctagaaggggtgggggtggtagcccctgccctctgcagtgtccgcatccactggtccctgagcagcatagctggccacaccctcatgacatgacaagactgtcactcagtcactattgggtctatgaagggcgtcaagtcagaggaaggtttttatttttaatcaaataccacatttagctctatgtcataaatattcagaaaactatttttttaaacaaggcagaccaaaaatgtctgctagctagttggtttctatacaaatacatattcgaatgtcttgctggatgaagaggccgctcagccggagcctcctgtttcatgcgcttctcttctgaggggcagtagaggagaaagggctgttgggaggggttcagcccgctccttggccaggggatcccagccaccttctctgcaccaggccctgccttgagggacctggacccccaggtggcttctggccaggtgtgggtgggtgggaggggccctgtctgtgctccgagtctccgtgcgtgcaatgatttctctacctcatctgtgtggcccgtcccagagggactgtggagaatgtatttatttaacagctttgtgtcacagaaccagaaacaaatggaaacattaaataaatgtattttaaattata

SEQ ID NO: 277 - DNA, 1052 bp, Homo sapiens
  source 1..1052: mol_type = genomic DNA
agcgccgcgctgtgtccctggcgtcctcagtcctgccccgcgaagtggagatgcgcgagaggcaggcgagggcgcgcagctcgtgaaaagccgcgccagccggcaccatgcgcctgcggccgctgcccctcgtggtggtccctggcttgctgcagctgctattttgtgacagtaaggaagtggtgcatgccacggaggggctggattgggaagacaaagatgctccagggacgttggtcggcaacgtggtgcactcaaggatcatcagtcccctgcgcctgtttgttaaacagtctccggtgcccaagcccggccccatggcgtacgcagacagcatggaaaacttttgggattggctggccaacatcacggagattcaggagccattggcaagaactaaacggaggccaatagtaaaaacaggaaaatttaagaaaatgtttggatggggtgactttcattccaacattaaaactgtcaaactcaatctcctcatcacagggaaaattgttgaccatggaaatggaaccttcagtgtgtatttccgacataattcaacaggcctgggcaatgtttcagtgagcttggtaccaccctccaaggtggtggaatttgaagtttccccccagtctaccttggagaccaaggaatccaaatctttcaattgtcgcattgagtatgaaaaaacagatcgggcgaaaaagaccgccctgtgcaactttgacccatccaagatctgctaccaggagcagactcagagccatgtgtcttggttgtgctccaagcccttcaaggtcatttgcatttacattgccttttacagtgttgattataaactcgtgcaaaaggtgtgccctgactacaattaccatagtgagaccccatacttatcttctggctgatcttcctgctgtggtggaaatgagggatacatatgtatttgattagaatgacaaagaaacaagcccagctctttatgataaaggatcccttttgtttctggcagtgaacaatagttccctatcaggttttcaaatttaaaaaaagaaaaa

SEQ ID NO: 278 - DNA, 1209 bp, Homo sapiens
  source 1..1209: mol_type = genomic DNA
ccactgccagagaggcccagaattttctaacttactgtgtggcagaatgaagcctctgcttgaaaccctttatcttttggggatgctggttcctggagggctgggatatgatagatccttagcccaacacagacaagagattgtggacaagtcagtgagtccatggagcctggagacgtattcctataacatataccaccccatgggagagatctatgagtggatgagagagatcagtgagaagtacaaggaagtggtgacacagcatttcctaggagtgacctatgagacccaccccatgtattatctgaagatcagccaaccatctggtaatcccaagaaaatcatttggatggactgtggaattcacgccagagaatggattgctcctgctttttgccaatggttcgtcaaagaaattctacaaaaccataaagacaactcaagtatacgcaagctccttaggaacctggacttctatgtccttccagttcttaacatagatggttatatctacacttggacaactgatcgtctttggaggaaatcccgttcaccccataataatggcacatgttttgggacggatctcaatcgaaatttcaatgcatcttggtgtagtattggtgcctctagaaactgccaagatcaaacattctgtgggacagggccagtgtctgaaccagagactaaagctgttgccagcttcatagagagcaagaaggatgatattttgtgcttcctgaccatgcactcttatgggcagttaattctcacaccttacggctacaccaaaaataaatcaagtaaccacccagaaatgattcaagttggacagaaggcagcaaatgcattgaaagcaaagtatggaaccaattatagagttggatcgagtgcagatattttatatgcctcatcagggtcttcaagagattgggcccgagacattgggattcccttctcatatacgtttgagctgagggacagtggaacatatgggtttgttctgccagaagctcagatccagcccacctgtgaggagaccatggaggctgtgctgtcagtcctggatgatgtgtatgcgaaacactggcactcggacagtgctggaagggtgacatctgccactatgctgctgggcctgctggtgtcctgcatgtctcttctctaagtgcattctgcccaggcctgctcaaccccagtggcatg

SEQ ID NO: 279 - DNA, 2628 bp, Homo sapiens
  source 1..2628: mol_type = genomic DNA
gctttcaggggaatggggaagctgggccgggacgcgcggcagggactttgcaaactctgcaaaagtcccgagtagaccgcagaggctcgcggccgcgggtaggctccctcagatccccgtagatctcagtagatccggcgtgtattccccacccgcggagtatcccggtgtgcagcgatctcccgagagttggcgcagggccacttggctgcagagaacgtgtgcaccttcagtccgggaaacccgccccagccgagtagccgcgcatcctgggaagcctggcgagccacggcgccgggggcggccaaggggaggcgggatgagtctgcgagccggctgagcgcgccgaggagccggccggggcaccgccggggacatggcgtcttggctccggagaaagctgcgtggcaagaggcggccagtgatagcgttctgcctcttgatgatcctatctgcgatggctgtcacccgctttcccccacagcgtccatccgccggcccagaccctggtcccatggagcctcagggggtaactggcgcccctgcaacccatatccggcaggctttgagctccagccggaggcagcgggcaagaaacatgggcttctggagaagccgtgctttgcccaggaactccatcttggtctgtgctgaggagcaaggccatagagcaagagtggacagaagcagggagtccccaggaggggacctcaggcatccagggagggtgaggagggacattactttgtcaggacatccaagactcagtactcagcatgttgtgctcctgagggaggatgaggttggagatccaggaaccaaagacctgggccacccccagcatggcagtcccatccaggagacacagagtgaggtggtcaccctggtcagtccactcccagggagtgacatggcagctttaccggcttggagagctacttctgggctgacactctggccccatacagcagaaggcagggatctgctgggagctgagaacagagccttgactggtgggcaacaagcagaggatcccaccttggcctcaggagctcatcagtggcctggctctgttgagaagctgcaagggtcagtatggtgtgatgctgagacgctgttgagcagctcgaggactggtgggcaggctcccccatggctgacagaccacgatgtgcagatgctccgtctgttggcacagggggaggtggtggacaaagccagggtccccgcccatgggcaggtgctacaggttggcttctccactgaggctgcccttcaggacctgtcctctcccaggctcagccaactctgttcccaagggctctgtggcctgatcaagaggcctggggacctgcctgaggtcctgtccttccacgtagatcgtgtgctggggctgcgccggagcctacctgctgtggcccgccgcttccatagccccctcctgccctaccgatacacagacggtggagcaaggcctgtcatctggtgggcacccgatgtgcagcacctgagcgacccagatgaggatcagaactctctggccttgggctggctgcagtatcaggccctgctggcacacagctgcaactggccaggccaggccccgtgcccgggcatccaccataccgagtgggcacgcctggcgctcttcgacttcctgttgcaggtccacgaccgcttggatcgctactgctgtggcttcgagcctgagccctcagacccctgtgtggaagagaggctccgagagaaatgccagaacccagccgagctgcggctggtccacatcctggtccggagcagcgatccatctcacctggtctacatcgataacgctggcaaccttcagcaccctgaggacaagctgaactttcggctgctggagggcatagatgggtttcctgagtctgccgtgaaggttctcgcatcagggtgtctacagaacatgctgctgaagtcgctgcagatggacccagtgttctgggaaagccaaggcggagcccaggggctgaagcaggtcctccagaccctggagcagcgaggacaggtgctgctgggacacatccaaaagcacaacctcacactcttcagggacgaggacccataagccgcacacagccctgagtcaatgagcatccatcctgatggccacattttcttgggctcactcatcttgaggacaaatgggaaaagccagaagccagaggggcacaaggatgtcacgggatatttcacctgcctgggatggtggagttctttccaaggatacccttatcaagtgatgctgttcctctaggcctcagccagtttctgtttaacagtctctgctttgccttctgcctggtagacctacactcagccagaggtgggagtgagacacttgtcatcctagaaaatggcaagaagaaaggaatacaaagaaacatttcattgcaaaacataatgtggagctctcacattaggatgaggctcattctactttgtgacttaaccagccgctttgaaataaaacagatctaatcctgtctcaccaccgagagactgacatgcaagtggacaatgcccaaactacatataataataaaactctatccaccacctctgtagcaaccagctcagagaaccaaccac

SEQ ID NO: 280 - DNA, 3941 bp, Homo sapiens
  source 1..3941: mol_type = genomic DNA
aggaagcggggggctagcggcctggcgctgcggcgaccgaccggggcgtcaggatccctggcccccggagagcgaagggcgggcgggtcccggagcaagaagaattgtatagaaatgtaaaaaacatttatgtgtgcttcacatgtggcatgaaaaaaatgaggacctctggtcaaaattgcctgagttcagaatttcatgctggaaggaaagttagacgtaacttctaatttctagttccagtaagcatctcttcttggaaaatttccaaaaaagagtcctgctctgttgcccaggctggagtacattggtgtgatgatcatggttcactgcagcctcgacctcccaggctcaagcaattctcctacctcagcctcctgagtaactgggactataggatttctttgaagaaaaatgtgcttcttgaatcaactgcagtctctcctctgcataagagctcttaagggtactagcaggatagaagcaaatgaaactgaaagctcatctgcagctcagaaaagcaaagacatggaattttaaagagtgaaggtagcatggtgtcggccatgggtgaacaagacacagccagacaatgtggaccaatttcttcaaactacggcttttctgctgtctgcttgcagtgttgatggtggtggtgctggtcatcaatgttactcaggtagagtacttggaccatgagactgtttcagccactttcatcgacagcagtggacagtttgtttcctcccaggtgacaggaattagccgaaatccctactgtggctatgatcagcagaccctgtccagccaggagcgcatggaggaggactccttgctggctgccttgcaccggcaggttcctgatgtgggcccagtcccctttgtgaagagcactgacccttcttccagctactttgtcatcttgaactctgctgccttctttaaggtgggaagccagcttgaggtgctggttcatgtgcaggattttcaaagaaagcccaagaagtatggtggagactacctgcaggccagaattcactccctcaagctgcaggctggggctgtgggcagggtggtggattaccagaatgggttttacaaggttttctttactttgctatggccaggcaaagttaaagtatccgtatctctggtccaccccagtgaagggatcagagttcttcagcgcttacaggaagataaaccagacagggtctatttcaagagtctcttccgttcaggaagaatttctgaaactactgagtgcaacgtgtgtcttcctgggaatctgcccctgtgtaactttacagacctctacactggggagccctggttctgcttcaaaccaaagaagctcccttgcagcagcagaattacccatttcaaaggtggatacctgaaaggtctcctaaccgctgcagagagtgctttcttccagagtggtgtcaatatcaaaatgccagtcaactccagtggacctgattgggtaactgtgattcccaggagaataaaagaaactaacagtctagaactatctcaaggctcaggaacttttccttctgggtattattataaagaccagtggaggcccagaaagtttaagatgcgtcagtttaatgaccctgacaacattacagagtgcttacaaagaaaagtggtgcatttatttggtgactcaacaatcaggcaatggtttgaataccttactacatttgttccagatttagtggagtttaacttgggtagtcccaagaatgtgggtcccttccttgcagtggaccagaagcacaacatcctgctcaaataccgctgccatggtccacccatccgcttcacgactgtctttagcaatgagctccattatgtggcgaatgagctgaatggcattgtgggagggaagaacacagtggttgccatagctgtatggtctcacttcagcaccttccctttggaagtgtacatccggcggctcaggaacatccgtcgagcagtggttcggctcctcgatcgaagcccaaagaccgtggtggtcatccggacggccaacgcccaagagctgggacctgaggtgagccttttcaacagcgactggtacaactttcagctggacaccatccttcggaggatgttctcaggggttggagtatatctcgtcgatgcctgggagatgaccctggcccattatctaccgcacaagctgcatccagatgaagttattgtgaagaaccagctggacatgttcttgtcctttgtgtgccccttggaaacctagcctgtcttggaagggactggaggaatcatattcaatgaccttctcaattgacctgagttacagaaagtggccccagtgagagatgactgcccttaataagtataaaatttcaaaaagatctggacttaatatgatgacttataaggagcttagaaaatgcaggttacatttatatctacctataggattttatccaatgttgacttagccatggtagaactcttaactgcatctacacactatattgctcttgtaaccaaagatgctaatgagtgtatttgaattagcttctcctaggaggggtgactactttgctaaagagtatgaaaaatgttttgatggaagggacaagtttggttggtagtagagtgtttgtagcttatctggtaaaggaaattgagtgcatctgcatgcatagcacaagtaatccatcttctggcggttaactagagaaagcttatagtcagaggctcttgtgaatgcactgaagactgctgtgtctcaggagtttctcttgatgatctaccttttctgaattacttgaaaaggccaatgtgcttggttcgagttttttagtgaatatttacaatttcctgcttttatctagaaaagaagcaaaagggaaatatgaaagcagtatatataaaatctgtgctttggaattgatatttgcatttggtgattgttttttatttgattcagctaaattttatgtgttgaatacttactctagaataactacttttggaactggaagggggaaatctgtaaatggaaatttatttttatgttctgaaatttgagggtttaggaattgacttttgtgtaaagaatgctacgatattataaagctgtggaagttttttccactagtttcaggtgtttttttttttgttgttgttgttgttattttgaactacttaccaaaattagaagttaaaatctaattagaaattaataagatactaaaattcatgacagttttttgtttgtttgtttgtttgttttttggtatttcttgatttgggcataaaaggcacacccattctctcatgcttggaagaagctgctattcctactggctatctaagaagaatggaattattaattttatttgacttattaattttaaacgagtttaatttgggatcatttagtaagtactcttttctttttgagctgtgatagattatagtctagtttaagttgctcctaagtagacagatgaagaaactagggaggctttagagaggaagacagatgcttgaagtatgaacaatatatacccttagaagaatgggtcaaataatttgggtttttaatttaaaataggagggccccagatcttactttcctgtccttgaggaacaccttcaagtttttaaagtattttagggggaaagaagatttttaattgtttctgagcctaatgaggtaataaaatatattaaaatagtttaattttaatggtccttacgctttacagtacctaaggatcacttgtagtatctgacaaaaatgcagaattaaagagtcatggcagggtgtggtagctcaagcctgtaatcccagcactttgggaggccaggcaggaggattgcttgaggccaggagtttgagaccagcctgggcaacatagtaagacctcatctctacaaaaaataaaaaa

SEQ ID NO: 281 - DNA, 5234 bp, Homo sapiens
  source 1..5234: mol_type = genomic DNA
ggcagacaaagggcctgggcaaattcgccgcccggcctcctagcgctccggggaggccgctgcgccccggagtggatcgcgctggaggcgtgcgccgggcgagaagccgcggccgcgggagcgcagtatggggaagaaccgcgagatgcgcctgactcacatctgctgctgctgcctcctttaccagctggggttcctgtcgaatgggatcgtttcagagctgcagttcgcccccgaccgcgaggagtgggaagtcgtgtttcctgcgctctggcgccgggagccggtggacccggctggcggcagcgggggcagcgcggacccgggctgggtgcgcggcgttgggggcggcggaagcgcccgggcgcaggctgccggcagctcacgcgaggtgcgctctgtggctccggtgcctttggaggagcccgtggagggccgatcagagtcccggctccggcccccgccgccgtcggagggtgaggaggacgaggagctcgagtcgcaggagctgccgcggggatccagcggggctgccgccttgtccccgggcgccccggcctcgtggcagccgccgcctcccccgcagccgcccccgtccccgcccccggcccagcatgccgagccggatggcgacgaagtgttgctgcggatcccggccttctctcgggacctgtacctgctgctccggagagacggccgcttcctggcgccgcgcttcgcagtggaacagcggccaaatcccggccccggccccacgggggcagcatccgccccgcaacctcccgcgccaccagacgcaggctgcttctacaccggagctgtgctgcggcaccctggctcgctggcttctttcagcacctgtggaggtggcctgatgggatttatacagctcaatgaggacttcatatttattgagccactcaatgatacaatggccataacaggtcacccacaccgtgtatataggcagaaaaggtccatggaggaaaaggtcacagagaagtcagctcttcacagtcattactgtggtatcatttcagataaaggaagacctaggtctagaaaaatagcagaaagtggaagagggaaacgatattcatacaaattacctcaagaatacaacatagagactgtagtggttgcagacccagcaatggtttcctatcatggagcagatgcagccaggagattcattctaaccatcttaaatatggtatttaaccttttccaacacaagagtctgagtgtgcaggtcaatcttcgtgtgataaagcttattctgctccatgaaactccaccagaactatatattgggcatcatggagaaaaaatgctagagagtttttgtaagtggcaacatgaagaatttggcaaaaagaatgatatacatttagagatgtcaacaaactggggggaagacatgacttcagtggatgcagctatacttataacaaggaaagatttctgtgtgcacaaagatgaaccatgtgatactgttggtatagcttacttgagtggaatgtgtagtgaaaagagaaaatgtattattgctgaagacaatggcttgaatcttgcttttacaattgctcatgaaatgggtcacaacatgggcattaaccatgacaatgaccacccatcgtgtgctgatggtcttcatatcatgtctggtgaatggattaaaggacagaatcttggtgacgtttcatggtctcgatgtagcaaggaagatttggaaagatttctcaggtcaaaggccagtaactgcttgctacaaacaaatccgcagagtgtcaattctgtgatggttccctccaagctgccagggatgacatacactgctgatgaacaatgccagatcctttttgggccattggcttctttttgtcaggagatgcagcatgttatttgcacaggattatggtgcaaggtagaaggtgagaaagaatgcagaaccaagctagacccaccaatggatggaactgactgtgaccttggtaagtggtgtaaggctggagaatgtaccagcaggacctcagcacctgaacatctggccggagagtggagcctgtggagtccttgtagccgaacctgcagtgctgggatcagcagtcgagagcgcaaatgtcctgggctagattctgaagcaagggattgtaatggtcccagaaaacaatacagaatatgtgagaatccaccttgtcctgcaggtttgcctggattcagagactggcaatgtcaggcttatagtgttagaacttcctccccaaagcatatacttcagtggcaagctgtcctggatgaagaaaaaccatgtgccttgttttgctctcctgttggaaaagaacagcctattcttctatcagaaaaagtgatggatggaacttcttgtggctatcagggattagatatctgtgcaaatggcaggtgccagaaagttggctgtgatggtttattagggtctcttgcaagagaagatcattgtggtgtatgcaatggcaatggaaaatcatgcaagatcattaaaggggattttaatcacaccagaggagcaggttatgtagaagtgctggtgatacctgctggagcaagaagaatcaaagttgtggaggaaaagccggcacatagctatttagctctccgagatgctggcaaacagtctattaatagtgactggaagattgaacactctggagccttcaatttggctggaactaccgttcattatgtaagacgaggcctctgggagaagatctctgccaaaggtcctactacagcacctttacatcttctggtgctcctgtttcaggatcagaattatggtcttcactatgaatacactatcccatcagaccctcttccagaaaaccagagctctaaagcacctgagcccctcttcatgtggacacacacaagctgggaagattgcgatgccacttgtggaggaggagaaaggaagacaacagtgtcctgcacaaaaatcatgagcaaaaatatcagcattgtggacaatgagaaatgcaaatacttaaccaagccagagccacagattcgaaagtgcaatgagcaaccatgtcaaacaaggtggatgatgacagaatggaccccttgttcacgaacttgtggaaaaggaatgcagagcagacaagtggcctgtacccaacaactgagcaatggaacactgattagagcccgagagagggactgcattgggcccaagcccgcctctgcccagcgctgtgagggccaggactgcatgaccgtgtgggaggcgggagtgtggtctgagtgttcagtcaagtgtggcaaaggcatacgtcatcggaccgttagatgtaccaacccaagaaagaagtgtgtcctctctaccagacccagggaggctgaagactgtgaggattattcaaaatgctatgtgtggcgaatgggtgactggtctaagtgctcaattacctgtggcaaaggaatgcagtcccgtgtaatccaatgcatgcataagatcacaggaagacatggaaatgaatgtttttcctcagaaaaacctgcagcatacaggccatgccatcttcaaccctgcaatgagaaaattaatgtaaataccataacatcacccagactggctgctctgactttcaagtgcctgggagatcagtggccagtgtactgccgagtgatacgtgaaaagaacctatgtcaggacatgcggtggtatcagcgctgctgtgaaacatgcagggacttctatgcccaaaagctgcagcagaagagttgacctctagcaggctggctggatcacagctcttggcaattacattatttataaacacacacactagcatgtttttcagaccaaatattatcagattacatataatttaatcaaattaatttatttttttgcctgccaaacatccaatgtggtgcttgttttggttacacaaacattttgatttatactatatggcttcataaataattttatatgaatgaattagttggatccagtaatataataaaaagaaaaaggaaaaaaatagatcattatacttaaaacaagttttcgttgtttgttagggctatctctaaggtgctactctctccccaccaataacattgaattatccagaatgtatactgacttagcataatagtttaggtgtatatgaagagaaactatttttgttttttggtgtcctgctgcagaattagcccattttctgtcacctgcaggagatgtgtaaacataatgaacctcatgctgttgaacaggtttttagagaatgtattatgaatttggttcagatttatagacatccataggaaaaattctgctgtaattataaccttattttgatatggaaaagaaaagtcaaaatagagactttgatcatgttcatgaacatgtacttgaacacaagtattgtaacaatgaaacactgtaatgatttacactgaatcacaattgcactgttgatatagtgtagagaaatcgttagaaatggtgacatcttacaaaaaatgtgtattattttaacatgttatcactagattttagctttttttaaatatttttaacaaagaaaacattgatccacccatttccctgtatctttttagcagatttattaaagagtatagtacttagcctcacgaatcataattagaaaatttactagtatttctcagccttttccctaggaacaaggaaaaacagaaagcatataatacggtggtcgtttcattgtgtttttcttccttttaaaaattaaaaagttttacaattatgtgaaacgttcaaaagccagcttaaaatttttcttgtgagaaaatattatacatgattcacatgatttcttagatttttcaataaaatatgtaaaacttcccactgagagacaattcttcatagacttgtcacatatccacatgtctgatgaacaaaggtactgtctacttttgttctggagtatcttctagaggatgtttatagagtgaactgccttggaagatagtatgtctcttgggagcaaagggcaaacatacttctcattataaaagtttcaggttccctaaaattggggtttctttactataagacaatccaatgtatgttctgaggtcacctggctctcttcatgtcaccctttgggaaatggggctcaacgagccagtacaggaaaagctgattccctggctactactatcgctgtgagtaataaagtcctttgtgtctaatg

SEQ ID NO: 282 - DNA, 557 bp, Homo sapiens
  source 1..557: mol_type = genomic DNA
atggtcgatgcagctgtagtgacaatctcagagcagcttctacaccacagccatttccagcatgaagatcactgggggtctccttctgctctgtacagtggtctatttctgtagcagctcagaagctgctagtctgtctccaaaaaaagtggactgcagcatttacaagaagtatccagtggtggccatcccctgccccatcacatacctaccagtttgtggttctgactacatcacctatgggaatgaatgtcacttgtgtaccgagagcttgaaaagtaatggaagagttcagtttcttcacgatggaagttgctaaattctccatggacatagagagaaaggaatgatattctcatcatcatcttcatcatcccaggctctgactgagtttctttcagttttactgatgttctgggtgggggacagagccagattcagagtaatcttgactgaatggagaaagtttctgtgctacccctacaaacccatgcctcactgacagaccagcattttttttttaacacgtcaataaaaaaataatctcccagaaagtt

SEQ ID NO: 283 - DNA, 7356 bp, Homo sapiens
  source 1..7356: mol_type = genomic DNA
atgggctcggggcgcgtacccgggctctgcctgcttgtcctgctggtccacgcccgcgccgcccagtacagcaaagccgcgcaagatgtggatgagtgtgtggaggggactgacaactgccacatcgatgctatctgccagaacaccccgaggtcatacaagtgcatctgcaagtctggctacacaggggacggcaaacactgcaaagacgtggatgagtgcgagcgagaggataatgcaggttgtgtgcatgactgtgtcaacatccctggcaattaccggtgtacctgctatgatggattccacctggcacatgacggacacaactgtctggatgtggacgagtgtgccgagggcaacggcggctgtcagcagagctgtgtcaacatgatgggcagctatgagtgccactgccgggaaggcttcttcctcagcgacaaccagcatacctgtatccagcggccagaagaaggaatgaattgcatgaacaagaaccacggctgtgcccacatttgccgggagacacccaaggggggtattgcctgtgaatgccgtcctggctttgagcttaccaagaaccaacgggactgtaaattgacatgcaactatggtaacggcggctgccagcacacgtgtgatgacacagagcagggtccccggtgcggctgccatatcaagtttgtgctccataccgacgggaagacatgcatcgagacctgtgctgtcaacaacgggggctgtgacagtaagtgccatgatgcagcgactggtgtccactgcacctgccctgtgggcttcatgctgcagccagacaggaagacgtgcaaagatatagatgagtgccgcttaaacaacgggggctgtgaccatatttgccgcaacacagtgggcagcttcgaatgcagttgcaagaaaggctataagcttctcatcaatgagaggaactgccaggatatagacgagtgttcctttgatcgaacctgtgaccacatatgtgtcaacacaccaggaagcttccagtgtctctgccatcgtggctacctgttgtatggtatcacccactgtggggatgtggatgaatgcagcatcaaccggggaggttgccgctttggctgcatcaacactcctggcagctaccagtgtacctgcccagcaggccagggtcggctgcactggaatggcaaagattgcacagagccactgaagtgtcagggcagtcctggggcctcgaaagccatgctcagctgcaaccggtctggcaagaaggacacctgtgccctgacctgtccctccagggcccgatttttgccagagtctgagaatggcttcacggtgagctgtgggacccccagccccagggctgctccagcccgagctggccacaatgggaacagcaccaactccaaccactgccatgaggctgcagtgctgtccattaaacaacgggcctccttcaagatcaaggatgccaaatgccgtttgcacctgcgaaacaaaggcaaaacagaggaggctggcagaatcacagggccaggtggtgccccctgctctgaatgccaggtcaccttcatccaccttaagtgtgactcctctcggaagggcaagggccgacgggcccggacccctccaggcaaagaggtcacaaggctcaccctggaactggaggcagaggtcagagccgaagaaaccacagccagctgtgggctgccctgcctccgacagcgaatggaacggcggctgaaaggatccctgaagatgctcagaaagtccatcaaccaggaccgcttcctgctgcgcctggcaggccttgattatgagctggcccacaagccgggcctggtagccggggagcgagcagagccgatggagtcctgtaggcccgggcagcaccgtgctgggaccaagtgtgtcagctgcccgcagggaacgtattaccacggccagacggagcagtgtgtgccatgcccagcgggcaccttccaggagagagaagggcagctctcctgcgacctttgccctgggagtgatgcccacgggcctcttggagccaccaacgtcaccacgtgtgcaggtcagtgcccacctggccaacactctgtagatgggttcaagccctgtcagccatgcccacgtggcacctaccaacctgaagcaggacggaccctatgcttcccttgtggtgggggcctcaccaccaagcatgaaggggccatttccttccaagactgtgacaccaaagtccagtgctccccagggcactactacaacaccagcatccaccgctgtattcgctgtgccatgggctcctatcagcccgacttccgtcagaacttctgcagccgctgtccaggaaacacaagcacagactttgatggctctaccagtgtggcccaatgcaagaatcgtcagtgtggtggggagctgggtgagttcactggctatattgagtcccccaactacccgggcaactacccagctggtgtggagtgcatctggaacatcaaccccccacccaagcgcaagatccttatcgtggtaccagagatcttcctgccatctgaggatgagtgtggggacgtcctcgtcatgagaaagaactcatccccatcctccattaccacttatgagacctgccagacctacgagcgtcccattgccttcactgcccgttccaggaagctctggatcaacttcaagacaagcgaggccaacagcgcccgtggcttccagattccctatgttacctatgatgaggactatgagcagctggtagaagacattgtgcgagatggccggctctatgcctctgaaaaccaccaggagattttaaaggacaagaagctcatcaaggccttctttgaggtgctagcccacccccagaactacttcaagtacacagagaaacacaaggagatgctgccaaaatccttcatcaagctgctccgctccaaagtttccagcttcctgaggccctacaaatagtaaccctaggctcagagacccaattttttaagcccccagactccttagccctcagagccggcagccccctaccctcagacaaggaactctctcctctctttttggagggaaaaaaaaaatatcactacacaaaccaggcactctccctttctgtctttctagtttcctttccttgtctctctctgcctgcctctctactgttcccccttttctaacacactacctagaaaagccattcagtactggctctagtccccgtgagatgtaaagaaacagtacagccccttccactgcccattttaccagctcacattcccgaccccatcagcttggaagggtgctagaggcccatcaaggaagtgggtctggtgggaaacggggaggggaaagaagggcttctgccattatagggttgtgccttgctagtcaggggccaaaatgtcccctggctctgctccctagggtgattctaacagcccagggtcctgccaaagaagcctttgatttacaggcttaatgccagcaccagtcctctggggcacatggtttgagctctggacttcccacatggccagctttcttgtctatacagatcctctctttctttccctacgtctgcctggggtctactccataagggtttacaaatggcccacaacactgagttagtggacaccggctaaatgaggaagagcagcaggcattgtcatggtgaatgccccgctgtagctccctgagagaaagactgtaactctgcaggacagaaacaaggttttaaagcattgccaaaaaaaagaaaacagaaagaaaaaatgtatcatctaaaggactagacacagaacaattggaagtcaacttcaaacactaatcccttttcttgtcttccctggcccagccacctcctcagccccatgtgatgctccctgggggagccctactccccttgctacatgttgtccttaaacatggttattgacctgaagccagcctaggccttgccctacagttgtttttcccttgtagccccagctggcttgtgggcttcaccaaagaggaccccactctgaagccagcctggagccacctacctctggcctcaggctgtgggcagcaaaaggaatgtgtgtgcacttggcgagcctcctgcccaccctgtccacacctaataagtgcaatcattttgagtctttctatgttgtctagacggaggggtttttgttttctgggtttgttttttgtttttgtttcttcttcctctattagcaaaaccctatttatagctgcccaagagaaaagagtgtatgtttggagtggaagaaaatcggttttgaatctcatgaaccttgagtgctggagcatctgatctgtctctatgccaccactggccacctagagcccttggctgtggtaatccagggtaattgcgcagaggcatctgatgtgtaggaaagtaattctggggatttgatggagcagaaaggagagagacctatgtttgctaaaccaatcttgctatccctatgcctctccatggagtcagtgtggacctcatgattatagaggccaatggaactggtcagtgattctctaccccaagtagggaaaacctccatcttttccctgtcttcatcctgttatcccctggtgtacacatggaagaggaccaggacataccacctggggatgggctgactcagggtcccgaggccagagacaaagctgtgggagccaagaataagacagaaggcatcagatatttgcctggctctggtcacttccctttgaagttgacttcaagcttagcttcctcaactactgtttttcagaaggaagaaagaatcaaatggaagaagaatcaagtccatgcccaagcccaaagcctgcacacattctgcccttaatccaagtgttgcctataaaattattttctgttttctcactctagttcccccaaagctgtagtcccaatcaatcaaaggctaccaactgagtcctcaggttcatttcttttttttttttttttctttttaactctcctggtaactcacagaacagctcaggttcatttctaggtgactgtcctaggctactgctcccccaggagactcaacactaaataaaggagtctgactccctgccctcccatcagtagcattcatcagccaaaacggccatagcagtaggtagccaatgacacagctagattccctgacaaccattagccaacatcatggtccttgtgggtagagtgtctggctacctttgtctttctgggtcaaggagggccactgtaaagatgcaaaatggctgcttccaaacaagggaaatggtcatttagtatgagtgtctctgtacttcccaggaagcaccatgaaaactgctttaatcaactctgactatcctaattctccaccagaagctaggataactttctttctttctttctttttttttttttttttttttgagatggagtctcgctctgtcacccaggctggagtgtaatggtgctatctcggcctactgcaacctccgcctcccaggctcaagcaattctgcctcggcctcccaagtagctgggattacaggcatgcgccaccgcgcccagctaatttttgtatttttagtagagatggggtttcaccatgttgcccgggctggtcttgaactcttgacctcaggtgatccacccgcctcagtctcccaaagtgctgggattacaggcatgagccaccgcgcccagcctaggataactttctgattcctctctgccagccgttttgcgtctcttggaaagccaaacggtgaccatgcttcttaatttatgccttcagggtctggcttctcctttctcccttcctttcctgtcacaccatgcatacatacatacaaatacacatccttcaaccatttattccatggcttatgagacctgcaaatgagttccacagtacggaaggcatagaccactaggcttcttaattgatgtcaaggcagatcttggtgagcaggtaaaaacctgctattgtccaccaagtttaatttaggtcctccaagttggagggttaagaacccaggcaaagctgctgctgaatctatggaggaggctggccctgggacatcaaactaggggttaactggattgaatgaggagtcaacgctcagggacattctaggtctttacaggtcagacagaagagaggtttttaccattggagggaaatggaaagatggtataaataggatcccttcatgaagcaacccagaggcctctctgcagcgtgtagggtgtggggcgacagtattgtggggcttccattcatcttagtacaaaacctcacctgctctgagcctggaaatgggagggcttcacgcaccaagtaatgcacaccagaaaggcacttatatcctcagcaacatggcagttcctctttacttctctgcctccctctttctatattatcaggccatgcctattcctacaacctgagacaactcttggagtcagaagaaaactgaccagatcctggatctgagctgcctgctccaggcctagaaatccccaaaggctggcactgagctgtgactgctttaacagcccccaagatttggtcagtttgaggtggtggagactcagatttgttgctgaaagttcagtaacacagtcctggtctttggccctagagaaactttttatatgagaagtgttctctatatacatgtttgaggtgactctggaatggattatgaggtcatatctcaaaatgtcagaaaacgttatagagcactcgaacttttgtatttgctgcttaacctcaatattacagccacaaacaaggggtaccaagacaaagtataactgagcataagcagaaaatgttaaccctccaggtttctttcttaagcacaataaaagtgggagcgaacaacacaaggatatttttacatttgacccgtctcaaaagtagcacaccctatccttgtgccattatttgtacaaggaaatatatgattagaaggaatagaacccccagttgtcatcagcttttttagacaccacaggttgtagcagtttgaacaaactgaaaactttatacttctgtgtgagctgaactcaagtttcagaataatcatcgccatgtgggaggctttttgttaaatgcagaagaaatttcaaaatattgtatttatatctgccttccactgctgccaatttagtaagcatctcctatacaatcgacaataaacagcaaatgatgcagttcatagagtattttgcacttggggaaaaatatgtatctgaattgtaaaaagaaatgtttggattttgtatgtcttttttattattattaaaatactaaatgaaactcctca

SEQ ID NO: 284 - DNA, 5260 bp, Homo sapiens
  source 1..5260: mol_type = genomic DNA
acgcgaaggctctatcccacgaaaggactgggtgcaccccagaacgaggacgcggagcttccctgttccaagcagcaacagactgagaaaatccaagaaaggaggcccgaggggctgctgtggccccatcctcctggcacccgcggcccgggctctgcgacgcctttcgccccacctgcggaagcagcgatgcctggcggagcctgcgtgctggtgatcgcgctgatgttcctggcctggggggaagctcaggagtgctctcctgggggacaccagtttcttcggagtccttatagaagtgtccgttttgactcatggcacctccagcagtcagctgttcaagacctaatatgtgaccattccctctcccctggatggtatagatttctcatccttgacagacctgccgagatgccaaccaaatgtgttgagatgaaccattgtggaactcaggcccccatctggctgtctctgagagattcagaaacactgccatctcctggggagatcaagcaattgacagcttgtgcaacatggcagtttttgttcagcactacaaaagactgctgtctctttcaaatcccagtgtctgtaagaaactgtgggaacttttctgtatacttactacaaccaactcagggatgtatgggctactgtgcggaagctatttctgatgcacgattacacccatgtggttctgatgaaactgaaacaggaggtgattgtgttcgtcagctggctgcctcattgccacctccacctgcaggaaggccagaggttctggtggagttgattgagtccaggcttttctgtaggtgttcttttgatgttcccgctacaaaaaactcagtgggatttcacatagcttggtctaggctttcttctcaagaagtcaaagaggagctgacacaagagaccacagttcaggcattctctcttttagaacttgatggcataaatctcagacttggagacaggatattctgcagcgcttctgtctttttcttggagaatcctcatgtacaaagtgtagccatcgaaagccaagaattttttgcaggctttaagctacagcctgaattgagcactatatcagaggatgggaaagaatactacctgaggatagaaagcacagttcctattatttgttctgaatttagtgagcttgatcaagaatgcaaaatctcattaaaactgaaaactattggtcaaggtagagagcacctaggcttaaatttggcactgtcttcctgtcatgtggaccttctccagacatcttcctgtgctaatggaacctgtagccacacttttgtgtactacactgctgtcacagatttttctcgagatggagatagagtctcaaacattgtagtgcaaccaatagttaatgaggatttcctgtggaacaactacattccagacagcatccagatcaaagtaaaggatgtcccaactgcttactgctatacatttactgacccacatataattacatttgatggcagggtatatgataatttcaagactggaacatttgtgctttataagagtatgtcacgtgattttgaagtccatgtacgtcagtgggactgcagaagccttcactatccagtgtcatgtaattgtgggtttgttgcccaggaaggaggtgatatagttacttttgatatgtgcaatggtcagctacgtgaatcacaaccatatttgttcataaaaagccaagatgtaaccaggaatatcaagataagtgaatcttacttaggaagaaaagtcacaatctggttttcttctggggcatttatccgtgctgatcttggtgaatggggcatgagtctaacgatcagagcccctagtgtagattacagaaacactctgggactttgtggaacctttgatgaaaatccggaaaatgatttccatgacaaaaatgggatgcaaattgatcaaaattttaacaattatgttgcttttattaatgaatggaggattttaccaggaaaaagcatgtctgacacactgccagtttctatgacatcacctggaaagccatcctattgtagctgttcattggacactgcagcgtatccgtcttccgaagatctggacagtgtttctcgatcagaaattgccttgggttgcaaagacctcaatcatgtcagcttatcttctttgataccagaactagatgtcacctccgaatatattaattcagacactcttgtcagagagataaacaagcatacatctccagaagaatataatctaaatttatttctgcaagaaaaaaaacacataaacctgactaaactcggcttaaatgtacaaaaacatcctggaaatgagaaagaagattcactacaatatttggccaataagaaatatacacaaggccggggaagccacagccaagaaatgaggtacaatcgacaaaacagatggaaacggcagaactttcatgagtttcctcctttgtttgctttcccgagtctcagccaaacggatctggaagaacttacttattttttcccagaggaccatgctgaggatgtacagcaagagtttttcccctcttggcccactccctctggcctcaccgagtatagcaccttgaccctctgtcaggagactctagccaactccagcataggaaggctgtgtcttgcttttcttggcaagagattagacagtgttatagagatgtgtgtgaaggatgttctgttaaaagatgatcttagttgggcagaagcaggtgtggcccttttagaaaatgaatgtgaaaagaggattgtggaggaggggaaatataacacagaagagtatggcacatcaattgaagacattctctcagtattaaaatgccccaatttatgcagcggcaatgggcagtgcatggaatgggggtgtgcgtgttccccaagctttagttcctatgactgcagtgattcctatgacaaagctcctgaaattacagagcttgggaatgctggattctgtgatgttcaaaaatataattgtatgatggtgagagtttttggcaaaggcttcaaagaattaccttcaattaaatgtgaagttactaagctacagtataatagcagtgaatggatgcctggagaacccatctatacacagactgttttccacaatagcagagctgttgattgtcagctgcccactgatgttcagcagtttgataccatggatctggtgggtgggaaaccaactgggaagtggcagttgaaggtatctaatgatggttataaattcagtaatcccaaaataacggtcatatatgatggtgcttgccaagtttgtggtctctataaaaatgactcatgtactataaaggaaaatgtttgcattattgatggactctgctatgttgaaggagacaaaaatccaaccagcccttgtttgatttgtagacccaaaatttcaagatttacttggtcatttttagaaaacaaccagcccccagtgattcaagcattgcaagacaaattacagacattttatggtgaaaactttgagtatcagttcgtggccttcgatccagaaggttctgacatccattttacgttggactctggtcctgaaggggcaagtgtttcctctgcagggctttttatgtggaaaacagatttactaactacccaacaaattactgtacgccttaatgatgactgcgatgctgaaactagagtcacgattgaggtgactgtgaagtcttgtgattgcttgaatggtggatcatgtgtatctgataggaacttttctccagggagtggagtgtacctgtgtgtctgcttgcctggcttccatggcagcctttgtgaagtggacattagtgggtgccaatccaacccttgtggtcttggcagctatattagtggttttcacagttattcctgtgattgtccacctgagctcaaagttgaaacacagtttgtaaatcaatttactacacaaactgtggttctcacaagatctgataaaagtgtaaataaagaagaggatgataaaaatgcccaagggagaaagaggcatgttaagccaacaagtggaaatgccttcaccatttgtaaatatccatgtggaaaaagtagggagtgtgttgccccaaacatctgcaaatgtaaacctggttacattggttctaactgccaaactgctctttgtgaccctgattgcaaaaaccatggaaaatgtattaagcctaacatttgtcagtgtcttccaggacatggtggagcaacctgtgatgaagaacattgtaacccaccttgtcaacatggtggcacatgcttggctgggaatctctgcacttgtccttatggttttgtaggaccaaggtgtgaaacaatggtttgtaacaggcactgtgaaaatggaggccagtgtcttacaccagatatttgccagtgcaaacctggctggtatggacccacctgtagtacagctttgtgcgaccctgtctgcctcaatggtggttcgtgtaataagccaaatacttgcctctgtccaaatggattctttggggaacactgtcagaatgctttctgtcaccctccctgtaagaatggtggccactgcatgagaaataatgtgtgcgtctgtcgtgaaggatacactggtaggagattccaaaaaagcatctgtgatcctacgtgcatgaatggaggaaaatgtgtgggaccaagcacttgctcttgtccttctggttggagtgggaaacgatgcaacacacctatctgcttgcagaaatgtaaaaacggtggtgaatgcattgcgcccagcatatgccattgtccttcctcctgggaaggagtgcggtgtcaaataccaatttgcaacccaaaatgtctttatggaggcagatgcatatttcccaatgtgtgttcctgccgcactgaatactctggagtcaaatgtgagaagaaaatacagataagacgccattgagtagcatcaagtatatgaattacaagcctgtatcttaagaatggaaatattttgttcagaaaaagttggagataacttggagtttatttgaacatcattcaaaaaatatcttaaagactgaagaaactaataaaatacataatgatctctgttgtaatcatagagaaaagcaaagaagaaatccaggtaatctaaatttgatgttgagatgggataggatatttacatattgagatgatgtatctgatattccacccattcacaatatttaataaactgaatattttctcagccctaa

SEQ ID NO: 285 - DNA, 1140 bp, Homo sapiens
  source 1..1140: mol_type = genomic DNA
ggattttttagcttgcaaaaaaaatgagcaccaaacctgatatgattcaaaagtgtttgtggcttgagatccttatgggtatattcattgctggcaccctatccctggactgtaacttactgaacgttcacctgagaagagtcacctggcaaaatctgagacatctgagtagtatgagcaattcatttcctgtagaatgtctacgagaaaacatagcttttgagttgccccaagagtttctgcaatacacccaacctatgaagagggacatcaagaaggccttctatgaaatgtccctacaggccttcaacatcttcagccaacacaccttcaaatattggaaagagagacacctcaaacaaatccaaataggacttgatcagcaagcagagtacctgaaccaatgcttggaggaagacaagaatgaaaatgaagacatgaaagaaatgaaagagaatgagatgaaaccctcagaagccagggtcccccagctgagcagcctggaactgaggagatatttccacaggatagacaatttcctgaaagaaaagaaatacagtgactgtgcctgggagattgtccgagtggaaatcagaagatgtttgtattacttttacaaatttacagctctattcaggaggaaataagaatcatctaccttcaagcaagaattaacagagattgtggctacgcaaatgcaccaaaaaagggtgaaatatatctgaaatgtacctggttctgcccttggaagccatttcctgctcatgccactaacagcatgctgccaaactgttcagattcaagattattccaagcgcagggcccaaatgttatagccaaagaaagtcttatgataaaagtgaggcaaatttcagccaagaagttagaagagatgtttaaaagaacaagaacaaattgtggatcatggtatatgcaggctatcagcagaaggatcagacaataaaatgagttagtgcaaaccatttagtaaaaataactatcagcagagttgttccagattaaaaatagtactacaagcttgtaaaggagttaggacatgcaagctactgagcataaaatatatacttgctatttttcatgactttctctaataaagtctttgcctgttctctctaataa

SEQ ID NO: 286 - DNA, 2420 bp, Homo sapiens
  source 1..2420: mol_type = genomic DNA
aaagtggtgtcggagcagcgcctattagtgtcatcctcaccgtcacggccggcgcctcctcctggattcattcactcgctcttttcattcacgaaggtagtgaggcctagtggaaagccatggagagcgctctccccgccgccggcttcctgtactgggtcggcgcgggcaccgtggcctacctagccctgcgtatttcgtactcgctcttcacggccctccgggtctggggagtggggaatgaggcgggggtcggcccggggctcggagaatgggcagttgtcacaggtagtactgatggaattggaaaatcatatgcagaagagttagcaaagcatggaatgaaggttgtccttatcagcagatcaaaggataaacttgaccaggtttccagtgaaataaaagaaaaattcaaagtggagacaagaaccattgctgttgactttgcatcagaagatatttatgataaaattaaaacaggcttggctggtcttgaaatcggcatcttagtgaacaacgtgggaatgtcgtatgagtatcctgaatactttttggatgttcctgacttggacaatgtgatcaagaaaatgataaatattaatattctttctgtttgtaagatgacacaattggtactgcctggcatggtggaaagatccaaaggggctattctgaacatttcatctggcagtggcatgctccctgtcccactcttgaccatctattctgcaaccaagacttttgtagatttcttctctcagtgcctccatgaggagtataggagcaagggcgtctttgtgcagagtgtcctgccatacttcgtagctacaaaactggctaaaatccggaagccaactttggataagccctctccggagacgtttgtgaagtctgcaattaaaacagtcggcctgcaatcccgaaccaatggatacctgatccatgctcttatgggctcgataatctcaaacctgccttcttggatttatttgaaaatagtcatgaatatgaacaagtctacacgggctcactatctgaagaaaaccaagaagaactaagcattgataactgcattgtaacttggccagatgctccagcatatgcacgttcactgcaaagcaccctactggttttgaaaatctgaccttgtcatttcaatagttattaacatgactaaatattatcttaattaagaggaaaatagaagttgcttttaggggtttctgacatatattctggatactatccgaggtaattttgaagtttaatataaatgctcatatcaaatgaatatagaactaatattgtcgggaacacctaatagaaaggaatactattatagcaaatcacagaatgatagactcaagcataaaacttggcagttttatctgcttcaaaatgccattgatcattattcctgtattttctctgaaactgattataaaaaccaatgtccagctactcttttgtttttgacacttgaagaaatggagatcgatttgatttgtttataagcagacacactgcaatttacaaagatctctttacggttttataaaattatcttccagtttgtacatttatatggaattgttctttatcaagggtagctaatgacatgaaaataattgtgaaatatggaattatttctgacacatgaagcccactaaactatgctttcttataatgcatatttcttctcagtttaaatgtatgtaaatatcgaagctatatggtatgatttataaagataaatgggccaaagtgtacattgagactggcagccatctatggtaccactgaaaccctgacccagaaaagtggcttgcttggacacccagctgcctttgtttctgcattaaaccaatattgatcacacatatgacacaggctagtcctataaaagtaatgacttcatagaaatggcattataatttttaagttgatactctacaggtagctattgatataattagttttaataaaacatgctgcaaccatggtatacaacaaaaatacatttctttggtgattgaaattaaggccgtatttacaatgacttaatataagactgacttttatcctgcttcataacttgtatggagaactcaccaagaaagaattcaatactgtgaaatatgcagcaagaagattggtctttacctaggctgtgtttcctaagctctgagttttcagcaccagtagatttgtattaaaagaaaaaaaaatggggccttagcttctggcttttaattttgccagctaaggacataaaacaaaaataaacaaacaaaaacaaatagccatctgctatcagcatcattatgtaaaagaaaatatattttagcccctaaaattaggaagaatgtaatctcagaataaaggttgtcatttaagttgaataaatatatagctttatg

SEQ ID NO: 287 - DNA, 2786 bp, Homo sapiens
  source 1..2786: mol_type = genomic DNA
cctccccagtagacgctcgggcaccagccgcggcaaggatggagctgggttgctggacgcagttggggctcacttttcttcagctccttctcatctcgtccttgccaagagagtacacagtcattaatgaagcctgccctggagcagagtggaatatcatgtgtcgggagtgctgtgaatatgatcagattgagtgcgtctgccccggaaagagggaagtcgtgggttataccatcccttgctgcaggaatgaggagaatgagtgtgactcctgcctgatccacccaggttgtaccatctttgaaaactgcaagagctgccgaaatggctcatgggggggtaccttggatgacttctatgtgaaggggttctactgtgcagagtgccgagcaggctggtacggaggagactgcatgcgatgtggccaggttctgcgagccccaaagggtcagattttgttggaaagctatcccctaaatgctcactgtgaatggaccattcatgctaaacctgggtttgtcatccaactaagatttgtcatgttgagcctggagtttgactacatgtgccagtatgactatgttgaggttcgtgatggagacaaccgcgatggccagatcatcaagcgtgtctgtggcaacgagcggccagctcctatccagagcataggatcctcactccacgtcctcttccactccgatggctccaagaattttgacggtttccatgccatttatgaggagatcacagcatgctcctcatccccttgtttccatgacggcacgtgcgtccttgacaaggctggatcttacaagtgtgcctgcttggcaggctatactgggcagcgctgtgaaaatcttctggaggctgggaagtccaagatcaaggcgtcagaagattcattgtctgtccttgaagaaagaaactgctcagaccctgggggcccagtcaatgggtaccagaaaataacagggggccctgggcttatcaacggacgccatgctaaaattggcaccgtggtgtctttcttttgtaacaactcctatgttcttagtggcaatgagaaaagaacttgccagcagaatggagagtggtcagggaaacagcccatctgcataaaagcctgccgagaaccaaagatttcagacctggtgagaaggagagttcttccgatgcaggttcagtcaagggagacaccattacaccagctatactcagcggccttcagcaagcagaaactgcagagtgcccctaccaagaagccagcccttccctttggagatctgcccatgggataccaacatctgcatacccagctccagtatgagtgcatctcacccttctaccgccgcctgggcagcagcaggaggacatgtctgaggactgggaagtggagtgggcgggcaccatcctgcatccctatctgcgggaaaattgagaacatcactgctccaaagacccaagggttgcgctggccgtggcaggcagccatctacaggaggaccagcggggtgcatgacggcagcctacacaagggagcgtggttcctagtctgcagcggtgccctggtgaatgagcgcactgtggtggtggctgcccactgtgttactgacctggggaaggtcaccatgatcaagacagcagacctgaaagttgttttggggaaattctaccgggatgatgaccgggatgagaagaccatccagagcctacagatttctgctatcattctgcatcccaactatgaccccatcctgcttgatgctgacatcgccatcctgaagctcctagacaaggcccgtatcagcacccgagtccagcccatctgcctcgctgccagtcgggatctcagcacttccttccaggagtcccacatcactgtggctggctggaatgtcctggcagacgtgaggagccctggcttcaagaacgacacactgcgctctggggtggtcagtgtggtggactcgctgctgtgtgaggagcagcatgaggaccatggcatcccagtgagtgtcactgataacatgttctgtgccagctgggaacccactgccccttctgatatctgcactgcagagacaggaggcatcgcggctgtgtccttcccgggacgagcatctcctgagccacgctggcatctgatgggactggtcagctggagctatgataaaacatgcagccacaggctctccactgccttcaccaaggtgctgccttttaaagactggattgaaagaaatatgaaatgaaccatgctcatgcactccttgagaagtgtttctgtatatccgtctgtacgtgtgtcattgcgtgaagcagtgtgggcctgaagtgtgatttggcctgtgaacttgggctgtgccagggcttctgacttcagggacaaaactcagtgaagggtgagtagacctccattgctggtaggctgatgccgcgtccactactaggacagccaattggaagatgccagggcttgcaagaagtaagtttcttcaaagaagaccatatacaaaacctctccactccactgacctggtggtcttccccaactttcagttatacgaatgccatcagcttgaccagggaagatctgggcttcatgaggccccttttgaggctctcaagttctagagagctgcctgtgggacagcccagggcagcagagctgggatgtggtgcatgcctttgtgtacatggccacagtacagtctggtccttttccttccccatctcttgtacacattttaataaaataagggttggcttctgaactacaaaacaaa

SEQ ID NO: 288 - DNA, 4687 bp, Homo sapiens
  source 1..4687: mol_type = genomic DNA
aggttgcgacttcccttccctaccctgctcggctgcgtagtgcgctccccgcccagcctgcagagctcgcgccgcggcagcccagccgctcggccccgccgcgctcgcagaggccgccatgggcaccgcgcgctggctcgcgctgggcagcctcttcgccctggctgggctgctggaaggccggctcgtgggcgaggaggaagccggctttggcgaatgtgacaagttcttctacgccgggaccccgcctgcggggctggcggccgattcccacgtgaagatctgtcagcgcgcggagggtgctgagcgcttcgccaccctctacagcacccgggaccgcatccccgtgtactccgcgttccgcgccccgcgccctgcgcccggcggcgccgagcagcgatggctggtggagccgcagatcgatgaccccaacagcaaccttgaggaggcgattaatgaggcagaggccatcacctctgtgaacagcctgggaagcaagcaagccttgaatacagattaccttgattctgattaccaaagaggacagctttacccattctcccttagcagtgatgtccaggtggccacatttactctcacaaattcagccccaatgactcagtccttccaggaacggtggtatgtgaatctccacagcctaatggaccgggctttgaccccacagtgtggcagtggggaagacctatatatcctcacaggcacagtgccctcagactacagagttaaagacaaagtggcagtccctgagtttgtttggctggcagcctgttgtgctgtccctggaggaggctgggccatgggctttgtcaagcacacccgggacagtgacatcatagaagatgtgatggtaaaagatcttcagaaactgcttccatttaaccctcagctgtttcagaacaactgtggtgaaactgagcaagacacagagaaaatgaaaaaaatcctggaagtggttaaccaaatccaggatgaagaacgaatggtacaatctcaaaagagttctagtcccctttctagcaccaggagcaagaggtctactctgttgcctccagaggcatctgagggaagtagtagctttttgggaaaactcatgggcttcattgctaccccattcatcaagctttttcaattaatttattaccttgtggtagcaatcctgaagaacattgtctatttcctgtggtgtgttaccaagcaggtgattaatggcatagaaagttgcctttaccgcctgggctcagccaccatctcatacttcatggccattggggaagagttggtgagcattccctggaaggtgctcaaggtcgtggccaaagtcatcagggctctcctccggatcctttgttgtctgctgaaggccatttgccgagttctgagcatccctgtccgtgtccttgtggatgtggccactttccctgtgtacaccatgggcgctattccaattgtttgcaaggacattgcactgggccttggtggcactgtctcactgctctttgacactgcttttggtaccctgggtggcctatttcaggtggtttttagtgtctgcaagcggattggctacaaggttacttttgacaattctggggagttataaactcaaaaaactaatagtatccagtcacagtgaatttgaaagctggaatagtttgtctttacaatgggtttctgttcactgtcagttatcattatattttggcctttggtggggatgtctgcttgtttttgcaaaagaagatggcagaatttagacttgacagaggagaaatgctcagggtgagattaggtgtagtaatctgctgtttacctccagttatatgtgcaaactcccaagccactaataacttcagttatgcactctaacacagacgaccacctgaaatgcactggtatttatttctgataattaaaaattacaggggagggaagaactagaaaaagaacaactttagaccaaaggtgtctgagaaaaggagaaagggagcttgttcttcccattgctctttgtgatttaaggcaaaacagattaaaaaaaaaatctgcagccaatttcttggcatttgcttctctttctcctcaactcgactgaccttggtggaatgcagataatgcctctttgttgaaataactttgtgggaatgtacaattttctatatctcttagctttccgtggttctcaaggatatgtacagttttcattttcctccaaagttgaattttgctacatttttcttttaggtaatgataagcattttttaaaaaatcatttttaggtaatggtaagcattttatgccaaatgtggcataacagagtttgaattgaagggcaaagttttcttttcttttttttttgggccccttgaatggtataatacagtcctctccggtggaaagaagagaagagaaggtggacagccctgctcttagtaggtgctgcagatccaaggacatcttttgtccagcttggattaacttgacgtgtatccctgcctgacaaggttgaactgaaagatctatatgttaagctaacatgaaaattcatattctgcaacatagtagatttttctaatgcatgaaataagtacccagcacagtaaaaatactctgacttatgtccctaaatggttgttttgatacaactatatagaaaagagccacaaaataaagataaaagttattgtggccatctctgaaaaaaatatataaaatatttaagaataattatatcttaggaaattatttttacagtgtgtttgaggctacaaacataactcccccattaatacaaattaaatgtgagagctcattctcaaaatttttttgatcaagcacttgtcattttaaatcttgcactaaaaaatggtaacaagagggaccaaactttgcttcccacaattgggatggaatcacctggatttttctgaatgttttaaagaattgctgagaggtagaaacagccaagtatgaaatactgatcttggggctaccgcccaggatcaatcagaaagttatatgcaaaaattcggggtcccaacaaggagagaacaatatgtcaaccatttgcatggggtcgatggatgagaaacatgagcgtagcaagagttacattttgcagaaaaatagcggaggcacacccagagtagaacagcagccagcaagctgccatcctgatcaatttgtgatgcaaggttagggagtatgagcaccgcatgggtccatgctagggagatgtgcaccaggcttagctaagaaacttaaagcagtattttaccaactcttgtcttagggagcataaagtttggatgtccctttatttcagcagtgtgaaggtaaatggaagggtgagggtttgacttggtactgattggtcaagaatcctgctggataaagaaaaggaattttagaagtgaccagagggacagtccagccaaactattatttgataaggaacccaaggccctgggaggcaacaggctagcccttagtttcatggctagctgagagcagattaggagccaacgttgtttgcacatgtcccatcacacctgagatgtcagacatgggaagttcgtgctattattcagttgcctctctggaccatggcaagatttcctcattcatcaaacagactccaggccctgacaaagcagttggatttggcatgtgtgatgaaaacaattagccatccatgtacaacattatgcttactgcatcccatggaaacttaattccctcctagcacatatttgcatactgaaaggtccgaaaagggcatccacggcagcttgagccccttagcaccatgtaaggagcacagcatccaaacggcttcttgagaaccattggggaatgtctttctttttcacatccaattgtttagtgtctatttattcttgggtggccagttttgaaacctaaaaagggacaataaagcaaaaagtatcagtaaggataggtggctgagacccactgccctgagctactagtgtggctgtgcctgtgggtctctagaaccatctgcattggacgtgaagccacagcaggtggctggactgctggcctgttcctaatgagctacgctgggctttgaggtagaggttggggtttatgaaccccaactctggcttaaagatcttgctgtggctctgttatgttctgaggccttgggattagcctcttcctcattatggagctgattttctagtctgtggatcagctatgcctttggacacttctcttttccattgtgccttttgaatgttgtcttctcactcagcatcagcacttcgatctaaatgcagactaggtagttgggaggaggaaccaaagtgaaccatccttcatttattcagtcattcgttcatctgtcaaacacgtatttggacatcaaggttgcagagatgaacaatgcatggatttcatctttgaggagttcaaaacctagtggagagaacacatggtacaatcgtaacacatgaaggacaagtaagtgctgcagtaaaggtactaataacatgttccttggaacagaggaagaaaaaccacgaaaccatggaaattagggaagcctttacagagggtgtgacaaaactcaatttgacattttcaagctatgtacaatgatgtgcaccttgcagatgctcaataaagtaattactgacaa

SEQ ID NO: 289 - DNA, 512 bp, Homo sapiens
  source 1..512: mol_type = genomic DNA
ctgctgcttgctgcaccatgaagtctgccaagctgggatttcttctaagattcttcatcttctgctcattgaataccctgttattgggtggtgttaataaaattgcggagaagatatgtggagacctcaaagatccctgcaaattggacatgaattttggaagctgctatgaagttcactttagatatttctacaacagaacctccaaaagatgtgaaacttttgtcttctccggctgtaatggcaaccttaacaacttcaagcttaaaatagaacgtgaagtagcctgtgttgcaaaatacaaaccaccgaggtgagaggatgtgaactcatgaagttgtctgctgcaccatccgaaataaagacacaagaaaattcagactgattttgaaatctttgtaatatttccataatgctttaagcttccatatgtttgctattttcctgaccctagttttgtctttcctggaaattaactgtatgatcattagaatgaaagagtctttctgtca

SEQ ID NO: 290 - DNA, 747 bp, Homo sapiens
  source 1..747: mol_type = genomic DNA
ccagcaggaggcacaggaaaactgcaagccgctctgttcctgggcctcggaagtgatgcctatggcgtcccctcaaaccctggtcctctatctgctggtcctggcagtcactgaagcctggggccaggaggcagtcatcccaggctgccacttgcaccccttcaatgtgacagtgcgaagtgaccgccaaggcacctgccagggctcccacgtggcacaggcctgtgtgggccactgtgagtccagcgccttcccttctcggtactctgtgctggtggccagtggttaccgacacaacatcacctccgtctctcagtgctgcaccatcagtggcctgaagaaggtcaaagtacagctgcagtgtgtggggagccggagggaggagctcgagatcttcacggccagggcctgccagtgtgacatgtgtcgcctctctcgctactagcccatcctctcccctccttcctcccctgggtcacagggcttgacgttctggtgggggaaacctgtgttcaagattcaaaaactggaaggagctccagccctgatggttacttgctatggaatttttttaaataaggggagggttgttccagctttgatcctttgtaagattttgtgactgtcacctgagaagaggggagtttctgcttcttccctgcctctgcctggcccttctaaaccaatctttcatcattttacttccctctttgcccttacccctaaataaagcaagcagttcttgaa

SEQ ID NO: 291 - DNA, 2570 bp, Homo sapiens
  source 1..2570: mol_type = genomic DNA
aaaacagacagtgtttgtctctcaagttaaaccaacaagccgatagaaaaaggtagttatcaagagatttttaaaacttcaaccctttttctcttatagttagtgaagagagtagaatatctccagttttggctgacatctctacaacctgaacaattggcttaaacttcacttgggattcccggttgcttgttttagcatggcaaaatttggcgttcacagaatccttcttctggctatttctctgacaaagtgtctggagagtacaaaactgctggcagaccttaaaaaatgtggtgacttggaatgtgaagctttaataaacagagtctcagccatgagagattatagaggacctgactgccgatacctgaacttcactaagggagaagagatatctgtttatgttaaacttgcaggagaaagggaagatttgtgggcaggaagtaaaggaaaggagtttggatattttcccagagatgcagtccagattgaagaggtgttcatatctgaggaaattcagatgtcaacgaaagaatctgactttctttgtcttcttggagtaagttacacatttgacaatgaagatagtgaattaaacggtgattatggtgaaaatatatatccttatgaagaagataaagatgaaaaatctagtatatatgaaagtgattttcagatagaacctggattttatgcaacttatgaaagtactttgtttgaagaccaagttccagcattagaggctcctgaagatatcggaagtaccagtgaatcaaaagactgggaagaagtagttgttgaaagtatggaacaggatcgtattccagaagtgcatgtcccaccatcttcagctgtgtctggagtcaaagaatggtttggattgggaggagaacaagctgaagagaaggcttttgaatcagttattgaacctgtacaagaaagctcatttcggagtagaaaaatagcagtggaagatgagaatgacctagaggaattaaataatggtgagcctcaaacagaacatcagcaagaatctgaatcagaaattgattcagtgccaaagacacagtctgaactagcatctgagtcagagcacattcccaaacctcaatccactggttggtttggtggaggatttacaagttatttaggttttggagatgaggatacagggcttgaattaatagctgaagaaagcaatccaccactacaagattttcccaattccatatcatctgataaagaagccacagttccatgtacagaaatattaacagaaaaaaaagacacaatcactaatgatagcttgagtctcaagccaagttggtttgattttggttttgctatactaggctttgcatatgccaaggaagataaaattatgttagatgacaggaaaaatgaagaagatggtggggcagatgaacatgaacatcctctaacaagtgaattagaccctgaaaaagaacaagaaatagaaacgataaaaattatagaaacagaagatcaaatagacaagaaaccagtctcagaaaaaacagacgaatctgatactataccatatttgaaaaagttcttgtataattttgacaacccttggaacttccagaacattccaaaggaaacagaattgccatttcccaaacagatactggatcaaaataatgtaattgaaaatgaagaaactggagaattttccattgataattatcccacagataatacaaaagttatgatattcaaaagttcatacagtctgtcagatatggtctctaacatagagttacctacgagaattcacgaagaagtatattttgaaccctcatcttctaaagatagtgatgaaaattcgaaaccatcagtagacaccgaagggcctgctctggtggagatagacagatctgtggaaaataccctgctaaatagtcagatggtttcaactgataactctttgtcttctcaaaattatatttctcagaaagaagatgcttctgagtttcagattctgaaatacttattccaaattgatgtttatgatttcatgaattctgcattttcaccaattgtaattcttacagaaagggtaagtttgccttttaaaccttttgcaataattttacctattttgctaaatataagagtggctacaaaatatgtttgaatgaatcctccctgtttaatgtttatataatgtttctctttccatgacatcttacctgtaagatttctctttatatgaatgttttgtcaaatggatattgatttttaaaaacatttccctaagttttgttgatgttgatcttgagcggtgtttgctttttactccaccctccccatttttcaaattagggaaagttaggtactaaataagttaactcaggaataataggaactagagctgggtgtggtggtgtgtgcctggagttcccactacttaggaggctgaggcaggaggatccttttactgaatgtaacaaggagaataaaagggaagagtgagcccaagggtttgagaccagtctgggcaacatagctagaccttatctcttaaaaaagaaaaaaaaaaa

SEQ ID NO: 292 - DNA, 4011 bp, Homo sapiens
  source 1..4011: mol_type = genomic DNA
cgcgggtcccgggcaggagagcccgccagagccggtgctgcctggcgccgagaggcccggactggcgactgctgccgcgccaccggggcccacctgcgcagggacgctcggcctcaggccctctgggctgctccaccctgctccggccgcaggcgagcggcgaggggaggggggcacggtttatgtgcagtggggcgggcggcgtccgcgcggcttccccgaggccggaggcggggcgggcgggcctcgggtggcgcggggggcggacccgccagctgcctgcgctgctcgccagcttgctcgcactcggctgtgcggcggggcaggcatgggagccgcgcgctctctcccggcgcccacacctgtctgagcggcgcagcgagccgcggcccgggcgggctgctcggcgcggaacagtgctcggcatggcagggattccagggctcctcttccttctcttctttctgctctgtgctgttgggcaagtgagcccttacagtgccccctggaaacccacttggcctgcataccgcctccctgtcgtcttgccccagtctaccctcaatttagccaagccagactttggagccgaagccaaattagaagtatcttcttcatgtggaccccagtgtcataagggaactccactgcccacttacgaagaggccaagcaatatctgtcttatgaaacgctctatgccaatggcagccgcacagagacgcaggtgggcatctacatcctcagcagtagtggagatggggcccaacaccgagactcagggtcttcaggaaagtctcgaaggaagcggcagatttatggctatgacagcaggttcagcatttttgggaaggacttcctgctcaactaccctttctcaacatcagtgaagttatccacgggctgcaccggcaccctggtggcagagaagcatgtcctcacagctgcccactgcatacacgatggaaaaacctatgtgaaaggaacccagaagcttcgagtgggcttcctaaagcccaagtttaaagatggtggtcgaggggccaacgactccacttcagccatgcccgagcagatgaaatttcagtggatccgggtgaaacgcacccatgtgcccaagggttggatcaagggcaatgccaatgacatcggcatggattatgattatgccctcctggaactcaaaaagccccacaagagaaaatttatgaagattggggtgagccctcctgctaagcagctgccagggggcagaattcacttctctggttatgacaatgaccgaccaggcaatttggtgtatcgcttctgtgacgtcaaagacgagacctatgacttgctctaccagcaatgcgatgcccagccaggggccagcgggtctggggtctatgtgaggatgtggaagagacagcagcagaagtgggagcgaaaaattattggcattttttcagggcaccagtgggtggacatgaatggttccccacaggatttcaacgtggctgtcagaatcactcctctcaaatatgcccagatttgctattggattaaaggaaactacctggattgtagggaggggtgacacagtgttccctcctggcagcaattaagggtcttcatgttcttattttaggagaggccaaattgttttttgtcattggcgtgcacacgtgtgtgtgtgtgtgtgtgtgtgtgtaaggtgtcttataatcttttacctatttcttacaattgcaagatgactggctttactatttgaaaactggtttgtgtatcatatcatatatcatttaagcagtttgaaggcatacttttgcatagaaataaaaaaaatactgatttggggcaatgaggaatatttgacaattaagttaatcttcacgtttttgcaaactttgatttttatttcatctgaacttgtttcaaagatttatattaaatatttggcatacaagagatatgaattcttatatgtgtgcatgtgtgttttcttctgagattcatcttggtggtgggtttttttgtttttttaattcagtgcctgatctttaatgcttccataaggcagtgttcccatttaggaactttgacagcatttgttaggcagaatattttggatttggaggcatttgcatggtagtctttgaacagtaaaatgatgtgttgactatactgatacacatattaaactataccttatagtaaaccagtatcccaagctgcttttagttccaaaaatagtttcttttccaaaggttgttgctctactttgtaggaagtctttgcatatggccctcccaactttaaagtcataccagagtggccaagagtgtttatcccaacccttccatttaacaggatttcactcacatttctggaactagctatttttcagaagacaataatcagggcttaattagaacaggctgtatttcctcccagcaaacagttgtggccacactaaaaacaatcatagcattttacccctggattatagcacatctcatgttttatcatttggatggagtaatttaaaatgaattaaattccagagaacaatggaagcattgcctggcagatgtcacaacagaataaccacttgtttggagcctggcacagtcctccagcctgatcaaaaattattctgcatagttttcagtgtgctttctgggagctatgtacttcttcaatttggaaacttttctctctcatttatagtgaaaatacttggaagttactttaagaaaaccagtgtggcctttttccctctagctttaaaagggccgcttttgctggaatgctctaggttatagataaacaattaggtataatagcaaaaatgaaaattggaagaatgcaaaatggatcagaatcatgccttccaataaaggcctttacacatgttttatcaatatgattatcaaatcacagcatatacagaaaagacttggacttattgtatgtttttattttatggctctcggcctaagcacttctttctaaatgtatcggagaaaaaatcaaatggactacaagcacgtgtttgctgtgcttgcaccccaggtaaacctgcattgtagcaatttgtaaggatattcagatggagcactgtcacttagacattctctgggggattttctgcttgtctttcttgagctttttggaaggataattctgataaggcactcaagaaacgtacaaccacagtgctttcttcaaatcatatgagaaatactatgcatagcaaggagatgcagagccgccaggaaaattctgagttccagcacaattttctttggaatctaacaggaatctagcctgaggaagaagggaggtctccatttctatgtctggtatttgggggttttgtttgtttttgctttagcttggtgaaaaaaagttcactgaacaccaagaccagaatggatttttttaaaaaaatagatgttccttttgtgaagcaccttgattccttgattttgattttttgcaaagttagacaatggcacaaagtcaaaatgaaatcaatgtttagttcacaagtagatgtaatttactaaagaatgatacacccatatgctatatacagcttaactcacagaactgtaaaagaaaattataaaataattcaacatgtccatctttttagtgataataaaagaaagcatggtattaaactatcatagaagtagacagaaaaagaaaaaaggactcatggcattattaatataattagtgctttacatgtgttagttatacatattagaagcatatttgcctagtaaggctagtagaaccacatttcccaaagtgtgctccttaaacactcatgccttatgattttctaccaaaagtaaaaagggttgtattaagtcagaggaagatgcctctccattttccctctctttatcagaggttcacatgcctgtctgcacattaaaagctctgggaagacctgttgtaaagggacaagttgaggttgtaaaatctgcatttaaataaacatctttgatcac

SEQ ID NO: 293 - DNA, 2169 bp, Homo sapiens
  source 1..2169: mol_type = genomic DNA
tcacacagccacagccccagagctaggaactgctggctagggcaagcagacagctgaatcctagccaactggaggtggagcagaggtggagccagggagacccaggtggcctctctcagagtggagcacaggtggcagagtggcccggggcagcatgaagtggtgctggggcccagtgctgctcatcgcgggtgccacagtcctcatggagggtcttcaagccgctcagcgtgcctgtggacagcgtggccccggcccccccaagcctcaggagggcaacacagtccctggcgagtggccctggcaggccagtgtgaggaggcaaggagcccacatctgcagcggctccctggtggcagacacctgggtcctcactgctgcccactgctttgaaaaggcagcagcaacagaactgaattcctggtcagtggtcctgggttctctgcagcgtgagggactcagccctggggccgaagaggtgggggtggctgccctgcagttgcccagggcctataaccactacagccagggctcagacctggccctgctgcagctcgcccaccccacgacccacacacccctctgcctgccccagcccgcccatcgcttcccctttggagcctcctgctgggccactggctgggatcaggacaccagtgatgctcctgggaccctacgcaatctgcgcctgcgtctcatcagtcgccccacatgtaactgtatctacaaccagctgcaccagcgacacctgtccaacccggcccggcctgggatgctatgtgggggcccccagcctggggtgcagggcccctgtcagggagattccgggggccctgtgctgtgcctcgagcctgacggacactgggttcaggctggcatcatcagctttgcatcaagctgtgcccaggaggacgctcctgtgctgctgaccaacacagctgctcacagttcctggctgcaggctcgagttcagggggcagctttcctggcccagagcccagagaccccggagatgagtgatgaggacagctgtgtagcctgtggatccttgaggacagcaggtccccaggcaggagcaccctccccatggccctgggaggccaggctgatgcaccagggacagctggcctgtggcggagccctggtgtcagaggaggcggtgctaactgctgcccactgcttcattgggcgccaggccccagaggaatggagcgtagggctggggaccagaccggaggagtggggcctgaagcagctcatcctgcatggagcctacacccaccctgaggggggctacgacatggccctcctgctgctggcccagcctgtgacactgggagccagcctgcggcccctctgcctgccctatcctgaccaccacctgcctgatggggagcgtggctgggttctgggacgggcccgcccaggagcaggcatcagctccctccagacagtgcccgtgaccctcctggggcctagggcctgcagccggctgcatgcagctcctgggggtgatggcagccctattctgccggggatggtgtgtaccagtgctgtgggtgagctgcccagctgtgagggcctgtctggggcaccactggtgcatgaggtgaggggcacatggttcctggccgggctgcacagcttcggagatgcttgccaaggccccgccaggccggcggtcttcaccgcgctccctgcctatgaggactgggtcagcagtttggactggcaggtctacttcgccgaggaaccagagcccgaggctgagcctggaagctgcctggccaacataagccaaccaaccagctgctgacaggggacctggccattctcaggacaagagaatgcaggcaggcaaatggcattactgcccctgtcctccccaccctgtcatgtgtgattccaggcaccagggcaggcccagaagcccagcagctgtgggaaggaacctgcctggggccacaggtgcccactccccaccctgcaggacaggggtgtctgtggacactcccacacccaactctgctaccaagcaggcgtctcagctttcctcctcctttaccctttcagatacaatcacgccagccacgttgttttgaaaatttctttttttggggggcagcagttttcctttttttaaacttaaataaattgttacaaaataga

SEQ ID NO: 294 - DNA, 3102 bp, Homo sapiens
  source 1..3102: mol_type = genomic DNA
ttttccattaaaagcactgcaaattttagcctctaatgagattggagtcagttgacttggctttaaatattgcctcttccattttccagcttctgttactagccattgtgagcttcagtttcttcatctgcaaaatgggcataatacaatctattcttgccacatcaagggattgttattcctttaaaaaaaaaccaataccaaagaagcctacaatgttggccttagccaaaattctgttgatttcaacgttgttttattcacttctatcggggagccatggaaaagaaaatcaagacataaacacaacacagaacattgcagaagtttttaaaacaatggaaaataaacctatttctttggaaagtgaagcaaacttaaactcagataaagaaaatataaccacctcaaatctcaaggcgagtcattcccctcctttgaatctacccaacaacagccacggaataacagatttctccagtaactcatcagcagagcattctttgggcagtctaaaacccacatctaccatttccacaagccctcccttgatccatagctttgtttctaaagtgccttggaatgcacctatagcagatgaagatcttttgcccatctcagcacatcccaatgctacacctgctctgtcttcagaaaacttcacttggtctttggtcaatgacaccgtgaaaactcctgataacagttccattacagttagcatcctctcttcagaaccaacttctccatctgtgacccccttgatagtggaaccaagtggatggcttaccacaaacagtgatagcttcactgggtttaccccttatcaagaaaaaacaactctacagcctaccttaaaattcaccaataattcaaaactctttccaaatacgtcagatccccaaaaagttctgcgattagacaatgcaccggaaccttatgatgtgagttttgggaattctagctactacaatccaactttgaatgattcagccatgccagaaagtgaagaaaatgcacgtgatggcattcctatggatgacatacctccacttcgtacttctgtatagaactaacagcaaaaaggcgttaaacagcaagtgtcatctacatcctagccttttgacaaattcatctttcaaaaggttacacaaaattactgtcacgtggattttgtcaaggagaatcataaaagcaggagaccagtagcagaaatgtagacaggatgtatcatccaaaggttttctttcttacaatttttggccatcctgaggcatttactaagtagccttaatttgtattttagtagtattttcttagtagaaaatatttgtggaatcagataaaactaaaagatttcaccattacagccctgcctcataactaaataataaaaattattccaccaaaaaattctaaaacaatgaagatgactctttactgctctgcctgaagccctagtaccataattcaagattgcattttcttaaatgaaaattgaaagggtgctttttaaagaaaatttgacttaaagctaaaaagaggacatagcccagagtttctgttattgggaaattgaggcaatagaaatgacagacctgtattctagtacgttataattttctagatcagcacacacatgatcagcccactgagttatgaagctgacaatgactgcattcaacggggccatggcaggaaagctgaccctacccaggaaagtaatagcttctttaaaagtcttcaaaggttttgggaattttaacttgtcttaatatatcttaggcttcaattatttgggtgccttaaaaactcaatgagaatcatggtaaaaaaaaaaagttaaccaaagaatatacctgtacataatttgtacagttttaagttgttagataggaactggatttcttatgtattagacattattgctcaatcataatggaatagattctgcatccctaaatgtatgaaccataaggttaaaaaagatgaatggaaatatcaaacaactttttactgagcatcagtttcataatcaataatataagaagattaatttggattctagtatgtttcagtttgtttttaattaccaccttcctttggtagaaaaaatatgttccttgatgtaggaaagtctaggttttagagattagaggatgagatcaagagttaaattcctaaagaagcactgaatatatgaagagagcaaacaaatcaagtaccaacctagaggctttatttttgaattgattcatggtgtgtgtgtgtgtgtgtgtgtgtgtgtgtgtgtgtgtgtaacacagaaacagcttcagaaaataagggatagaaagtaatgaagaaagtacttaccccatattgccataaaaatagcaaagaagactgtccctccattatcgaacaaatatgtcacctgagtagaaaacaaacagaaatattagtcatgcaaattgattataataagccagtgaatactgtttgcactcaggtactatgattttttctcaaatagaatcatattattttatagtacagaaatattatatatgaattcctttcatgggtcttgcaacaatttcacatgatttttctcatggggagaggtgaagaaacaacattagccctcttctctcctctcttgattccctttataccccaccatcatttctgattataaataattctaccattctatggaagtatttgtgggtcacagattgtcaaactacttaatgaaagttgtatgaaattagtttttcaggtgaggcattcctagttgcaattcctgttagcaaaacttctaggagtggggaagttggaaaatgcaggattcttccagtgagccagcatttcccatagctaaccctattctcttagtctttcaaaatgtagaatgggtccaataatggctataagatgtaataaatcccatcttaatttgttttaaaagtttcataaatcactgaacacttatgaaacaaagtgttttttaatcagatatcaactgaaacttcataaaggatgcatagttttataatgttattgaatcaaattttaaggcttgtattgtttgattttaataaagtataaattcaattt

SEQ ID NO: 295 - DNA, 3475 bp, Homo sapiens
  source 1..3475: mol_type = genomic DNA
aggtgccgcttcctgtccccttctccgcgctgcctcacggtgcctgcacgggacgccgctcgatccccgagccccctcgccgtccccgacagcccccccggcgccatgcaatcccggcttctactcctcggggcacccggaggccacggcggcccggcctcgcggcgcatgcggctgctcctgcggcaggtggtgcagcgcaggccgggtggcgacaggcagcggccggaggtcagactgttgcacgccggctcgggggccgacacaggtgatacagttaatattggagatgtatcctacaagttgaaaattcctaagaatccagaacttgtgccacagaactacatttcagactctctggctcaatctgtagttcagcatctaagatggataatgcagaaggatcttttggggcaagatgtttttctaataggacctcctgggcctcttcgacgctctattgctatgcagtacttggagctgaccaaacgggaggtcgaatacattgccctgtcaagggacaccactgaaactgatctcaaacagcgacgagagatccgtgcaggcacagccttttacattgatcagtgtgcagttcgtgcagccacagaaggcagaactctcattttggaaggtttggaaaaggcagagaggaatgttttgcctgttttgaacaacttgctggaaaacagagagatgcagcttgaagatggacgcttcctgatgtctgctgagcgttacgacaaacttctccgagatcataccaaaaaagagttggattcttggaaaattgtccgagttagtgaaaatttccgagtgattgccttgggcttgccagtgccaaggtattctgggaatccattagacccccctcttcgttctcgatttcaagccagggatatttattatttacccttcaaggaccaacttaagttgttatattcaattggagccaatgtttctgctgagaaagtttctcagctcttgtcctttgccacaactctgtgttcccaagaatcttctactcttggacttccagactttcctttagatagtttagcagctgcggttcaaatcttggattcctttcctatgatgccaatcaaacatgcaatccagtggctttatccatatagtattttactaggtcatgaagggaagatggctgtggaaggtgttttaaagcgctttgaacttcaagattcaggaagctctctacttcctaaagagattgtaaaagtagagaagatgatggaaaaccatgtgtcccaagcttctgtgaccatccggattgcagataaagaggtgaccattaaggtgccagccgggaccaggctattaagtcaaccttgtgcgtcagaccgtttcatacagactttgagccataagcagctacaggctgaaatgatgcagtctcacatggttaaagatatatgtttaattggaggaaagggttgtggaaaaacagtgatcgctaagaactttgccgataccttaggatacaacatagaacctattatgctctatcaggatatgacagcgcgtgatctgctacagcagagatacacccttccaaatggagacactgcctggcggtcctcaccccttgtgaatgctgctctggaaggcaagctggtcctgctggatggcattcaccgggtgaatgcgggcacgcttgctgtattgcaaaggttaatccatgatcgagagctaagcctctatgatggttctaggctgctgagagaagacaggtatatgcgtttaaaggaggagctgcaactgtctgatgaacagctacagaagagatccatttttcctatccatccctccttcagaatcattgccttggcagaaccccctgttattggaagcacagcacaccagtggctgggaccagaattcttaaccatgttctttttccattacatgaaaccacttgtgaaaagtgaagaaatccaagtgattaaggaaaaggtcccaaatgtacctcaggaagctctggataagttattatcatttacacacaaactcagagaaacacaggatccaacggcacaatcattagcggcatcactttctaccagacaactgttgcgaatttctcgtcggctgtcacagtatcctaatgaaaatcttcacagtgctgttactaaagcctgcctttccaggtttttacccagtcttgctaggtcagcattagaaaaaaatctggcagatgctacaatagaaataaatactgatgacaatttggagccagaactgaaggattacaaatgtgaagtaacatctggaactctgaggattggtgctgttagtgcaccgatctataatgcacatgagaaaatgaaagtgcctgatgttcttttctatgacaacattcagcatgtgatagtgatggaagatatgctgaaagactttctccttggagaacacttattattggttggcaaccagggtgtaggaaaaaacaagattgttgacagattccttcacctgctcaacagaccccgagaatatattcagctacacagggataccacagtacaaactcttacgcttcagccttcggttaaagacggacttattgtatatgaagactcacctttggttaaagcagtaaagttgggtcatattctggtagtagatgaggctgacaaagctccaacaaatgtcacgtgtattttaaaaactctagtagaaaatggagaaatgattctagcagatggaagacgcattgttgcaaattctgctaatgtgaatggaagagaaaatgttgtagtgattcatcctgattttaggatgattgttctggcaaatagacctggatttcctttcctaggcaatgatttcttcggtaccttaggtgatatttttagctgccatgcagttgataaccccaaaccccactcggagctcgagatgctcagacagtatggaccaaatgtgcctgagcccatccttcagaagcttgtggctgcctttggagagctgaggagtttggctgaccaagggattattaactatccttattctaccagagaagttgtcaacatagtcaaacatttacagaaatttccgactgaaggtctctccagtgtagttcgaaatgtgtttgactttgattcctacaacaatgacatgagggagatattgattaacactttacacaaatacgggatacctatcggagcaaagcctaccagtgtgcagctggcaaaggagtaaggcaaattcagtactcttctgattcttaaatgctgatagttcttgatttatcattccattctacaaaactgagttgctatggaaattactttccatgagtaagcttttcaaatacatgtatatgttgctgtttgctggctgcttttcagttaaatagcattatttataggcctgtaaattgaaaattttgattattatgtatgtcccatgagtagatgtaataaataaagggaaatatttgtttctttaa

SEQ ID NO: 296 - DNA, 2721 bp, Homo sapiens
  source 1..2721: mol_type = genomic DNA
gtcggcggcggcggggccggtcgatggcccgggcggcggcggcggcatgcggctcctgttcctggcggtgctgcggccacacaccggcaacgcggtcacggcccagcgcgttcgggcccatctagaggctgcagggcacgtgtgcgttttgaaggatgcctttgactttgaaagccgatctgagattgcaaacctcatcttggctgagaactgcgaggctgccctggctcttcatctctataggggaggcaggcttttgcaaggccaccgaatcccttttggagtcatctttggtggaactgatgtaaatgaagatgccaaccaggcggaaaaaaacacagtcatgggcagagttcttgaggaagccagatttgctgtcgctttcacagagtcaatgaaggaaatggcacaagcgcagtgggtcgatccagtgtttacaagggaagtgaaagccaaagtgaaaagagccgctggggtacgattgattggagagatgcctcaagaagatctgcacgcggtggtgaagaattgcttcgcggtggtgaatagctctgtctctgaaggcatgtcagctgcaattttggaggcaatggatttagaagtaccggtattggccaggaacatccccgggaatgctgccgtggtgaagcatgaagtcacagggctactgttttccaatcctcaggagtttgttcatctggcaaagagactggttagtgatcctgcattagaaaaggaaatcgtagtgaacggaagggaatacgtgagaatgtatcattcatggcaggtggaaagagacacctaccaacagctcatcaggaagctggaaggaagcactgaagattgagggccccgcctcatcagacacctgctctctgacacacagctctgggtgcacactcagagacagagttctggatcacgtgggcccagtgcagttcaaataaaaccagcctcagcggaatcctagaaaatgttagtcgtgagtccccagagccactgcattcatcccatatccttctgtgcgttcagatgctgtcccaggcgtgttcaccagccagtcctgatggaggtgcatgagtgactgggttgactgggacagggaaaggggaactggttttcagggaatttgggagagaatttgattacctgccttagggctttggtgtggacaatagaggcttattttcaagcagtcatggttcagactcctcccgcctgccttctgaccaacctctccccatcgttgccagtttgaaaggcaaaagcaaaacagacgtgtcagctgagccgagtcctcgcaggatttttgttgtgatctcaggactctgacaggcacgtgggtgacccgaggcttctctgaacactagaaagcgctgtgagtgagctcacgcccggcacagctcacttttcaatggtggaattgaaagttgtgctttttagaaaagtggccaggctgcccgcaggccccgcccacctcttggctgaatttgagtggaaaaccaggaaggaacaagcgccacgtcacgcatagcctgcaaatcgcccgcgtgaccctgagatggaggcctgaggctttgggtccagggtgggctcttccccttcccacatcagggacccggggatggatgtcggaagggtcaccagcctccagcctttggcaggatggagcttgggtctgcagggctttgcagccacacagcgaggtcagtccggggccagccgcgccatcatggtaatggtggcctcgccccatccatgtcatccatgtcacatgaggacgtgcagtcttccttgtcctctcctagtggaatttgcctgggagaacctccactgaatactgaaattgttgcatgcctgtggattccttacgacaatggggaacgcggtgtttcccacctcttgtgggtagaaagcagtctgctttgaggaggcgagaaggcaaagccagggcagggcgttgctgtgggaagcgttcggtgaaagcgggtttcgacgcttaggagggccgagggagaagattccaccagcattgtccttgcttcaagttttaggatgtctgaactttcagctttcatgttttcaaccatcatttttttaatggcacaacctacatcttgtttttaaaagaagtagcctcaaattaaactccttaaactctgatgccctggggatgagaacaactagcttggatctcgtgccgtgtaattcaatgtttcattccgctgcctccatcatgtaatagaatcgctttccagaaaggcagttaactggaagcagcagaggctcccagccgtgagaggactgctcaacaatgccccccatcgccgcccccccacccctcgcaccccttgtgttttccctctgaggggcccaagggttatggctttcatgtctaggtgtggggacagaggagggagaggcagatcctgggccgggagaggatggcctggtctgaatctggagtaattaatgccacccaaagaaaaggccctgccaggtccaatgttgtcttagatctgatgatgctgctatttacaaaacactgatcgtccgaaagcttgaatctgttcctcctcgaatgaccctgtagatgcctgacctccaccgtacctccacatcactattcatgtccttctaggaaaatgtgcacatgcctcacgcactatgtgggaagggcgtgtttttaaattaataaagtgtgtcaccattagccatacg

SEQ ID NO: 297 - DNA, 4564 bp, Homo sapiens
  source 1..4564: mol_type = genomic DNA
cgagtcggtggcggctgcaggctgggagggagaagtgctacgcctttgcaggttggcgaagtggttccaggctacccggctagtctggcacggccccgtcttctgcctcctcctccgtcgcgtggcggcgggaactgttggccgcgcggcctcgggaacggcccaggtccccgcccgcaggtcccgggcagataacatagatcatcagtagaaaacttcttgaagttgttcaagaaaaatttgaaagtagcaaaatagaaaataaagaattaacagcagatacagaggacagcatggaagtgttgtcttaggaaacagaacacagcagtgaaaaaacagacaaaatccgctcagatacaactgcagctgataatgttttccggcttcaatgtctttagagttgggatctcttttgtcataatgtgcattttttacatgccaacagtaaactctttaccagaactgagtcctcagaaatattttagtacattgcaaccaggaaaagcctctttagcttatttttgtcaagctgattccccaagaacatctgtatttcttgaagaactgaatgaggctgttagacctctgcaggactatggaatttcagttgccaaggttaattgtgtcaaagaagaaatatcaagatactgtggaaaagaaaaggatttgatgaaagcatatttattcaagggcaacatattgctcagagaattccctactgacaccttgtttgatgtgaatgccattgtcgcccatgttctctttgctcttctttttagtgaagtgaaatatattaccaacctggaagaccttcagaacatagaaaatgctctgaaaggaaaagcaaatattatattctcatatgtaagagccattggaataccagagcacagagcagtcatggaagccgcttttgtgtatgggactacataccaatttgtcttaaccacagaaattgcccttttggaaagtattggctctgaggatgtggaatatgcacatctctacttttttcattgtaaactagtcttggacttgacccagcaatgtagaagaacactaatggaacagccattgactacactgaacattcacctgtttattaagacaatgaaagcacctctgttgactgaagttgctgaagatcctcaacaagtttcaactgtccatctccaactgggcttaccactggtttttattgttagccaacaggctacttatgaagctgatagaagaactgcagaatgggttgcttggcgtcttctgggaaaagcaggagttctactcttgttaagggactctttggaagtgaacattcctcaagatgctaatgtggtcttcaaaagagcagaagagggagttccagtggaatttttggtattacatgatgttgatttaataatatctcatgtggaaaataatatgcacattgaggaaatacaagaagatgaagacaatgacatggaaggtccagatatagatgttcaggatgatgaagtggcagaaactgttttcagagataggaagagaaaattacctttggaacttacagtggaactaacagaagaaacatttaatgcaacagtgatggcttctgacagcatagtactcttctatgctggttggcaagcagtatccatggcatttttgcaatcctatattgatgtggcagttaaactgaaaggcacatctactatgcttcttactagaataaactgtgcagattggtctgatgtatgtactaagcaaaatgttactgaatttcctatcataaagatgtacaagaaaggcgagaacccagtatcttatgctggaatgttaggaaccgaagatctcctaaaatttatccagctcaacaggatttcatatccagtgaatataacatcgatccaagaagcagaagaatatttaagtggggaattatataaagacctcatcttgtattctagtgtgtcagtattgggactatttagtccaaccatgaaaacagcaaaagaagattttagtgaagcaggaaactacctaaaaggatatgttatcactggaatttattctgaagaagatgttttgctactgtcaaccaaatatgctgcaagtcttccagccctgctgcttgccagacacacagaaggcaaaatagagagcatcccactagctagcacacatgcacaagacatagttcaaataataacagatgcactactggaaatgtttccggaaatcactgtggaaaatcttcccagttatttcagacttcagaaaccattattgattttgttcagtgatggcactgtaaatcctcagtataaaaaagcaatattgacactggtaaagcagaaatacttggattcatttactccatgctggttaaatctaaagaatactccagtggggagaggaatcttgagggcatattttgatcctctgcctccccttcctcttcttgttttggtgaatctgcattcaggtggccaagtatttgcatttccttcagaccaggctataattgaagaaaaccttgtattgtggctgaagaaattagaagcaggactagaaaatcatatcacaattttacctgctcaagaatggaaacctcctcttccagcttatgattttctaagtatgatagatgccgcaacatctcaacgtggcactaggaaagttcccaagtgtatgaaagaaacagatgtgcaggagaatgataaggaacaacatgaagataaatcggcagtcagaaaagaaccgattgaaactctgagaataaagcattggaatagaagtaattggtttaaagaagcagaaaaatcatttagacgtgataaagagttaggatgctcaaaagtgaactaattttatagggctgtggtttccaaaatttttttggcatgatagacttaatttatttccttaaagaataatattaaatcatttcaagtttgcagactagtgccatccaatagaattataatataagtcacatattttatttaaaattttctagtaactacattaaacaaagtaaaagtgagcagggcaaaataattttgatattacttttcacccagtagtatacccaaaatagcgaaatatagaaattattaatgagatattttacatccttttttgtaccaagtcttctaaatgcagtacatattttatacttactgcatttcttacttccgagtagccatatttcaagtgttccttgccacatgtggcctgtgactactgtattggacagttcagtactagacaaaaactagcataattaacttagttctagccatgatttctatttggattaaaattaaactctaatcacagttaactccacagtgcattcatgcagctgacagttatatttgttttattggagtcatgatattaaaatcagcgtttgtcaacctcaggggatatttagcaattgtcgggagacatttttgatgtcatgactagggcagttattgacatttagtgagtagaggccagggatcctgctaaataacctgcattggacagcgccccacaacaaagaattatcctgcccgaaatggtagtcgtgccaaggctgagtaaccttgtgttaaaagtaacctgtggcagactaggtttccagaatttcctggttctgctcacgtatcatgtttgaaaaaattttggctattaaagatatgtattagatggtcttatcctgattattacctggatacaacttgatcttttctaatattttcagaaagtgatgggataaccctagaagaggactcagaatgatatttatattttaagtgagtcttaaaacctcctcttatttctacaagttatatggctaaatttcagattgaacagggattcagcattctgccatctcctcatggaaagagaggctccctcatctgaagcgtctctgaaatctacccttgcaagcttcagacaaatcagttgatctccctgagccacacggcctcattctgtgagggagggaaagattagccaaagagttaattttcattccaaatcacttagctgttagactgatctgtttgtagcagttgtttgtctcatttttgctctgtgcattttttgagacatttgttgagaatattctatttggtgctctactgtatttttctttttaatatctacttgatatcttgttctttaaattttcttcacatatggtttgcctgatacaactgatttttataactgaaatttaaggaatctaacagctaaaactcagtaagtgcatatatttccttataacatagacccgttgctactctcagcaccctctcctcaattttttttcctgtagcatgtgatgcctgattaaactcattttcatttgcttttatttctaatatgggaacaatgagagtgaactctaaatataggttgtagtaataaaacatcattagcctaattattagaaaatgctaattaagtaccagcacatagaaacatgaaattgcttagtcattgtacctttgtcagcaattttgacagtcattaatgtttgtcataattttaaataaagtgtctgggtttcagaataccttca

SEQ ID NO: 298 - DNA, 1071 bp, Homo sapiens
  source 1..1071: mol_type = genomic DNA
agtccccaccccccagccaggtctcatagagggaattgttcttcaggctcggaggggcctgcctgtcactgcgcccccgaccctagctcagggactgcagaactcaagataccatcccgtttctcctggctgaggaagggaagggaacatccacatcttctgtactcgtccattctgtgtccccggggcctggagtaaagacaccttcaaatgcagagactcttcagattcagctttcctggaaactgatcttcaatgcactaagagaaggagactctcaaaccaaaaatgacctggaggcaccatgtcaggcttctgtttacggtcagtttggcattacagatcatcaatttgggaaacagctatcaaagagagaaacataacggcggtagagaggaagtcaccaaggttgccactcagaagcaccgacagtcaccgctcaactggacctccagtcatttcggagaggtgactgggagcgccgagggctgggggccggaggagccgctcccatactcctgggctttcggagagggtgcgtccgcgcggccgcgctgctgcaggaacggcggtacctgcgtgctgggcagcttctgcgtgtgcccggcccacttcaccggccgctactgcgagcatgaccagaggcgcagtgaatgcggcgccctggagcacggagcctggaccctccgcgcctgccacctctgcaggtgcatcttcggggccctgcactgcctccccctccagacgcctgaccgctgtgacccgaaagacttcctggcctcccacgctcacgggccgagcgccgggggcgcgcccagcctgctactcttgctgccctgcgcactcctgcaccgcctcctgcgcccggatgcgcccgcgcaccctcggtccctggtcccttccgtcctccagcgggagcggcgcccctgcggaaggccgggacttgggcatcgcctttaattttctatgttgtaaataatagatgtgtttagtttaccgtaagctgaagcactgggtgaatatttttattgggtaataaatattttcatgaaagcgcctttggctccagat

SEQ ID NO: 299 - DNA, 1361 bp, Homo sapiens
  source 1..1361: mol_type = genomic DNA
atgccggcgatcgcggtgttggcggcggccgccgcggcgtggtgcttcctccaagtcgagagccggcacctggacgcgctcgccggaggcgcgggccccaaccacggcaatttcctagacaatgaccagtggctgagcaccgtctcccagtacgaccgggacaagtactggaaccgctttcgagacgatgattatttcagaaactggaatcccaacaagccctttgaccaagccctggacccatccaaggacccctgcctgaaggtaaaatgcagccctcacaaagtgtgtgtgacccaggactaccagaccgccctgtgtgtcagccgcaagcacctgctccccaggcaaaagaaggggaacgtggcccagaaacactgggttggaccttcgaatttggtcaagtgcaagccctgtcccgtggcacagtcagccatggtctgcggctcagatggccactcctacacatccaagtgcaaattggagttccatgcttgttctactggcaaaagcctcgccaccctctgtgatgggccctgtccctgtctcccagagcctgagccaccaaagcacaaggcagaaaggagtgcctgcacagacaaggagttgcggaaccttgcctcccggctgaaggattggtttggagctctccacgaggatgcgaacagagtcatcaagcccaccagctccaacacagcccaaggcaggtttgacactagcatcctgcccatctgcaaggactccctgggctggatgttcaacaagttggacatgaactatgacctcctgcttgacccttcagagatcaatgccatctacctggataagtacgagccctgtatcaagcctcttttcaactcgtgtgactccttcaaggatggcaagctttctaacaatgagtggtgctactgcttccagaagcctggaggtctcccttgccagaatgaaatgaacagaattcagaagctgagtaaggggaaaagcctgttgggggccttcatacctcggtgtaatgaggagggctattacaaagccacacagtgccacggcagcacggggcagtgctggtgtgtggacaaatatgggaatgagttggctggctccaggaaacagggtgctgtgagctgtgaagaggagcaggaaacctcaggggattttggcagtggtgggtccgtggtcctgctggatgacctagaatatgaacgggagctgggaccaaaggacaaagaggggaagctgagggtgcacacccgagccgtgacagaggatgatgaggatgaggatgatgacaaagaggatgaggtcgggtacatatggtagtgcccacaagaaagaggacacaagttttgcacaaaattgca

SEQ ID NO: 300 - DNA, 11067 bp, Homo sapiens
  source 1..11067: mol_type = genomic DNA
atgaaggtaaaaggcagaggaatcacctgcttgctggtctcctttgctgtgatctgcctggtcgccacccctgggggcaaggcctgtcctcgccgctgtgcctgttatatgcctacggaggtacactgcacatttcggtacctgacttccatcccagacagcatcccgcccaatgtggaacgcatcaatttaggatacaacagcttggttagattgatggaaacagatttttctggcctgaccaaactggagttactcatgcttcacagcaatggcattcacacaatccctgacaagaccttctcagatttgcaggccttgcaggtcttaaaaatgagctataataaagtccgaaaacttcagaaagatactttttatggcctcaggagcttgacacgattgcacatggaccacaacaatattgagtttataaacccagaggttttttatgggctcaactttctccgcctggtgcacttggaaggaaatcagctcactaagctccacccagatacatttgtctctttgagctacctccagatatttaaaatctctttcattaagttcctatacttgtctgataacttcctgacctccctccctcaagagatggtctcctatatgcctgacctagacagcctttacctgcatggaaacccatggacctgtgattgccatttaaagtggttgtctgactggatacaggagaagccagatgtaataaaatgcaaaaaagatagaagtccctctagtgctcagcagtgtccactttgcatgaaccctaggacttctaaaggcaagccgttagctatggtctcagctgcagctttccagtgtgccaagccaaccattgactcatccctgaaatcaaagagcctgactattctggaagacagtagttctgctttcatctctccccaaggtttcatggcaccctttggctccctcactttgaatatgacagatcagtctggaaatgaagctaacatggtctgcagtattcaaaagccctcaaggacatcacccattgcattcactgaagaaaatgactacatcgtgctaaatacttcattttcaacatttttggtgtgcaacatagattacggtcacattcagccagtgtggcaaattttggctttgtacagtgattctcctctgatactagaaaggagccacttgcttagtgaaacaccgcagctctattacaaatataaacaggtggctcctaagcctgaagacatttttaccaacatagaggcagatctcagagcagatccctcttggttaatgcaagaccaaatttccttgcagctgaacagaactgccaccacattcagtacattacagatccagtactccagtgatgctcaaatcactttaccaagagcagagatgaggccagtgaaacacaaatggactatgatttcaagggataacaatactaagctggaacatactgtcttggtaggtggaaccgttggcctgaactgcccaggccaaggagaccccaccccacacgtggattggcttctagctgatggaagtaaagtgagagccccttatgtcagtgaggatggacggatcctaatagacaaaagtggaaaattggaactccagatggctgatagttttgacacaggcgtatatcactgtataagcagcaattatgatgatgcagatattctcacctataggataactgtggtagaacctttggtcgaagcctatcaggaaaatgggattcatcacacagttttcattggtgaaacacttgatcttccatgccattctactggtatcccagatgcctctattagctgggttattccaggaaacaatgtgctctatcagtcatcaagagacaagaaagttctaaacaatggcacattaagaatattacaggtcaccccgaaagaccaaggttattatcgctgtgtggcagccaacccatcaggggttgattttttgattttccaagtttcagtcaagatgaaaggacaaaggcccttggagcatgatggagaaacagagggatctggacttgatgagtccaatcctattgctcatcttaaggagccaccaggtgcacaactccgtacatctgctctgatggaggctgaggttggaaaacacacctcaagcacaagtaagaggcacaactatcgggaattaacactccagcgacgtggagattcaacacatcgacgttttagggagaataggaggcatttccctccctctgctaggagaattgacccacaacattgggcggcactgttggagaaagctaaaaagaatgctatgccagacaagcgagaaaataccacagtgagcccacccccagtggtcacccaactcccaaacatacctggtgaagaagacgattcctcaggcatgctcgctctacatgaggaatttatggtcccggccactaaagctttgaaccttccagcaaggacagtgactgctgactccagaacaatatctgatagtcctatgacaaacataaattatggcacagaattctctcctgttgtgaattcacaaatactaccacctgaagaacccacagatttcaaactgtctactgctattaaaactacagccatgtcaaagaatataaacccaaccatgtcaagccaaatacaaggcacaaccaatcaacattcatccactgtctttccactgctacttggagcaactgaatttcaggactctgaccagatgggaagaggaagagagcatttccaaagtagacccccaataacagtaaggactatgatcaaagatgtcaatgtcaaaatgcttagtagcaccaccaacaaactattattagagtcagtaaataccacaaatagtcatcagacatctgtaagagaagtgagtgaacccaggcacaatcacttctattctcacactactcaaatacttagcacctccacgttcccttcagatccacacacagctgctcattctcagtttccgatccctagaaatagtacagttaacatcccgctgttcagacgctttgggaggcagaggaaaattggcggaagggggcggattatcagcccatatagaactccagttctgcgacggcatagatacagcattttcaggtcaacaaccagaggttcttctgaaaaaagcactactgcattctcagccacagtgctcaatgtgacatgtctgtcctgtcttcccagggagaggctcaccactgccacagcagcattgtcttttccaagtgctgctcccatcaccttccccaaagctgacattgctagagtcccatcagaagagtctacaactctagtccagaatccactattactacttgagaacaaacccagtgtagagaaaacaacacccacaataaaatatttcaggactgaaatttcccaagtgactccaactggtgcagtcatgacatatgctccaacatccatacccatggaaaaaactcacaaagtaaacgccagttacccacgtgtgtctagcaccaatgaagctaaaagagattcagtgattacatcgtcactttcaggtgctatcaccaagccaccaatgactattatagccattacaaggttttcaagaaggaaaattccctggcaacagaactttgtaaataaccataacccaaaaggcagattaaggaatcaacataaagttagtttacaaaaaagcacagctgtgatgcttcctaaaacatctcctgctttacccagagacaaagtctcccctttccatttcaccacactttcaacaagtgtgatgcaaattccatctaataccttgactaccgctcaccacactacgaccaaaacacacaatcctggaagtcttccaacaaagaaggagcttcccttcccaccccttaaccctatgcttcctagtattataagcaaagactcaagtacaaaaagcatcatatcaacgcaaacagcaataccagcaacaactcctaccttccctgcatctgtcatcacttatgaaacccaaacagagagatctagagcacaaacaatacaaagagaacaggagcctcaaaagaagaacaggactgacccaaacatctctccagaccagagttctggcttcactacacccactgctatgacacctcctgttctaaccacagccgaaacttcagtcaagcccagtgtctctgcattcactcattccccaccagaaaacacaactgggatttcaagcacaatcagttttcattcaagaactcttaatctgacagatgtgattgaagaactagcccaagcaagtactcagactttgaagagcacaattgcttctgaaacaactttgtccagcaaatcacaccagagtaccacaactaggaaagcaatcattagacactcaaccataccaccattcttgagcagcagtgctactctaatgccagttcccatctcccctccctttactcagagagcagttactgacaacgtggcgactcccatttccgggcttatgacaaatacagtggtcaagctgcacgaatcctcaaggcacaatgctaaaccacagcaattagtagcagaggttgcaacatcccccaaggttcacccaaatgccaagttcacaattggaaccactcacttcatctactctaatctgttacattctactcccatgccagcactaacaacagttaaatcacagaattctaaattaactccatctccctgggcagaaaaccaattttggcacaaaccatactcagaaattgctgaaaaaggcaaaaagccagaagtaagcatgttggctactacaggcctgtccgaggccaccactcttgtttcagattgggatggacagaagaacacaaagaagagtgactttgataagaaaccagttcaagaagcaacaacttccaaactccttccctttgactctttgtctaggtatatatttgaaaagcccaggatagttggaggaaaagctgcaagttttactattccagctaactcagatgcctttcttccctgtgaagctgttggaaatcccctgcccaccattcattggaccagagtcccatcaggacttgatttatctaagaggaaacagaatagcagggtccaggttctccccaatggtaccctgtccatccagagggtggaaattcaggaccgcggacagtacttgtgttccgcatccaatctgtttggcacagaccaccttcatgtcaccttgtctgtggtttcctatcctcccaggatcctggagagacgtaccaaagagatcacagttcattccggaagcactgtggaactgaagtgcagagcagaaggtaggccaagccctacagttacctggattcttgcaaaccaaacagttgtctcagaatcatcccagggaagtaggcaggctgtggtgacggttgacggaacattggtcctccacaatctcagtatttatgaccgtggcttttacaaatgtgtggccagcaacccaggtggccaggattcactgctggttaaaatacaagtcattgcagcaccacctgttattctagagcaaaggaggcaagtcattgtaggcacttggggtgaaagtttaaaactgccctgtactgcaaaaggaactcctcagcccagcgtttactgggtcctctctgatggcactgaagtgaaaccattacagtttaccaattccaagttgttcttattttcaaatgggactttgtatataagaaacctagcctcttcagacaggggcacttatgaatgcattgctaccagttccactggttcggagcgaagagtagtaatgcttacaatggaagagcgagtgaccagccccaggatagaagctgcatcccagaaaaggactgaagtgaattttggggacaaattactactgaactgctcagccactggggagcccaaaccccaaataatgtggaggttaccatccaaggctgtggtcgaccagcagcatagagtgggcagctggatccacgtctaccctaatggatccctgtttattggatcagtaacagaaaaagacagtggtgtctacttgtgtgtggcaagaaacaaaatgggggatgatctgatactgatgcatgttagcctaagactgaaacctgccaaaattgaccacaagcagtattttagaaagcaagtgctccatgggaaagatttccaagtagattgcaaagcttccggctccccagtgccagagatatcttggagtttgcctgatggaaccatgatcaacaatgcaatgcaagccgatgacagtggccacaggactaggagatatacccttttcaacaatggaactttatacttcaacaaagttggggtagcggaggaaggagattatacttgctatgcccagaacaccctagggaaagatgaaatgaaggtccacttaacagttataacagctgctccccggataaggcagagtaacaaaaccaacaagagaatcaaagctggagacacagctgtccttgactgtgaggtcactggggatcccaaaccaaaaatattttggttgctgccttccaatgacatgatttccttctccattgataggtacacatttcatgccaatgggtctttgaccatcaacaaagtgaaactgctcgattctggagagtacgtatgtgtagcccgaaatcccagtggggatgacaccaaaatgtacaaactggatgtggtctctaaacctccattaatcaatggtctgtatacaaacagaactgttattaaagccacagctgtgagacattccaaaaaacactttgactgcagagctgaagggacaccatctcctgaagtcatgtggatcatgccagacaatattttcctcacagccccatactatggaagcagaatcacagtccataaaaatggaaccttggaaattaggaatgtgaggctttcagattcagccgactttatctgtgtggcccgaaatgaaggtggagagagcgtgttggtagtacagttagaagtactggaaatgctgagaagaccgacatttagaaatccatttaatgaaaaaatagttgcccagctgggaaagtccacagcattgaattgctctgttgatggtaacccaccacctgaaataatctggattttaccaaatggcacacgattttccaatggaccacaaagttatcagtatctgatagcaagcaatggttcttttatcatttctaaaacaactcgggaggatgcaggaaaatatcgctgtgcagctaggaataaagttggctatattgagaaattagtcatattagaaattggccagaagccagttattcttacctatgcaccagggacagtaaaaggcatcagtggagaatctctatcactgcattgtgtgtctgatggaatccctaagccaaatatcaaatggactatgccaagtggttatgtagtagacaggcctcaaattaatgggaaatacatattgcatgacaatggcaccttagtcattaaagaagcaacagcttatgacagaggaaactatatctgtaaggctcaaaatagtgttggtcatacactgattactgttccagtaatgattgtagcctaccctccccgaattacaaatcgtccacccaggagtattgtcaccaggacaggggcagcctttcagctccactgtgtggccttgggagttcccaagccagaaatcacatgggagatgcctgaccactcccttctctcaacggcaagtaaagagaggacacatggaagtgagcagcttcacttacaaggtaccctagtcattcagaatccccaaacctccgattctgggatatacaaatgcacagcaaagaacccacttggtagtgattatgcagcaacgtatattcaagtaatctgacatgaaataataaagtcaacaacatctgggcagaatttattttttggaagaagtttaatcaaaggcagccataggcatgtaaatgaatttgaatacatttacagtattaaatttacaatgaacatgcaaaataaaaggacttgtaaataaatgcattatgaactgatgatactgatttatttaatggatctcaaaacaaacttttaacttaaggcacttttattttgccaacaaataacaataaacaaacattgaaacggttcactataaaataacaaatggctaatgtacctgaatttttcagtaaaaaaatgaacttctaataccagttgcctagtgtccacctcctatcaatgttacaagcatggcactcagaacagagacaatggaaaatattaaatctgcaatctttatgatgtaaatttaccatcctgatgtataaatattttgtggtttataaatttttttgctaaaacctacagaaaataagcactgaactgtcttatgattcaccatttgttcacactgaaaattttcattgatggggaatacaaaaatgttttaataactgcatttaaaaataaatgcaggctcacttttccacatgtaaaaagcaatgtaatacctgcacatcataaaatgtgaaaagggggttatttttgtccaaatacacccattaaaaaggttttaaaaatacaatgaaacttctttataactttaaaatctagctcaggcacccctggtttggagctgtttataaggaaatttttctgagcaggaatcgttgctctataagcatttcatttcattaattctttatgggatgggaaaatgcttgggagggtctaggtctattatatataatgaagtttcactgtatttaaaatctgatcaatcctacacaaaatgtgtttttgtaattcactgaatttatattacatgcttaattcaacctgaattaatttggggaatattaaatgattgatcttatctaaatctaggggtggggttttccagtgtaatttctccagcatctattcaaacattcacctagtacttacttaagaattataggagctttataaatgggaaaaaaatgccataggtcttagatatctcagtgcacaaaaccgagaattactaataagttagcccctgccaatcatttgagacatgtggaatagcgcccttgggttttcatcacactgactttcagttagccccatctcagcctaaaatgtgacctggttgcaacttatgtctgatgttagtaccctgtggctggaagtggtcaaagctacgcattgatctcctctacttccaggccaagaagggtaaatgcaatgactgacaaatgcaaccctattaagaaaaagcctacagtgtaaacaagagagtctatgggcttcttatatccaagaactgtgattgattgataggtatagctgactccatttgatttcaaggtcttgtctttaaggggagctggggtctcgctccatcttattctaaggtaatttcctctggtaaggtaaagtaccaggttctgccacagggctttaccttgtgaccatcttaatgcaaaagaatgcatttgcaagaaaagaaaaaaaaaaaaaaaaaaaagaaacctctcaagatacagaattaacagggagaaaatctgaagactaaagtaattctagttattttctttataatgcgcaggggtaaaacagcattcctcaactttcaatagaatcgtggaattaattagagtcgtagcataacttcctcacctaaaaaaagaaaaaagatatgccccacagctttcatgtgcaaaatgattaataatttaactcacctctgcaaagtataaagtgcatacaaatgctatgcaattataacactcattcttaaaacagtattactgttgtttgcaatgctgagctacaaaatatatggttcaaactgaactggcaaagaaatttggaaagaaataatgatggaacatgactcactcactaggcacaacattcacatttcggttgatttgccaatgcagtcattatatagatatattactttgaagaaaacaacttcattagcttatctaagtatgtttcttgagaggaaaaaatctgatatacaaaaccagcaaaaatgtgtacagatagatgatacatcttctgaaagcagatagactattaatttagtgaaaagaatagtttttaatgttttggcaaagtcttttccagcccagagtaaacacaaaatgggcaggctggagtgaaatattttcacagtgtacaaagcagttcacatggatgttgccacagcaaagtaagctgacatgtatttgaggtcatttgcatgagtcaaactttgcaatgagtaactcacccaggaagatataaattatttatagataatgatttgcaaaagaaaatgtctactaaagttgtactagctacattttaaaaaaagtagatttacatggtctgctcattatagacaagtctattcacagtatgcttgactatattatatgtaaaatcatatggcaaaagaaaatgaaataacagagaacatgggaaaatatcccccacatatgttttaaaatgccctgcaattttcacattcaaaattttatgcatctaaatctaaaaaaatattatatagaatactcttaagttacacaaactgataatttactggtttcttttttactctaataggagcaaattaccacatacttgaacaaagttaaaatagttactatttctttataataaatttgatgtataatttacttgtgctttttgcaccaatttataaatacagtatatgcaatacacaaccaagactgacactgacagtaataattaaattcaaaagagcaaatacttaccatacaaaataaacagcaaatacaccttttatgaaaaccagagccttctggactttggggccagattctctggaaaccatgtcaagtgtgagcactggaatctcaagccagctactggatttttttttccccttaaggtggcataaggttcaggagaaccaaaactggcaataaatagttggacgattccactgcagttctttcaggcctttaggatttacatgttgtaccttcacaatgactctcatcaatgatcttgcctcaaaacaaatttgagtacagctacttctaacaggtttccgcac

SEQ ID NO: 301 - DNA, 2906 bp, Homo sapiens
  source 1..2906: mol_type = genomic DNA
aaaaaatgcataaagagccaagtgcttatattctggccaagttatgaggctctgagaacaagagcttgaggggaagactgttaaccccatccacgccaccagaattagctctttcccttttggtttgcaagcactgcctgtaaagccctcgcatgagaggccagcctgctagggaaatccaggaatctgcaacaaaaacgatgacagtctgaaatactctctggtgccaacctccaaattctcgtctgtcacttcagacccccactagttgacagagcagcagaatttcaactccagtagacttgaatatgcctctgggcaaagaagcagagctaacgaggaaagggatttaaagagtttttcttgggtgtttgtcaaacttttattccctgtctgtgtgcagaggggattcaacttcaatttttctgcagtggctctgggtccagccccttacttaaagatctggaaagcatgaagactgggctttttttcctatgtctcttgggaactgcagctgcaatcccgacaaatgcaagattattatctgatcattccaaaccaactgctgaaacggtagcacctgacaacactgcaatccccagtttaagggctgaagctgaagaaaatgaaaaagaaacagcagtatccacagaagacgattcccaccataaggctgaaaaatcatcagtactaaagtcaaaagaggaaagccatgaacagtcagcagaacagggcaagagttctagccaagagctgggattgaaggatcaagaggacagtgatggtcacttaagtgtgaatttggagtatgcaccaactgaaggtacattggacataaaagaagatatgagtgagcctcaggagaaaaaactctcagagaacactgattttttggctcctggtgttagttccttcacagattctaaccaacaagaaagtatcacaaagagagaggaaaaccaagaacaacctagaaattattcacatcatcagttgaacaggagcagtaaacatagccaaggcctaagggatcaaggaaaccaagagcaggatccaaatatttccaatggagaagaggaagaagaaaaagagccaggtgaagttggtacccacaatgataaccaagaaagaaagacagaattgcccagggagcatgctaacagcaagcaggaggaagacaatacccaatctgatgatattttggaagagtctgatcaaccaactcaagtaagcaagatgcaggaggatgaatttgatcagggtaaccaagaacaagaagataactccaatgcagaaatggaagaggaaaatgcatcgaacgtcaataagcacattcaagaaactgaatggcagagtcaagagggtaaaactggcctagaagctatcagcaaccacaaagagacagaagaaaagactgtttctgaggctctgctcatggaacctactgatgatggtaataccacgcccagaaatcatggagttgatgatgatggcgatgatgatggcgatgatggcggcactgatggccccaggcacagtgcaagtgatgactacttcatcccaagccaggcctttctggaggccgagagagctcaatccattgcctatcacctcaaaattgaggagcaaagagaaaaagtacatgaaaatgaaaatataggtaccactgagcctggagagcaccaagaggccaagaaagcagagaactcatcaaatgaggaggaaacgtcaagtgaaggcaacatgagggtgcatgctgtggattcttgcatgagcttccagtgtaaaagaggccacatctgtaaggcagaccaacagggaaaacctcactgtgtctgccaggatccagtgacttgtcctccaacaaaaccccttgatcaagtttgtggcactgacaatcagacctatgctagttcctgtcatctattcgctactaaatgcagactggaggggaccaaaaaggggcatcaactccagctggattattttggagcctgcaaatctattcctacttgtacggactttgaagtgattcagtttcctctacggatgagagactggctcaagaatatcctcatgcagctttatgaagccaactctgaacacgctggttatctaaatgagaagcagagaaataaagtcaagaaaatttacctggatgaaaagaggcttttggctggggaccatcccattgatcttctcttaagggactttaagaaaaactaccacatgtatgtgtatcctgtgcactggcagtttagtgaacttgaccaacaccctatggatagagtcttgacacattctgaacttgctcctctgcgagcatctctggtgcccatggaacactgcataacccgtttctttgaggagtgtgaccccaacaaggataagcacatcaccctgaaggagtggggccactgctttggaattaaagaagaggacatagatgaaaatctcttgttttgaacgaagattttaaagaactcaactttccagcatcctcctctgttctaaccacttcagaaatatatgcagctgtgatacttgtagatttatatttagcaaaatgttagcatgtatgacaagacaatgagagtaattgcttgacaacaacctatgcaccaggtatttaacattaactttggaaacaaaaatgtacaattaagtaaagtcaacatatgcaaaatactgtacattgtgaacagaagtttaattcatagtaatttcactctctgcattgacttatgagataattaatgattaaactattaatgataaaaataatgcatttgtattgttcataatatcatgtgcacttcaagaaaatggaatgctactcttttgtggtttacgtgtattattttcaatatcttaataccctaataaagagtccataaaaatccaaa

SEQ ID NO: 302 - DNA, 1458 bp, Homo sapiens
  source 1..1458: mol_type = genomic DNA
cccactagacctggtcagacacaatgttggcactcttggttctggtgactgtggccctggcatctgctcatcatggtggtgagcactttgaaggcgagaaggtgttccgtgttaacgttgaagatgaaaatcacattaacataatccgcgagttggccagcacgacccagattgacttctggaagccagattctgtcacacaaatcaaacctcacagtacagttgacttccgtgttaaagcagaagatactgtcactgtggagaatgttctaaagcagaatgaactacaatacaaggtactgataagcaacctgagaaatgtggtggaggctcagtttgatagccgggttcgtgcaacaggacacagttatgagaagtacaacaagtgggaaacgatagaggcttggactcaacaagtcgccactgagaatccagccctcatctctcgcagtgttatcggaaccacatttgagggacgcgctatttacctcctgaaggttggcaaagctggacaaaataagcctgccattttcatggactgtggtttccatgccagagagtggatttctcctgcattctgccagtggtttgtaagagaggctgttcgtacctatggacgtgagatccaagtgacagagcttctcgacaagttagacttttatgtcctgcctgtgctcaatattgatggctacatctacacctggaccaagagccgattttggagaaagactcgctccacccatactggatctagctgcattggcacagaccccaacagaaattttgatgctggttggtgtgaaattggagcctctcgaaacccctgtgatgaaacttactgtggacctgccgcagagtctgaaaaggagaccaaggccctggctgatttcatccgcaacaaactctcttccatcaaggcatatctgacaatccactcgtactcccaaatgatgatctacccttactcatatgcttacaaactcggtgagaacaatgctgagttgaatgccctggctaaagctactgtgaaagaacttgcctcactgcacggcaccaagtacacatatggcccgggagctacaacaatctatcctgctgctgggggctctgacgactgggcttatgaccaaggaatcagatattccttcacctttgaacttcgagatacaggcagatatggctttctccttccagaatcccagatccgggctacctgcgaggagaccttcctggcaatcaagtatgttgccagctacgtcctggaacacctgtactagttgagaaagctgatggccttgtttcaaaattctcatttttcatttcttttctttcttgaattcttattttggtttgcctggatgttttgcagatcccaatctttcttttaagcttctgggtctattaaactaggtagatcttttcgtattgatcataataaaagtgaatcattactattgg

SEQ ID NO: 303 - DNA, 795 bp, Homo sapiens
  source 1..795: mol_type = genomic DNA
gtcctggagaccaaggatgggaaactgtcaaccttcagaacgtccttctccctcagctggagggagcatggcagtgagccaaggagacgggaccctctgctttgtcctcctgctgtgctgttggcaagaaactgagctccggccgagaaccgtgattccaggttcacctactgaaataccattcagttcaaaacaggaggatatgtctgaattattagatgaaattctggtccaggagattttagatctgaataaaacaacaccgagcgaaatgccaagtacagcatcaacattatcaacaccgttacatgctggtattgatgagaattatcaagctggtggttctgagaattaccatgaattattagagaatttacaattctctcctggcattgaggtcaaaatttccaatgatgaagccaatgctaatgcaaatctccatggcgatccttctgagaattatcgtgggccacaggtgtctcctggcagtgagaagagtgtttccagtaaagaaaagaattcaaagaacactcagtatgaaaatctatccattctggaccaaatccttcaaaatattggaagatcttcaggaaacattttccataaagagcagcagaggaccagcgcacagaggaggagccaaggcagtcagtgaggccgcagccccagaccccctgcgcaggagaggagcctgctagaacccccacccaccagcctccggaacagggcacttgtgtgcacacgcccacgttctctgaaccattccacataaaggaaaatcgtttattcacacga

SEQ ID NO: 304 - DNA, 6265 bp, Homo sapiens
  source 1..6265: mol_type = genomic DNA
ttagattaaattaacaccatttgaaagagaacattgttttcatcatgaatgctaataaagatgaaagacttaaagccagaagccaagattttcacctttttcctgctttgatgatgctaagcatgaccatgttgtttcttccagtcactggcactttgaagcaaaatattccaagactcaagctaacctacaaagacttgctgctttcaaatagctgtattccctttttgggttcatcagaaggactggattttcaaactcttctcttagatgaggaaagaggcaggctgctcttgggagccaaagaccacatctttctactcagtctggttgacttaaacaaaaattttaagaagatttattggcctgctgcaaaggaacgggtggaattatgtaaattagctgggaaagatgccaatacagaatgtgcaaatttcatcagagtacttcagccctataacaaaactcacatatatgtgtgtggaactggagcatttcatccaatatgtgggtatattgatcttggagtctacaaggaggatattatattcaaactagacacacataatttggagtctggcagactgaaatgtcctttcgatcctcagcagccttttgcttcagtaatgacagatgagtacctctactctggaacagcttctgatttccttggcaaagatactgcattcactcgatcccttgggcctactcatgaccaccactacatcagaactgacatttcagagcactactggctcaatggagcaaaatttattggaactttcttcataccagacacctacaatccagatgatgataaaatatatttcttctttcgtgaatcatctcaagaaggcagtacctccgataaaaccatcctttctcgagttggaagagtttgtaagaatgatgtaggaggacaacgcagcctgataaacaagtggacgacttttcttaaggccagactgatttgctcaattcctggaagtgatggggcagatacttactttgatgagcttcaagatatttatttactccccacaagagatgaaagaaatcctgtagtatatggagtctttactacaaccagctccatcttcaaaggctctgctgtttgtgtgtatagcatggctgacatcagagcagtttttaatggtccatatgctcataaggaaagtgcagaccatcgttgggtgcagtatgatgggagaattccttatccacggcctggtacatgtccaagcaaaacctatgacccactgattaagtccacccgagattttccagatgatgtcatcagtttcataaagcggcactctgtgatgtataagtccgtatacccagttgcaggaggaccaacgttcaagagaatcaatgtggattacagactgacacagatagtggtggatcatgtcattgcagaagatggccagtacgatgtaatgtttcttggaacagacattggaactgtcctcaaagttgtcagcatttcaaaggaaaagtggaatatggaagaggtagtgctggaggagttgcagatattcaagcactcatcaatcatcttgaacatggaattgtctctgaagcagcaacaattgtacattggttcccgagatggattggttcagctctccttgcacagatgcgacacttatgggaaagcttgcgcagactgttgtcttgccagagacccctactgtgcctgggatggaaatgcatgctctcgatatgctcctacttctaaaaggagagctagacgccaagatgtaaaatatggcgacccaatcacccagtgctgggacatcgaagacagcattagtcatgaaactgctgatgaaaaggtgatttttggcattgaatttaactcaacctttctggaatgtatacctaaatcccaacaagcaactattaaatggtatatccagaggtcaggggatgagcatcgagaggagttgaagcccgatgaaagaatcatcaaaacggaatatgggctactgattcgaagtttgcagaagaaggattctgggatgtattactgcaaagcccaggagcacactttcatccacaccatagtgaagctgactttgaatgtcattgagaatgaacagatggaaaatacccagagggcagagcatgaggaggggaaggtcaaggatctattggctgagtcacggttgagatacaaagactacatccaaatccttagcagcccaaacttcagcctcgaccagtactgcgaacagatgtggcacagggagaagcggagacagagaaacaaggggggcccaaagtggaagcacatgcaggaaatgaagaagaaacgaaatcgaagacatcacagagacctggatgagctccctagagctgtagccacgtagttttctacttaatttaaagaaaagaattccttacctataaaaacattgccttctgttttgtatatcccttatagtaattcataaatgcttcccatggagttttgctaaggcacaagacaataatctgaataagacaatatgtgatgaatataagaaagggcaaaaaattcatttgaaccagttttccaagaacaaatcttgcacaagcaaagtataagaattatcctaaaaatagggggtttacagttgtaaatgttttatgttttgagttttggaatttattgtcatgtaaatagttgagctaagcaagccccgaatttgatagtgtataaggtgctttattccctcgaatgtccattaagcatggaatttaccatgcagttgtgctatgttcttatgaacagatatatcattcctattgagaaccagctaccttgtggtagggaataagaggtcagacacaaattaagacaactcccattatcaacaggaactttctcagtgagccattcactcctggagaatggtataggaatttggagaggtgcattatttctttctggccactggggttaaatttagtgtactacaacattgatttactgaagggcactaatgtttcccccaggatttctattgactagtcaggagtaacaggttcacagagagaagttggtgcttagttatgtgttttttagagtatatactaagctctacagggacagaatgcttaataaatactttaataagatatgggaaaatattttaataaaacaaggaaaacataatgatgtataatgcatcctgatgggaaggcatgcagatgggatttgttagaagacagaaggaaagacagccataaattctggctttggggaaaactcatatccccatgaaaaggaagaacaatcacaaataaagtgagagtaatgtaatggagctcttttcactagggtataagtagctgccaatttgtaattcatctgttaaaaaaaatctagattataacaaactgctagcaaaatctgaggaaacataaattcttctgaagaatcataggaagagtagacattttatttataaccaatgatatttcagtatatattttctctcttttaaaaaatatttatcatactctgtatattatttctttttactgcctttattctctcctgtatattggattttgtgattatatttgagtgaataggagaaaacaatatataacacacagagaattaagaaaatgacatttctggggagtggggatatatatttgttgaataacagaacgagtgtaaaattttaacaacggaaagggttaaattaactctttgacatcttcactcaaccttttctcattgctgagttaatctgttgtaattgtagtattgtttttgtaatttaacaataaataagcctgctacatgtaaaaagaaccaaactcacaatattaacataaacatctttcatattttgttagtactttcaaatgttttcaatttgactttccctctgaatatgcatggtgtgtttcctgtctgtttaagcagaactcacctttccttcttgtaacacagaacccttagccttcttctgttttgccttttcacgccctttatagtgtgaaatgaaaaattagtcacttcctcacatggaaggcagcttttcagaaaataacagacattgctcgtttctcatgcattctacatatcttgaaagaaaagtctgtgagaaaaccctgtgattagagggcaacttaatgcaagatctgtggctctatgttgagagcattctctctctgttatttttattttatttgcattgcttacctatctcaaagtagtcaaactgatatatgagattgagtactcccttttgatattatactgatgaatatttgtaggtgtttcactataaggaacagctaaggaataattttaataaaagtgaaccagaacaaatcactcatttaaaaagtaattcagaagaacagtgtggcatgatcagacttctaattgaatagcgtaacaacagtgtttgtaattatagatttgcttggacaaaatattccaggaactcatagcgagctcaaagcaattaagtgggaacatttttaatttaaaaaaaatttccaaatatttgtgggtccgacagtaatgatcaaaatatgaatgactttggaaaatttacatgaagctcaagtgttaggattgacttatgaaaataaattttatttctatccaaatttgaatgtccaaaccattttttagttacttctttctaatcctagttattcagacaaaatttggaaacttattttatgaccacatctaatattctggctgctttggatacaatactcttgatttatgataattagttaaaatatattaaaaatattattagtaaaataaaatttcacacaataaaaaacaacatagagtacacatatttatatgtatttttaaagataaagaatatctaaaatgtgtttttttcttagctttttagttgtctagaacatttagagaaagagtatgaatatattaaatccacaaacacactatatacttcctcaccactgactattttatcaaatttgccttaaaataatgaaaaagaaaagtatagttaatggtttcaaatatgctaagaaattgactctgcggaggggatcttaaaatgcctgtttactcatgttttcgtatttttcttgtctctaatacttttgtctttgtctgccttgtgtgttcttttctgaatttcatttcagcaatttatgctgctaaatagaatcccgcatgtctgcattcatttacattcaacttattgtaaattttgagattttatttagaaatgaattgtctaattaatttatgtagagtccttttttccaaagagctcaaaacactacatccacattattgacttttggaaaccaaccaaattacttaagaaatggaaaagtagtcacagagaaatttagtaatttgcaaaagccacaacagtagtggaagaattaaaattcataaagtctcatcattctgttggctaaaataatgctctttacaatatgctggctacaaaatggtcttactcttgaattttgcttttggttcatattttggttcttcatattctagtatgttttgttcctgctgaattttacagactcagctaaacaataagttattagtagtcacttgttttcattatcataattgaatttccaagaacaacttgatatcattcagctgtccaaaaaataataagagcattcattaaatactgattttcttaaacttaaatgttgtatttcatatttatttatataatacaaatggaaatcaaaactgaaatagcctccctttagaatgtcacatttttcttagaaaacattttggaattggttaaccttattgggaatggataatttagaaacaaaccaaaaaaaaaaaaagatatttgaagtgtttttataggagatgtatttttatcatagtaaatgatcacaattttaaataattcatcttacaagtcaggtaaaataaaatcgattcccagattccatacattaggagtgcaaagacaggatcatacacatgacttatacctctcatttaaatattttatagtataaagtatttatggaaagggtttgagatagatgatttttgggaaagggcaaaatgtgtcagatgccctagttaatcatgtaatttaattctggtattgtgagtggttagcaatcaattttgaatttataattctgctattttaaaagaaatgtagtcttgtagtatgaaataattaaaaattgttaaatgtatattttggttgtattataataaaatgcaaacatgactgttctatgattataaaaa

SEQ ID NO: 305 - DNA, 2244 bp, Homo sapiens
  source 1..2244: mol_type = genomic DNA
gcgggagggtcagggccagggtgagcgcccgactccgagctgtccccgctcccggcgcggcgctccgctctcagccacctcacggctgccaggagtgcgcgggagtttgccccggagcgcggggaagtttcctccgaagctgcgctcctggaacagcagcacctgcaagcgcccggcagcggcccgcgaggttactttatggaattgggctcttagagaacaagaaaagactgaagttttacgggaaaacaaatcatgtggtcttcagattctgaaataaggagaaatgcagccatctgaaatggtcatgaaccccaaacaagtcttcctctctgtgctgatatttggagtagctgggctactcctcttcatgtatttgcaagtctggattgaagaacaacatacagggagagtggagaagagaagagaacaaaaagtaacttcaggatggggaccagtgaagtacttgcggcctgtacccagaatcatgagtacagaaaaaatccaggaacatatcaccaaccagaaccccaagtttcacatgcctgaggatgtacgagaaaaaaaggaaaatcttctactcaattctgagagatctactaggctcttaacaaagaccagtcattcacaaggaggggatcaagctttaagtaagtccacagggtcaccaacagagaagttgattgaaaaacgtcaaggagctaagactgtttttaacaagttcagcaacatgaattggccagtggacattcaccctttaaacaaaagtttagtcaaagataataaatggaagaaaactgaggagacccaagagaaacgaaggtctttccttcaggagttttgcaagaaatacggtggggtgagtcatcatcagtcacatctttttcatacagtatccagaatctatgtagaagataaacacaaaatcttatattgtgaggtacctaaggctggctgttccaattggaaaagaattctgatggtactaaatggattggcttcctctgcatacaacatctcccacaatgctgtccactacgggaagcatttgaagaagctagatagctttgacctaaaagggatatatacccgcttaaatacttacaccaaagctgtgtttgttcgtgatcccatggaaagattagtatcagcctttagggacaaatttgaacaccccaatagttattaccatccagtattcggaaaggcaattatcaagaaatatcgaccaaatgcctgtgaagaagcattaattaatggatctggagtcaagttcaaagagtttatccactacttgctggattcccaccgtccagtaggaatggacattcactgggaaaaggtcagcaaactctgctatccgtgtttgatcaactatgattttgtagggaaatttgagactttggaagaagatgccaattactttttacagatgatcggtgctccaaaggagctgaaatttcccaactttaaggataggcactcttccgatgaaagaaccaatgctcaagtcgtgagacagtatttaaaggatctgactagaactgagagacaattaatctatgacttttattacttggactatttaatgtttaattatacaactccatttttgtagtttgcattcattttctaaaaccctgtatatacttaatgatgataagttcaaatcagctgtaatttttctataattctctgtatgacagaaatttaaccaagtgcagttgtcttgatttaatgtagatttttaccaaatagtatgacaccaattggcacaaagttataggaaaatcacctacaggagatgtaaacaacttgagttgctctaaaatgtttggaaaagagctgcttttgcattatgaattatattgttgaagcaataacctagccagctgttgcattagctaaagcagcctcttgcaatggtaggaaaaaaggatctcaaatagcatgagtgtatgtctatatcctgaaatttattgtctaaaatgcatgaatatatttttagcagtctgtggcatattaatcaaactgttgaattgttttcttacaccctggaaatctttctatcaactataatgataaatccattttgaagtgatattttggacttaggcattttactttagattggaaggcattatgtgatttacaatatgagaatatagcagaaaaaccagatgaggctgtggctttttatattcaacagccaataaaaaatgcacaacatgctaagatcaaagc

SEQ ID NO: 306 - DNA, 4498 bp, Homo sapiens
  source 1..4498: mol_type = genomic DNA
gtgagtaagcccacggcacagctaagtgcagccgcccgcctctgtcactgggagacagtccacttaaatgcagctccagggttgcgaggcacccaccagcatcattccccatgcgaggtggcaaatgcaacatgctctccagtttggggtgtctacttctctgtggaagtattacactagccctgggaaatgcacagaaattgccaaaaggtaaaaggccaaacctcaaagtccacatcaataccacaagtgactccatcctcttgaagttcttgcgtccaagtccaaatgtaaagcttgaaggtcttctcctgggatatggcagcaatgtatcaccaaaccagtacttccctcttcccgctgaagggaaattcacagaagctatagttgatgcagagccgaaatatctgatagttgtgcgacctgctccacctccaagtcaaaagaagtcatgttcaggtaaaactcgttctcgcaaacctctgcagctggtggttggcactctgacaccgagctcggtcttcctgtcctggggtttcctcatcaacccacaccatgactggacattgccaagtcactgtcccaatgacagattttatacaattcgctatcgagaaaaggataaagaaaagaagtggatttttcaaatctgtccagccactgaaacaattgtggaaaacctaaagcccaacacagtttatgaatttggagtgaaagacaatgtggaaggtggaatttggagtaagattttcaatcacaagactgttgttggaagtaaaaaagtaaatgggaaaatccaaagtacctatgaccaagaccacacagtgccagcatatgtcccaaggaaactaatcccaataacaatcatcaagcaagtgattcagaatgttactcacaaggattcagctaaatccccagaaaaagctccactgggaggagtgatactagtccaccttattattccaggtcttaatgaaactactgtaaaacttcctgcatccctaatgtttgagatttcagatgcactcaagacacaattagctaagaatgaaaccttggcattacctgccgaatctaaaacaccagaggttgaaaaaatctcagcacgacccacaacagtgactcctgaaacagttccaagaagcactaaacccactacgtctagtgcattagatgtttcagaaacaacactggcttcaagtgaaaagccatggattgtgcctacagctaaaatatctgaagattccaaagttctgcagcctcaaactgcaacttatgatgttttctcaagccctacaacatcagatgagcctgagatatcagattcctacacagcaacaagtgatcgtattctggattctatcccacctaaaacttctagaactcttgaacagccaagggcaacactggctccaagtgaaacaccatttgttcctcaaaaactggaaatctttaccagtccagaaatgcagcctacgacacctgctccccagcaaactacatctatcccttctacacctaaacgacgcccccggcccaaaccgccaagaaccaaacctgaaagaaccacaagtgccggaacaattacacctaaaatttctaaaagccctgaacctacatggacaacaccggctcccggtaaaacacaatttatttctctgaaacctaaaatccctctcagcccagaagtgacacacaccaaacctgctcccaagcagacaccacgtgctcctcctaagccaaaaacatcaccacgcccaagaatcccacaaacacaaccagttcctaaggtgccccagcgtgttactgcaaaaccaaaaacgtcaccaagtccagaagtgtcatacaccacacctgctccaaaagatgtgctccttcctcataaaccataccctgaggtctctcagagcgaacctgctcctctagagacacgaggcatcccttttatacccatgatttccccaagtcctagtcaagaggaactacagaccactctggaagaaacagaccaatccacccaagaacctttcacaactaagattccacgaacaactgaactagcaaagacaactcaggcgccacacagattttatactactgtgaggcccagaacatctgacaagccacacatcagacctggggtcaagcaagcacccaggccatcaggtgctgatagaaatgtatcagtggactctacccaccccactaaaaagccagggactcgccgcccacccttgccacccagacctacacacccacgaagaaaacctttaccaccaaataatgtcactggaaagccaggaagtgcaggaatcatttcatcaggcccaataactacaccacccctgaggtcaacacccaggcctactggaactcccttggagagaatagagacagatataaagcaaccaacagttcctgcctctggagaagaactggaaaatataactgactttagctcaagcccaacaagagaaactgatcctcttgggaagccaagattcaaaggacctcatgtgcgatacatccaaaagcctgacaacagtccctgctccattactgactctgtcaaacggttccccaaagaggaggccacagaggggaatgccaccagcccaccacagaacccacccaccaacctcactgtggtcaccgtggaagggtgcccctcatttgtcatcttggactgggaaaagccactaaatgacactgtcactgaatatgaagttatatccagagaaaatgggtcattcagtgggaagaacaagtccattcaaatgacaaatcagacattttccacagtagaaaatctgaaaccaaacacgagttatgaattccaggtgaaacccaaaaacccgcttggtgaaggcccggtcagcaacacagtggcattcagtactgaatcagcggacccaagagtgagtgagccagtttctgcaggaagagatgccatctggactgaaagaccctttaattcagactcttactcagagtgtaagggcaaacaatatgtcaaaaggacatggtataaaaaatttgtaggagtgcagctgtgcaactctctcagatacaagatttacttgagcgactccctcacaggaaaattttataacataggtgatcagaggggccatggagaagatcactgccagtttgtggattcatttttagatggacgcactgggcagcaactcacttctgaccagttaccaatcaaagaaggttatttcagagcagttcgccaggaacctgtccaatttggagaaataggtggtcacacccaaatcaattatgttcagtggtatgaatgtgggactacaattcctggaaaatggtagatgctgcacaaagttaccttctgtttcatcattgcaaacaaaaatcattgaaaatactatgccgcattcatttaaagctattttgtttactatgtataaaagtctacaatctaattaatagcaatactagatgtttattattagaaaagattgctgagagtatttatcaggttttacaaagtcattttaagaaagcaagatactgatgttaacagaataacatttttggggaagctggctccctattcatggtattttaagagatcatttgtatattatttatcacactgttgtaatgatgttttgagatacttttataacaaaattaacatcaaaaaggtatatactttttaaaaaaaatttacttttattgatgtgtactcttcctattgatgagttaattccataaatctctacttagtttaacttattggatcaaattatcttcagcatgtatatctggggaaaaaaggtccgaattttcacatttatatttaaacttcaattttttatatttaaacttcaattttttagcaacagctgaatagctttgcggaggagtttaatagttacacattcatgctaatatacatttcctttaaacatccacaaattcttaaaaagattgaatcagtaaatttcatttcagctaaaaatggagtctaatatattgtttcaaaagatacatttttacccaccataaatgttacaatatctgaatatgctttgtcaaactatccctttatgcaatcgtcttcatattgtttttatgattctaatcaagctgtatgtagagactgaatgtgaagtcaagtctgagcacaaaaagataatgcacgatgagattgcctaccattttataggatatttactatgtatttatacgttaagacctctatgaatgaatgtatcagagaatgtctttgtaactgtttaattcaatctgtaataaaaatctaactaactaactcatttatttctattaaaaaggtattgtcctttaggcggggaatgggaatccttgctgcactgttgcagtcattctgaaaggacctttccctgtacttacctttcaacatgcttcaatcttatcaacgctacattttgtatttttcaaacaagtataaattctgcaataaagagatgtagtttttttttaa

SEQ ID NO: 307 - DNA, 607 bp, Homo sapiens
  source 1..607: mol_type = genomic DNA
agttaaatcttttctgcttactgaaaaggaagagtctgatgattagttactgatcctctttgcatttgtaaagctttggagatattgaatcatgttaccatttctgtttttttccaccctgttttcttccatatttactgaagctcagaagcagtattgggtctgcaactcatccgatgcaagtatttcatacacctactgtgataaaatgcaatacccaatttcaattaatgttaacccctgtatagaattgaaaagatccaaaggattattgcacattttctacattccaaggagagatttaaagcaattatatttcaatctctatataactgtcaacaccatgaatcttccaaagcgcaaagaagttatttgccgaggatctgatgacgattactctttttgcagagctctgaagggagagactgtgaatacaacaatatcattctccttcaagggaataaaattttctaagggaaaatacaaatgtgttgttgaagctatttctgggagcccagaagaaatgctcttttgcttggagtttgtcatcctacaccaacctaattcaaattagaataaattgagtatttaaaaaaaaatttaaagg

SEQ ID NO: 308 - DNA, 3638 bp, Homo sapiens
  source 1..3638: mol_type = genomic DNA
gcgggagcccgcggcgagcgtagcgcaagtccgctccctaggcatcgctgcgctggcagcgattcgctgtctcttgtgagtcaggggacaacgcttcggggcaactgtgagtgcgcgtgtgggggacctcgattctcttcagatctcgaggattcggtccggggacgtctcctgatcccctactaaagcgcctgctaactttgaaaaggagcactgtgtcctgcaaagtttgacacataaaggataggaaaagagaggagagaaaagcaactgagttgaaggagaaggagctgatgcgggcctcctgatcaattaagaggagagttaaaccgccgagatcccggcgggaccaaggaggtgcggggcaagaaggaacggaagcggtgcgatccacagggctgggttttcttgcaccttgggtcacgcctccttggcgagaaagcgcctcgcatttgattgcttccagttattgcagaacttcctgtcctggtggagaagcgggtctcgcttgggttccgctaatttctgtcctgaggcgtgagactgagttcatagggtcctgggtccccgaaccaggaagggttgagggaacacaatctgcaagcccccgcgacccaagtgaggggccccgtgttggggtcctccctccctttgcattcccacccctccgggctttgcgtcttcctggggaccccctcgccgggagatggccgcgttgatgcggagcaaggattcgtcctgctgcctgctcctactggccgcggtgctgatggtggagagctcacagatcggcagttcgcgggccaaactcaactccatcaagtcctctctgggcggggagacgcctggtcaggccgccaatcgatctgcgggcatgtaccaaggactggcattcggcggcagtaagaagggcaaaaacctggggcaggcctacccttgtagcagtgataaggagtgtgaagttgggaggtattgccacagtccccaccaaggatcatcggcctgcatggtgtgtcggagaaaaaagaagcgctgccaccgagatggcatgtgctgccccagtacccgctgcaataatggcatctgtatcccagttactgaaagcatcttaacccctcacatcccggctctggatggtactcggcacagagatcgaaaccacggtcattactcaaaccatgacttgggatggcagaatctaggaagaccacacactaagatgtcacatataaaagggcatgaaggagacccctgcctacgatcatcagactgcattgaagggttttgctgtgctcgtcatttctggaccaaaatctgcaaaccagtgctccatcagggggaagtctgtaccaaacaacgcaagaagggttctcatgggctggaaattttccagcgttgcgactgtgcgaagggcctgtcttgcaaagtatggaaagatgccacctactcctccaaagccagactccatgtgtgtcagaaaatttgatcaccattgaggaacatcatcaattgcagactgtgaagttgtgtatttaatgcattatagcatggtggaaaataaggttcagatgcagaagaatggctaaaataagaaacgtgataagaatatagatgatcacaaaaagggagaaagaaaacatgaactgaatagattagaatgggtgacaaatgcagtgcagccagtgtttccattatgcaacttgtctatgtaaataatgtacacatttgtggaaaatgctattattaagagaacaagcacacagtggaaattactgatgagtagcatgtgactttccaagagtttaggttgtgctggaggagaggtttccttcagattgctgattgcttatacaaataacctacatgccagatttctattcaacgttagagtttaacaaaatactcctagaataacttgttatacaataggttctaaaaataaaattgctaaacaagaaatgaaaacatggagcattgttaatttacaacagaaaattaccttttgatttgtaacactacttctgctgttcaatcaagagtcttggtagataagaaaaaaatcagtcaatatttccaaataattgcaaaataatggccagttgtttaggaaggcctttaggaagacaaataaataacaaacaaacagccacaaatacttttttttcaaaattttagttttacctgtaattaataagaactgatacaagacaaaaacagttccttcagattctacggaatgacagtatatctctctttatcctatgtgattcctgctctgaatgcattatattttccaaactatacccataaattgtgactagtaaaatacttacacagagcagaattttcacagatggcaaaaaaatttaaagatgtccaatatatgtgggaaaagagctaacagagagatcattatttcttaaagattggccataacctgtattttgatagaattagattggtaaatacatgtattcatacatactctgtggtaatagagacttgagctggatctgtactgcactggagtaagcaagaaaattgggaaaactttttcgtttgttcaggttttggcaacacatagatcatatgtctgaggcacaagttggctgttcatctttgaaaccaggggatgcacagtctaaatgaatatctgcatgggatttgctatcataatatttactatgcagatgaattcagtgtgaggtcctgtgtccgtactatcctcaaattatttattttatagtgctgagatcctcaaataatctcaatttcaggaggtttcacaaaatggactcctgaagtagacagagtagtgaggtttcattgccctctataagcttctgactagccaatggcatcatccaattttcttcccaaacctctgcagcatctgctttattgccaaagggctagtttcggttttctgcagccattgcggttaaaaaatataagtaggataacttgtaaaacctgcatattgctaatctatagacaccacagtttctaaattctttgaaaccactttactactttttttaaacttaactcagttctaaatactttgtctggagcacaaaacaataaaaggttatcttatagtcgtgactttaaacttttgtagaccacaattcactttttagttttcttttacttaaatcccatctgcagtctcaaatttaagttctcccagtagagattgagtttgagcctgtatatctattaaaaatttcaacttcccacatatatttactaagatgattaagacttacattttctgcacaggtctgcaaaaacaaaaattataaactagtccatccaagaaccaaagtttgtataaacaggttgctataagcttggtgaaatgaaaatggaacatttcaatcaaacatttcctatataacaattattatatttacaatttggtttctgcaatatttttcttatgtccacccttttaaaaattattatttgaagtaatttatttacaggaaatgttaatgagatgtattttcttatagagatatttcttacagaaagctttgtagcagaatatatttgcagctattgactttgtaatttaggaaaaatgtataataagataaaatctattaaatttttctcctctaaaaactgaa

SEQ ID NO: 309 - DNA, 5143 bp, Homo sapiens
  source 1..5143: mol_type = genomic DNA
gaagtgggcctggcaccttcccggcctgccgcagggatggggcagctgtgctggctgccgctgctggcaccgctcctgttgctgcgaccgccaggggtccagtccgccggccccatccgggccttcgtggtgccccacagccacatggacgtgggctgggtctacactgtgcaggaaagcatgcgggcgtacgccgccaatgtctacacctcagtggtggaagagctggcccgcggccagcagcgccggttcatcgctgtggagcaggagtttttccggctgtggtgggatggcgtcgcctcggaccagcagaaataccaggtccgccagctcctggaggaaggacgcctggaatttgtcatcggaggccaggtcatgcatgacgaggctgtgacgcaccttgatgaccagatcctgcagctcacagaaggacacgggtttctctatgaaacatttgggatccggccacagttctcctggcacgttgacccgtttggcgcctctgccacgacgcccaccctatttgcgctggcgggcttcaatgcccacctcggctcccggatcgactacgacctgaaggcagccatgcaggaggcccgggggctgcagttcgtgtggcgagggtccccatccctctcagagcggcaggaaatcttcacgcacatcatggaccagtacagctactgcaccccgtcccacatccctttctccaacaggtcaggattttactggaatggcgtggctgtcttccccaagcctccccaagatggggtgtaccccaacatgagtgagcctgtcaccccagccaacatcaacctctatgccgaggccctggtggccaacgtgaagcagagggccgcctggttccggacaccgcacgtcctctggccctggggatgtgacaagcagttcttcaatgcctcggtgcagtttgccaacatggacccgctgctggaccacatcaacagccatgctgccgagctcggtgtctcggtgcagtatgccacgctgggcgactacttccgtgccctgcacgctctcaatgtcacctggcgtgtccgcgaccaccacgacttcctgccctattccacagaaccattccaggcctggacgggcttctacacgtcccgcagctcactgaaggggctggcccggcgagccagcgccttgttgtatgccggggagtccatgttcacacgctacctgtggccggccccccgtgggcatctggaccccacctgggccctgcagcagctccagcagcttcgctgggccgtctccgaggtccagcaccatgatgccatcactgggactgagtcccccaaggtgagagacatgtacgcaacgcacctggcctcggggatgctgggcatgcgcaagctgatggcctccatcgtcctagatgagctccagccccaggcacccatggcggccagctccgatgcaggacctgcaggacattttgcctcggtctacaacccgctggcctggacggtcaccaccatcgtcaccctgactgttggtttccctggagtccgcgtcacagatgaggcgggccacccagtgccctcgcagatccagaactcaacagagaccccatctgcgtatgacctgcttattctgaccacaatcccaggcctcagttaccggcactacaacatcagacccactgcaggggcccaagagggcacccaggagccggctgccactgtggcgagcacccttcaatttggccgcaggctgaggagacgcaccagccatgcgggcaggtacttggtgcctgtggcaaacgactgctacattgtgctgctcgaccaggataccaacctgatgcacagcatctgggagagacagagtaaccgaacggtgcgcgtgacccaggaattcctggagtaccacgtcaacggggatgtgaaacagggccccatttccgataactacctgttcacaccgggcaaggccgcggtgcctgcgtgggaagctgtggaaatggagattgtggcgggacagcttgtgactgagatccggcagtacttctacaggaacatgacagcacagaattacacgtatgcaatccgctcccggctcacccatgtgccgcagggccatgacggggagctgctctgccaccggatagagcaggagtaccaagccggccccctggagctgaaccgtgaggctgtcctgaggaccagcaccaacctaaacagccagcaggtcatctactcagacaacaacggctaccagatgcagcggaggccctacgtttcctatgtgaacaacagcatcgcccggaattactaccccatggttcagtcggccttcatggaggatggcaaaagcaggcttgtgttgctgtcggagcgggcacatggcatctccagccaagggaatgggcaggtggaggtcatgctccaccggcggctgtggaacaacttcgactgggacctgggctacaacctcacgctgaacgacacctcagtcgtccacccagtgctctggcttctgctgggatcctggtccctcaccactgccctgcgccagaggagcgcactggcgctgcagcacaggcccgtggtgctgttcggagacctcgctgggactgcgccgaagctcccaggaccccagcagcaagaggccgtgacgctgcccccgaatcttcacctgcagatcctgagcatccctggctggcgctacagctccaaccacacggagcactctcagaatctccggaaaggccatcgaggggaagcccaggctgacctccgccgtgtcctgctgcggctctaccacctatatgaagtgggcgaggacccagtcctgtctcagccagtgacagtgaatctggaggctgtgctgcaggcgctggggtccgtggtggcagtggaggagcgctcgctcacagggacctgggatttgagcatgctgcaccgctggagctggaggacggggcctggccgccacagaggtgacaccacctctccctcgaggccaccaggaggccccatcatcaccgtccacccaaaggaaatccggacgttctttattcactttcaacagcagtgagccctgggcagatgccccggccccagggcttcccccaggaactccatgtaacagaacagacccaggacagggaaaagcagtgcggagggatgggactggggagtcagctgctcatctgcaggctaatggcaggaaatggtcatatttggggtttttccctaatttttttaaacaaaaattacattacaagatccaggttcttcccccccacactcaatcaagccagccctctcctcttctgtcacgtaaaggatatttggcacactcatgcgtcattcattcacaaaacacaaacccaggactttctgcctaaggcagagcacaagactcacagcagcaccgaagcgcatctgccgtccgggccctgccaggcttgccaggctgccagtggtaactgtggacctactgcgtgccacgtgttttcatagactcatcccatgctggcaacagccctgcaaggggcttggctctgccacagggcaggagaggaagttgtagcgcctagcgagagttccagccccagacgcccacctgtgcctcagggcaccgcctgccgagcagagaaggcacagcagccgtcagagtccatgagaggtgaaaccacacagcagggatgtccaatatcagaactattaatatcaataaaagtataaccttcccaggtctatgcccaagagaattgaaaacatccatccacacaatacctgtgctcccgcgttcatagcagcattactcaaaagtcaaacggtagcaacaacccaaatgtccatccacagatgaattaagacatgaagtgtgttctgtccatacaatggaatattatttggccataaaaaggaaggaaattctgacgcatgccacagcctgagtgaatcctacaaatattacgctaagtgaaagaagccaatcacgagtttatgtgaaatgtccagaataggcaaatctgtgtatcagagacaaagcacattggtggttgccaggtactggaggaagagagaagaggcatgacagctaacagggacgggctttctttggaagatgatgaaattgtggaatgatggttgcacaactttgtgaatatactagaaaccaatgaattaaaaactttggaagatgaattttatggtctgtgaattatatctcaattttaaaacttttttttttttttcccgagacagagtctcactctgtcgcccaggctggagtgcagtgtcaagatctcagctcactgcgacctgcacctcctgggttcaagcaattctccagcctctgcctcccgagtagctgctactagagatgcaccactgcgtcagctaatttttgtatttttagtagagacggggattcaccatgttggccaggctgatctggaactcctgacctcaggtgatctgcctgccccggcctcccaaagtgccaggattacaggcgtgagccaatgtgcccggcctaaaccgttttaaagagtaaactgtaagatgtaggaaattatttggtactctagggctgaaggaaagtacccagaaaggaccagcttggaaggagtcagacctctggacaacgtgcagtttggccaccagacagcaaagacagtctctggtttggccaggcaggagctgggctggagttgctgaccaagcaataggccacccctgtgaggtggggtcaggtgagcagccaccagaggcatggatgtgcagtgggaggttgaggcacaaggagtgaggcaggagccctttagagcatgtgggctgcatgaggcttggtttctgtgtcaagaagactatggaggctgggcagtggttcatgccttaatcccagcactttgggaggccaaagcaaccggatcactggtggtcagtagttcaagaccaggctggccaacatggtgaaaccccatctctactaaaaatacaaagttaaccgggtgtggtggtgtgcgcctgtagtcccagctactcgggaggctgaggcaggagaatcaatcacttgaacctgggaggcggaggagacctccgcctctgcactccagcctgggtgacaagagtgagactccgtctcaaaaaaaaaaaaaaaa

SEQ ID NO: 310 - DNA, 3281 bp, Homo sapiens
  source 1..3281: mol_type = genomic DNA
tcccctcgcgccgggaggagctggcggcgagcgccgagccgggcgcgcagcgacggagctggggccggcctgggaccatgggcggacatgttcccgatttgaggtgaaaccatgaagagaaaatagaatacttaataatgcttttccgcaaccgcttcttgctgctgctggccctggctgcgctgctggcctttgtgagcctcagcctgcagttcttccacctgatcccggtgtcgactcctaagaatggaatgagtagcaagagtcgaaagagaatcatgcccgaccctgtgacggagccccctgtgacagaccccgtttatgaagctcttttgtactgcaacatccccagcgtggccgagcgcagcatggaaggtcatgccccgcatcattttaagctggtctcagtgcatgtgttcattcgccacggagacaggtacccactgtatgtcattcccaaaacaaagcgaccagaaattgactgcactctggtggctaacaggaaaccgtatcacccaaaactggaagctttcattagtcacatgtcaaaaggatccggagcctctttcgaaagccccttgaactccttgcctctttacccaaatcacccattgtgtgagatgggagagctcacacagacaggagttgtgcagcatttgcagaacggtcagctgctgagggatatctatctaaagaaacacaaactcctgcccaatgattggtctgcagaccagctctatttagagaccactgggaaaagccggaccctacaaagtgggctggccttgctttatggctttctcccagattttgactggaagaagatttatttcaggcaccagccaagtgcgctgttctgctctggaagctgctattgcccggtaagaaaccagtatctggaaaaggagcagcgtcgtcagtacctcctacgtttgaaaaacagccagctggagaagacctacggggagatggccaagatcgtggatgtccccaccaagcagcttagagctgccaaccccatagactccatgctctgccacttctgccacaatgtcagctttccctgtaccagaaatggctgtgttgacatggagcacttcaaggtaattaagacccatcagatcgaggatgaaagggaaagacgggagaagaaattgtacttcgggtattctctcctgggtgcccaccccatcctgaaccaaaccatcggccggatgcagcgtgccaccgagggcaggaaagaagagctctttgccctctactctgctcatgatgtcactctgtcaccagttctcagtgccttgggcctttcagaagccaggttcccaaggtttgcagccaggttgatctttgagctttggcaagacagagaaaagcccagtgaacattccgtccggattctttacaatggcgtcgatgtcacattccacacctctttctgccaagaccaccacaagcgttctcccaagcccatgtgcccgcttgaaaacttggtccgctttgtgaaaagggacatgtttgtagccctgggtggcagtggtacaaattattatgatgcatgtcacagggaaggattctaaaaggtatgcagtacagcagtatagaatccatgccaatacagagcatagggaaaggtccacttctagttttgtctgttactaagggtagaagattattgctttttaaaggctaaatattgtttgtgggaaccacagatggttggggttgaacagtaagcacattgctgcaatgtggtacgtgaattgcttggtacaaaatggccagttcacagaggaatagaaggtactttatcatagccagacttcgcttagaatgccagaataatatagttcaagacctgaagttgccaatccaagtttgcactcttctggcctgccccatgttactatgtgatggaaccagcacacctcaaccaaaatttttttaatcttagacatttttaccttgtccttgttaagaatttcttgaagtgatttatctaaaataaaggttggcaaactttttctgtaaagggccagattgtaaatatttcagactgtgtggaccaaaaggccacatacagtctctgtcataactactcaactctgtttctgaagcaggaaagccaccacagacagtacataaaggaatatgtgtagctgggttcccaggccggacaaaacagatggtgaccagatttggcccctgggctgtagtttgctgacccctcatctaaaaaataggctatactacaattgcacttccagcactttgagaacgagttgaataccaagaattattcaatggttcctccagtaacttctgctagaaacacagaatttggtctgtatctgacactagaacaaaacttgagggtaaataaacattgaattagaatgaatcatagaaaactgattagaagaatacttgatgtttatgatgattgtggtacaagatagttttaagtatgttctaaatatttgtctgctgtagtctatttgctgtatatgctgaaatttttgtatgccatttagtatttttatagtttaggaaaatattttctaagaccagttttagatgactcttattcctgtagtaatattcaatttgctgtacctgcttggtggttagaaggaggctagaagatgaattcaggcactttcttccaataaaactaattatggctcattccctttgacaagctgtagaactggattcatttttaaaccattttcatcagtttcaaatggtaaattctgattgatttttaaatgcgtttttggaagaactttgctattagatagtttacagatctttataaggtgttttatatattagaagcaattataattacatctgtgatttctgaactaatggtgctaattcagagaaatggaaagtgaaagtgagattctctgttgtcatcggcattccaactttttctctttgtttttgtccagtgttgcatttgaatatgtctgtttctataaataaattttttaagaatacctatactatacaactaatggtttgtacctataagtcactcgagttattttcaagtgagagccagtattttatttttcccccttcattcaaatgtcatgcagagaaccagtattttaaaattttattttaactgctttactaactgctgaaagttgtgttatctctcaagtattcaaagactaaatgtgttttctttccttcccactcacaatatatctgaattagaactgctaaacacagcttgaagacttaaaaataaaagtgactcggaa

SEQ ID NO: 311 - DNA, 2077 bp, Homo sapiens
  source 1..2077: mol_type = genomic DNA
cagcccagcctgactcctggagattgtgaatagctccatccagcctgagaaacaagccgggtggctgagccaggctgtgcacggagcgcctgacgggcccaacagacccatgctgcatccagagacctcccctggccgggggcatctcctggctgtgctcctggccctccttggcaccgcctgggcagaggtgtggccaccccagctgcaggagcaggctccgatggccggagccctgaacaggaaggagagtttcttgctcctctccctgcacaaccgcctgcgcagctgggtccagccccctgcggctgacatgcggaggctggactggagtgacagcctggcccagctggctcaagccagggcagccctctgtggaaccccaaccccgagcctggcgtccggcctgtggcgcaccctgcaagtgggctggaacatgcagctgctacccgcgggcttggtgtcctttgtcgaagtggtcagcctatggtttgcagaggggcagcggtacagccacgcggcaggagagtgtgctcgcaacgccacctgcacccactacacgcagctcgtgtgggccacctcaagccagctgggctgtgggcggcacctgtgctctgcaggccaggcagcgatagaagcctttgtctgtgcctactcccccagaggcaactgggaggtcaacgggaagacaatcgtcccctataagaagggtgcctggtgttcgctctgcacagccagtgtctcaggctgcttcaaagcctgggaccatgcaggggggctctgtgaggtccccaggaatccttgtcgcatgagctgccagaaccatggacgtctcaacatcagcacctgccactgccactgtccccctggctacacgggcagatactgccaagtgaggtgcagcctgcagtgtgtgcacggccggttccgggaggaggagtgctcgtgcgtctgtgacatcggctacgggggagcccagtgtgccaccaaggtgcattttcccttccacacctgtgacctgaggatcgacggagactgcttcatggtgtcttcagaggcagacacctattacagagccaggatgaaatgtcagaggaaaggcggggtgctggcccagatcaagagccagaaagtgcaggacatcctcgccttctatctgggccgcctggagaccaccaacgaggtgattgacagtgacttcgagaccaggaacttctggatcgggctcacctacaagaccgccaaggactccttccgctgggccacaggggagcaccaggccttcaccagttttgcctttgggcagcctgacaaccacgggtttggcaactgcgtggagctgcaggcttcagctgccttcaactggaacgaccagcgctgcaaaacccgaaaccgttacatctgccagtttgcccaggagcacatctcccggtggggcccagggtcctgaggcctgaccacatggctccctcgcctgccctgggagcaccggctctgcttacctgtctgcccacctgtctggaacaagggccaggttaagatcacatgcctcatgtccaaagaggtctcagaccttgcacaatgccagaagttgggcagagagaggcagggaggccagtgagggccagggagtgagtgttagaagaagctggggcccttcgcctgcttttgattgggaagatgggcttcaattagatggcgaaggagaggacaccgccagtggtccaaaaaggctgctctcttccacctggcccagaccctgtggggcagcggagcttccctgtggcatgaaccccacagggtattaaattatgaatcagctgaacctgtgcatgctcatttcaaagggaaattcagatgatccaggatgaccctggagagaccagagggggcctgaggcttcactgcagcggcctccacccacctattccctttcctggtcaccttcatggtccaggacactctctggaagttctgggtctccccaagaagaggaagaccagactctgcctcagtgaggagctgttctcatggctggggcccaggcaggcagggtattaatagaagttgctctgaa

SEQ ID NO: 312 - DNA, 2902 bp, Homo sapiens
  source 1..2902: mol_type = genomic DNA
atcacaaaggaggcccagaagccttcaggcagcctcaactcagccccaagccactgctctcccatcccagtccctggaaatccacccacttggcccagctcaccccaactccaacccactgggacccagtctccaggggcctgactgtgggcggcagccactcctgagtgagcaaaggttcctccgcggtgctctcccgtccagagccctgctgatggggaagtccgaaggcccagtggggatggtggagagcgccggccgtgcagggcagaagcgcccggggttcctggagggggggctgctgctgctgctgctgctggtgaccgctgccctggtggccttgggtgtcctctacgccgaccgcagagggaagcagctgccacgccttgctagccggctgtgcttcttacaggaggagaggacctttgtaaaacgaaaaccccgagggatcccagaggcccaagaggtgagcgaggtctgcaccacccctggctgcgtgatagcagctgccaggatcctccagaacatggacccgaccacggaaccgtgtgacgacttctaccagtttgcatgcggaggctggctgcggcgccacgtgatccctgagaccaactcaagatacagcatctttgacgtcctccgcgacgagctggaggtcatcctcaaagcggtgctggagaattcgactgccaaggaccggccggctgtggagaaggccaggacgctgtaccgctcctgcatgaaccagagtgtgatagagaagcgaggctctcagcccctgctggacatcttggaggtggtgggaggctggccggtggcgatggacaggtggaacgagaccgtaggactcgagtgggagctggagcggcagctggcgctgatgaactcacagttcaacaggcgcgtcctcatcgacctcttcatctggaacgacgaccagaactccagccggcacatcatctacatagaccagcccaccttgggcatgccctcccgagagtactacttcaacggcggcagcaaccggaaggtgcgggaagcctacctgcagttcatggtgtcagtggccacgttgctgcgggaggatgcaaacctgcccagggacagctgcctggtgcaggaggacatggtgcaggtgctggagctggagacacagctggccaaggccacggtaccccaggaggagagacacgacgtcatcgccttgtaccaccggatgggactggaggagctgcaaagccagtttggcctgaagggatttaactggactctgttcatacaaactgtgctatcctctgtcaaaatcaagctgctgccagatgaggaagtggtggtctatggcatcccctacctgcagaaccttgaaaacatcatcgacacctactcagccaggaccatacagaactacctggtctggcgcctggtgctggaccgcattggtagcctaagccagagattcaaggacacacgagtgaactaccgcaaggcgctgtttggcacaatggtggaggaggtgcgctggcgtgaatgtgtgggctacgtcaacagcaacatggagaacgccgtgggctccctctacgtcagggaggcgttccctggagacagcaagagcatggtcagagaactcattgacaaggtgcggacagtgtttgtggagacgctggacgagctgggctggatggacgaggagtccaagaagaaggcgcaggagaaggccatgagcatccgggagcagatcgggcaccctgactacatcctggaggagatgaacaggcgcctggacgaggagtactccaatctgaacttctcagaggacctgtactttgagaacagtctgcagaacctcaaggtgggcgcccagcggagcctcaggaagcttcgggaaaaggtggacccaaatctctggatcatcggggcggcggtggtcaatgcgttctactccccaaaccgaaaccagattgtattccctgccgggatcctccagccccccttcttcagcaaggagcagccacaggccttgaactttggaggcattgggatggtgatcgggcacgagatcacgcacggctttgacgacaatggccggaacttcgacaagaatggcaacatgatggattggtggagtaacttctccacccagcacttccgggagcagtcagagtgcatgatctaccagtacggcaactactcctgggacctggcagacgaacagaacgtgaacggattcaacacccttggggaaaacattgctgacaacggaggggtgcggcaagcctataaggcctacctcaagtggatggcagagggtggcaaggaccagcagctgcccggcctggatctcacccatgagcagctcttcttcatcaactatgcccaggtgtggtgcgggtcctaccggcccgagttcgccatccaatccatcaagacagacgtccacagtcccctgaagtacagggtactggggtcgctgcagaacctggccgccttcgcagacacgttccactgtgcccggggcacccccatgcaccccaaggagcgatgccgcgtgtggtagccaaggccctgccgcgctgtgcggcccacgcccacccgctgctcggaggcatctgtgcgaaggtgcagctagcggcgacccagtgtacgtcccgccccggccaaccatgccaagcctgcctgccaggcctctgcgcctggcctagggtgcagccacctgcctgacacccagggatgagcagtgtccagtgcagtacctggaccggagccccctccacagacacccgcggggctcagtgcccccgtcacagctctgtagagacaatcaactgtgtcctgcccaccctccaaggtgcattgtcttccagtatctacagcttcagacttgagctaagtaaatgcttcaaag

SEQ ID NO: 313 - DNA, 5964 bp, Homo sapiens
  source 1..5964: mol_type = genomic DNA
catatcctagaggttgggtgaccaaccctgtcccagtttgcctgggacttgagggtttttccaggatgcagcactttcagtgctaaaactaggaatgttccaggcactctgggatgagttggtcaccttgcctaggtgcctaagaacctctcccctgcccacgtactaagaccaatgagtaagagagacaaggctgggaaggacacagctagaggaaaaggcaaggacatcagcaagtatggcagtgtgcagaaaagctttgcagacagaggcctcccaaaacctcccaaggagaagctgcttcaggtggagaagctgagaaaggagagcggcaagggcagtttcctccagcccacagccaagccccgcgccctggcccagcagcaggctgtgatccggggcttcacctactacaaggcaggcaagcaggaggtgaccgaggcggtggcagacaacaccctccagggcacttcctggctggagcaactgccgcccaaggtggagggcaggtccaactccgcagagcccaactccgcagagcaggatgaggctgagcccaggtcctccgagcgagtggacctggcttctggcacccccacttcaatccctgccaccaccaccaccgccaccaccaccccaacccccaccaccagtctcctgcccaccgagccaccttcaggtccagaagtctccagccaaggcagagaggcgagctgtgagggcaccctccgggctgtggacccccctgtgaggcaccacagctatgggcgccacgagggagcctggatgaaggaccctgcagctcgagacgacaggatctatgtcaccaactactactatggaaacagcctggtggagttccgcaacctggaaaacttcaagcaaggccgctggagtaacatgtacaagctaccctacaactggatcggcacaggccacgtggtgtaccagggcgccttctactacaaccgcgccttcaccaagaacatcatcaagtacgacctacggcagcgcttcgtggcctcctgggcgctgctgcccgacgtggtatatgaggacaccacaccttggaagtggcgcggacactcggacattgactttgccgtggacgagagcggcctgtgggtcatctaccccgccgtggacgaccgcgatgaggcccagcccgaggtgatcgtcctgagtcgcttggaccccggcgatctctccgtgcaccgggagaccacgtggaagacacggctgcggcggaactcctacgggaactgcttcctggtgtgcggcatcctgtatgccgtggacacgtacaaccagcaggaaggccaggtcgcctacgctttcgacacgcacacgggcaccgacgcacgcccccagctgccgttcctcaacgagcacgcctacaccacccagatcgactacaaccccaaggagcgggtgctgtacgcctgggacaatggccaccagctcacctacaccctccacttcgtggtctgagtggagacctgtgctccccggagaggggcagcagtgcgggaggggctttgcacagcagctcctgcaactgacccagtccgcaaatatttattgggggccagcccagggctgggactgggcatgaggtggtcaccaggattgagcttcctcagcacccagtgggtaatacttgcttccacttgcagagcaccgtgccaagcacttcccacacacttacccgtttgattctcctagcacctcccttggaggtagagatcatgaacccatttaacagacgaggagacaggctcagagaggcaccgtcccttgcctaacacctcagttgtgatcaggcaggctgtgctctcaggacagccccattttagggatgaggagacttcaccacgccctcccctccctgccctcccccatctccccggtctcccttgttctctcaacccagtctcccttcccagggccactcagaaccagaggtctttagggccagtgtactggtgtggggtggaggccctggctctgcctgccatcctagggccctgttctggctgagctgttggtggccctgggctttgggccccttagccaatgtccttgtctcttgtctttggccagccccctcagcccagcccaccccacccgctgtccggccacattccaaacctctaccgtcacctagctgctgagcagaaaccgcaccccgagagaaaatcccatcctctgttccaaggcccctgtctgctctatgctcatttttattttctcttattcttcatcagtgccgtcatttgtttctgcagcagcagctgagaaggcagccggcagctctgccagggtggggagctgagctgaggctccctctccacccagaagcactggcgttgttcacatagtcaggccttgggtcccctccctggttcatcccagagcctttgggcctggagtccgccttgtcctttttctctgggctttcaaacccacaacctttacacactcagggatacctccgggtctgccatgaataagaccctaggcccaagtctggtgtggtgccaggatggcacagtttccctcttccttgccagccctgacctggtcactgggcaggctggcccagcagcctgggggctgcagaagacatggtgtgagtagttgggtccaggggaggcatcaggccttcttctggttgcaggagagaaccagagggtgggaacggggagggaagaactgagggtctgcagactggacttttcctggctcgacccaggacttgggttgaggatgcacgggggccaccttgcccggggccactggtggctccccagagcctcagacccacacagcccagaggacgaggccttcaagcctgcccctcttctgcttttttagacagtatttttagagctggaaagaaattttctagcccaactccctgtttcatgaaagagaaaagaggctcagaaaagtttagagagcagctcagtgtcacactgggagctgggcacagccgatctccttccagaagggttctgtctgtatcctttattctccgcacatggaggctgccctacctgggaaggcaccccagcacctgtgaaggacatttactgctcatcctcacctgccccctggcccttgctgccttcattctgtcccaatgccagctccctggatgtctgtatgtttgaataccagttgccatgttaggaaggtcagctgcacagccaagagtgtaagagtgtaaagaaatgcctttttttttttttttgagttggagttttgctcttgtcgcccaggctggagtgcagtggcgcgatctcggctcactgcaacctctgccccctgggttcaagcgattctcctgcctcagcctccctagtagctgggactacagcacccaccaccacacccagctaatttttgtatttttagtagagacaggggtttcaccacgttggccaggctggtctcgaactcctgaccttaggtgatccgcccgcctcagcctcccaaagtgttgggattacaggcatgagccactgcgcctggccagcaaatgctttttgtgcagaatacacttctttcaggcattgtcaggtgctgttttgtttaagctctaactcacccctggaatacaggggaatgatgacaaccagcccagccaggcctgactcatcatggtcacatccagcccccacccccggccaactaaccactgcaggctcctcttccagactcaccagggggcctcgaggccccggcatctcccttggccctgggtgtgggttttacaagactgtgtctttcatgacatcatagcccaaccatgtgagaagaaggagaaggcccccctttcttcattaatctgaaaaaaaggaaagtgagaataggctgatttttaaaagttaaggggcaagcagcattgcattctgggggaacgatcctggccacagccgccaaacaaacattcactaggcctcttctgttttcatacccttgtaagtgggttatgtggtgggtatggtcagttttttcttttttcttttcttttcttttttttgagacagagtttcgcttttgttgcccgggctggaatgcaatggcgcgattcagctcactgcaatctccgcctcccgggttcaagtgattctcctgccttagcctcctgaaaagctgggattacagggccctgccaccaagcccagctaattgtatttttagtagagacaggatttcaccatgttggccaggccagtctcaaactcctgacctcaggtgatccacctgcctcagcctcccagactgttgggattacaggcatgagccaccacgcctggccagtttcttcattttacatatggtcacattggcgcctagaacagttaggtcgctcgtcacataggcagttaagtggagaaccaggtttcaaaatcaggtaagaaaaccatcatcattaactgagcaccagctgtgctaagcctgccacgggcgtatccttgcagcctcacaacagtgggaggtctgtatcctgaatgtcctcattttacagatgaggacattgaggagaagagacttacccaggctcacacagcagctcagcctgttccaggcgctggtcagtgcgtgttctttgccaccagcctgtcactccagtggcagctccagaaacggaggctgttgcttttatccctaaactgcatccacagagaagccccaagaaggaggttggggccagctcataaaaagcctgaatgccaagccaaggagtggatgcctccagtcatatttagaacaaagtcaagtataaatttacagagaaaaaattctaagacagttggatgttgtcctgttggtgaggaagggaaaggtttttcttgtagggaactggaaccagcccacaactgcacacttgtgagctgtcatggaaacctgatccccaacagcttttgaggttgtttgtttgtttgtttgtttacctgtcttgggctttgttgcttttggcaaaaggtacttcaaacaagggagggcctggactgagggggaccaggtcttcttgctgacctcgtctacaaaggcaaaggaaggcaaaggaagctgtctcgggtgtttctgaacaacgtgactcatgaggggctttggctacctcttgcgttccccctagagatgtccaggccttacatttaatcggctttctctgcggtggggtagagaatggagctcccgccttgcgggcagtgctaaaggtggagctgggggattttcctgggaatgatttgagggctcttgaaagcccatgtgttccaaagcgtctttaactctgggatagcattggaagccgctgtcatgacaggacatggcactggatggctggcagagagccctggctgggagttagggagccctgggttggaatccagccccacctcttttatgccacaggtttggtcaagttctctcccgctcagggtagggctgtgaactccctcttacagctaagaacatgcagcttagtgaggacaagacccttctagagctttacccctaatccccccccaggagccccgaggccggcattattcctccccattacaggtgatgagcctcaaattcagagagcttaagcaacctgctcagggtcacgtctccaacaggcagtagagtcaaggtataaaccaggtctgtttttgtaccagagtcccagactaactgttggtaggaatcttgtaaccagtcatgttttcttccttgttttggccgctgggaagctcaaagtcaaattcgagacccttttttttccaattgtgctgagtctcctactagactcgcttcattctagctttctgcttttacctttaccctaatctttttatttttatgctattgtactttatttttgtaagttgctgagatatctgttttgcaacaagatgggctatatctaaataaagacatgatcaaaggtttgatttaaaagtc

SEQ ID NO: 314 - DNA, 4397 bp, Homo sapiens
  source 1..4397: mol_type = genomic DNA
atcgcaatgtgggcattgatcaagccagctgccagggcagcgggcgcagggcttgggcactggagcccagccccggaccgcacctccagcagtgctgggtgcagaaggcagtcactgtggcagtggagagacagagtgtgtacccagacacgtgttgcttctggggtaaggttctgaaggctgagtagccagcgggatgcccggcttgctgaattggatcacgggggcagccctgcccctcaccgcgtctgatgttacctcctgtgtcagcggttatgccctgggcctaactgcctccctcacctatggcaacctggaagcccagcccttccagggcctcttcgtgtaccccctggatgagtgcaccacggtgatcggctttgaggcagtcattgccgaccgtgtcgtgacagtacagatcaaggacaaagccaagctggagagcggccacttcgatgcctcccatgttcgatccccaacagtcacagggaacattctgcaagacggggtttccatagcccctcattcctgcacaccgggaaaggtgaccttggacgaggatttggagcggatcctgttcgtggccaacctggggaccattgcccccatggagaatgtcaccatcttcatcagcacctcctcggagctcccaacgctgcccagcggggctgtgagggtccttctgcctgctgtctgtgccccaaccgtgccccagttctgcaccaagagcactggcacctccaaccaacaggcccagggcaaagacaggcactgcttcggtgcctgggccccgggctcctggaataagttgtgcctggcgactctcctgaacaccgaagtgtccaaccccatggagtatgagttcaacttccagctggagatccgtgggccatgtctgctcgcaggggtggagagtcccactcatgagattcgtgccgacgccgccccatctgcccgctcggccaagagcatcatcatcaccttggccaacaagcacacctttgaccggcctgtggagatcctcatccaccccagcgagccccatatgccccatgtcctgatagagaaaggggacatgaccctgggagagtttgaccagcacttgaagggaagaacagatttcattaaagggatgaagaagaagagcagagcagagcggaagacagaaatcattcgaaaacgcctccacaaagacattccccaccactccgtcatcatgctcaacttctgtcccgacctccagtcagtccagccgtgcctgagaaaggcccacggggagttcatcttcctcattgacaggagcagcagcatgagcgggatcagcatgcaccgagtcaaggatgccatgttggtggcccttaagagcctcatgccagcctgcctcttcaatatcattgggtttggatccacatttaagagcctttttccttccagccagacctacagtgaggacagcttggccatggcttgtgatgacatccagagaatgaaggccgacatgggtgggaccaacatcctttcccctctcaagtgggtcatcaggcagccagtgcaccgaggccacccgcggctcctcttcgtgatcacagatggcgctgtcaacaacacagggaaggtgctggagctggtgcgaaatcacgccttctccaccaggtgctatagctttggaattggacccaacgtctgccacagactggtgaaaggactggcatctgtgtccgagggcagtgctgagctcctgatggagggggagcggctgcaacccaagatggtcaaatccttgaagaaggccatggccccagtcctgagcgatgtgactgtggagtggatcttccctgagaccactgaggtcctggtctcacccgtcagcgccagctccctcttccctggagaacggctggtggggtatggcattgtatgtgatgcttctttgcacatctccaatcccagatctgacaagaggcgccggtacagcatgctgcactctcaggagtctggcagctctgtcttctaccactctcaggatgacggacccgggctggaaggtggagactgtgccaagaactcgggggcacccttcatcctagggcaggccaaaaatgcccggctagccagcggagactctaccaccaagcacgatctgaacctctctcagcgacggagggcatacagcaccaaccagatcaccaatcacaagcccctcccaagagccaccatggcaagtgaccccatgccagctgccaagagatacccactgcggaaagccaggctgcaggacctcaccaaccagaccagcctggatgtccagcggtggcagattgatttgcagcccttgctgaacagtggtcaggacctgaaccagggccccaaactccgtggcccaggggcccgaaggccctctctgctgccccaaggctgccagcccttcctgccctggggccaggagacccaggcctggagccctgtgagagagcggacttctgacagccgaagccctggagatctggagccgtcccaccatccctctgccttcgagacagagacgtcctcggactgggaccccccagccgagtcccaggagcgagccagtcccagcaggcccgccaccccggccccggtgctgggcaaggccctggtcaaaggcctgcacgacagccaacgcctgcagtgggaggtgagcttcgagctggggacccctggaccggagcggggcggcgcgcaggatgccgacctatggagcgagaccttccaccacctggcggcccgcgccatcatccgcgacttcgagcagctggcggagcgcgagggcgagatcgagcaggggtccaaccgccgctaccaagtgagcgccttgcacaccagcaaggcctgcaacatcattagcaaatacacagccttcgtgcctgtggacgtgagcaagagccggtacctgcccaccgtggtggagtaccccaactctgctgccctgcgtatgcttggctctcgggccctggcccaacagtggaggggcacctcttctggctttggaaggccgcagacgatgcttggagaagattcggcaccaggaaatggtccccagcgcagcctggctacaaatactctttcttccatgaaggcctcagagaatctctttggatcctggctaaatctcaacaagtccaggctactgacgcgagcagccaagggcttcctgagcaagccactgatcaaagctgtggagtcgacctccgggaaccagagcttcgactacatacctctggtgtctctgcagctggcctccggagccttcctgctcaacgaagccttctgtgaggccacgcacatccccatggagaagctcaagtggacgtcccccttcacctgccatcgagtgtccctcaccacccgcccgtctgagtccaagaccccgagtccccagctgtgcaccagctccccgcctaggcacccgtcctgtgacagcttctccctggagcctctggccaagggcaagctgggcctggagccgagggcagtggtggagcacactgggaagctgtgggccacggtggtggggctggcatggctggagcacagttcggcctcctacttcactgagtgggagttggtggctgccaaggccaactcatggctggagcagcaggaagtacccgagggccgcacgcagggcacactcaaggccgctgcccgccagctgtttgtgcttctgcggcactgggatgagaatctcgagttcaatatgctctgctataacccgaattatgtgtagttgagtgacggggaggctgggtggagggaagggtggggaggagagggatgggcagggccatgtcggcctggtttcggggagcttttggagctgtaactaatatttcagttactagaaagagccctggactggcagccaggaggcctgagttcaatcccaactttgctaccatccagccatgcaactttaggccagtgcctgcccccgtctgggcctcagtttcctcatctataaaataagagggcgagatgaaggaggtggagtggatctcaaatggttcagtggttcctttctgcccattcaggcagtcccgggctgactgctgctggggctggcgagggaagatgcagtggaagcctgagccctgtctggaggtagaccacgtgggcacggagtggacacagcaatgcccactcaaataaaagggcagatgagagaacccagtgacctcaagtaaccaggcctacaggcttgcataggcacatagagactagcaagtctggtgcctgtaggacaggctcttgtctccatggtaacagccaaggaccccccctaaatcccacttaaaagccaattggagaagcatccttctcaacgctttacaaaagagtagtttgggggccttttgttt

SEQ ID NO: 315 - DNA, 2389 bp, Homo sapiens
  source 1..2389: mol_type = genomic DNA
atcgcaatgtgggcattgatcaagccagctgccagggcagcgggcgcagggcttgggcactggagcccagccccggaccgcacctccagcagtgctgggtgcagaaggcagtcactgtggcagtggagagacagagtgtgtacccagacacgtgttgcttctggggtaaggttctgaaggctgagtagccagcgggatgcccggcttgctgaattggatcacgggggcagccctgcccctcaccgcgtctgatgttacctcctgtgtcagcggttatgccctgggcctaactgcctccctcacctatggcaacctggaagcccagcccttccagggcctcttcgtgtaccccctggatgagtgcaccacggtgatcggctttgaggcagtcattgccgaccgtgtcgtgacagtacagatcaaggacaaagccaagctggagagcggccacttcgatgcctcccatgttcgatccccaacagtcacagggaacattctgcaagacggggtttccatagcccctcattcctgcacaccgggaaaggtgaccttggacgaggatttggagcggatcctgttcgtggccaacctggggaccattgcccccatggagaatgtcaccatcttcatcagcacctcctcggagctcccaacgctgcccagcggggctgtgagggtccttctgcctgctgtctgtgccccaaccgtgccccagttctgcaccaagagcactggcacctccaaccaacaggcccagggcaaagacaggcactgcttcggtgcctgggccccgggctcctggaataagttgtgcctggcgactctcctgaacaccgaagtgtccaaccccatggagtatgagttcaacttccagctggagatccgtgggccatgtctgctcgcaggggtggagagtcccactcatgagattcgtgccgacgccgccccatctgcccgctcggccaagagcatcatcatcaccttggccaacaagcacacctttgaccggcctgtggagatcctcatccaccccagcgagccccatatgccccatgtcctgatagagaaaggggacatgaccctgggagagtttgaccagcacttgaagggaagaacagatttcattaaagggatgaagaagaagagcagagcagagcggaagacagaaatcattcgaaaacgcctccacaaagacattccccaccactccgtcatcatgctcaacttctgtcccgacctccagtcagtccagccgtgcctgagaaaggcccacggggagttcatcttcctcattgacaggagcagcagcatgagcgggatcagcatgcaccgagtcaaggatgccatgttggtggcccttaagagcctcatgccagcctgcctcttcaatatcattgggtttggatccacatttaagagcctttttccttccagccagacctacagtgaggacagcttggccatggcttgtgatgacatccagagaatgaaggccgacatgggtgggaccaacatcctttcccctctcaagtgggtcatcaggcagccagtgcaccgaggccacccgcggctcctcttcgtgatcacagatggcgctgtcaacaacacagggaaggtgctggagctggtgcgaaatcacgccttctccaccaggtgctatagctttggaattggacccaacgtctgccacagactggtgaaaggactggcatctgtgtccgagggcagtgctgagctcctgatggagggggagcggctgcaacccaagatggtcaaatccttgaagaaggccatggccccagtcctgagcgatgtgactgtggagtggatcttccctgagaccactgaggtcctggtctcacccgtcagcgccagctccctcttccctggagaacggctggtggggtatggcattgtatgtgatgcttctttgcacatctccaatcccagatctgacaagaggcgccggtacagcatgctgcactctcaggagtctggcagctctgtcttctaccactctcaggatgacggacccgggctggaaggtggagactgtgccaagaactcgggggcacccttcatcctagggcaggccaaaaatgcccggctagccagcggagactctaccaccaagcacgatctgaacctctctcagcgacggagggcatacagcaccaaccagatcaccaatcacaagcccctcccaagagccaccatggcaagtgaccccatgccagctgccaagagatacccactgcggaaagccaggctgcaggacctcaccaaccagaccagcctggatgtccagcggtggcagattgatttgcaggccttcatctgccttacctccgaggacaccttccaaatcaggacacccaccggtcaataa

SEQ ID NO: 316 - DNA, 1069 bp, Homo sapiens
  source 1..1069: mol_type = genomic DNA
ccaggcaggggagcagatgagggaggagccttagagctggagcaaagtgaggaagctgtctccatagggaagaggcctgatgtggactgtccgaactgaaggagggcactttcctctccatagccccaccttctcctggaggaatgtagctttcctgctgcttctctcccttgctttggagtggacttctgcaatgctgaccaagaagatcaaacacaaaccagggttatgtcccaaagagaggctcacctgtaccactgaacttccggactcatgtaacacagattttgactgcaaggaataccagaagtgctgcttttttgcctgtcagaagaagtgcatggatccctttcaagaaccctgcatgctacctgtgaggcatggaaactgtaatcatgaggcacagcgctggcattttgactttaaaaattaccgctgcacacccttcaaatacaggggctgcgaagggaatgccaacaacttcttaaatgaggatgcctgcagaacggcctgcatgttaattgttaaggatggacaatgcccactcttccctttcactgaacgtaaggagtgtccaccttcatgtcacagtgacatcgattgtccccagacagacaaatgttgtgaatccaggtgtggctttgtttgtgccagggcctggacagtcaaaaaaggtttctgcccacgcaagcccttgctatgtaccaagattgataaacccaagtgcctgcaggatgaggagtgcccattggtggaaaagtgctgctcacattgtggactgaaatgtatggaccccagacgttgaatagtaagtagaaaatattatcatcaaaatcattaattatgagtagcatgataaagagctgtcagttttgtcttgtatccaacttgccaaattatcttaagtatcacaatattgaatgatgttactttgattttatatataatcccatcatctgaaagtgatgatatatttggctttttttcaacttcatgactttattttcttgtcttcttgtattgtgtagaacctccaaaataataatgaaaataaaggcaatggcatcca

SEQ ID NO: 317 - DNA, 1464 bp, Homo sapiens
  source 1..1464: mol_type = genomic DNA
gcgaggagatgctagagggcgcagcgccgccagcaccatgcgccccccgcccgcgctggccctggccgggctctgcctgctggcgctgcccgccgccgccgcctcctacttcggcctgaccgggcgggaagtcctgacgcccttcccaggattgggcactgcggcagccccggcacagggcggggcccacctgaagcagtgtgacctgctgaagctgtcccggcggcagaagcagctctgccggagggagcccggcctggctgagaccctgagggatgctgcgcacctcggcctgcttgagtgccagtttcagttccggcatgagcgctggaactgtagcctggagggcaggatgggcctgctcaagagaggcttcaaagagacagctttcctgtacgcggtgtcctctgccgccctcacccacaccctggcccgggcctgcagcgctgggcgcatggagcgctgcacctgtgatgactctccggggctggagagccggcaggcctggcagtggggcgtgtgcggtgacaacctcaagtacagcaccaagtttctgagcaacttcctggggtccaagagaggaaacaaggacctgcgggcacgggcagacgcccacaatacccacgtgggcatcaaggctgtgaagagtggcctcaggaccacgtgtaagtgccatggcgtatcaggctcctgtgccgtgcgcacctgctggaagcagctctccccgttccgtgagacgggccaggtgctgaaactgcgctatgactcggctgtcaaggtgtccagtgccaccaatgaggccttgggccgcctagagctgtgggcccctgccaggcagggcagcctcaccaaaggcctggccccaaggtctggggacctggtgtacatggaggactcacccagcttctgccggcccagcaagtactcacctggcacagcaggtagggtgtgctcccgggaggccagctgcagcagcctgtgctgcgggcggggctatgacacccagagccgcctggtggccttctcctgccactgccaggtgcagtggtgctgctacgtggagtgccagcaatgtgtgcaggaggagcttgtgtacacctgcaagcactaggcctactgcccagcaagccagtctggcactgccaggacctcctgtggcacccttcaagctgcccagccggccctctgggcagactgtcatcacatgcatgcataaaccggcatgtgtgccaatgcacacgagtgtgccactcaccaccattccttggccagccttttgcctccctcgatactcaacaaagagaagcaaagcctcctcccttaacccaagcatccccaaccttgttgaggacttggagaggagggcagagtgagaaagacatggagggaaataagggagaccaagagcacagcaggactgaaattttggacgggagagaggggctattccatcttgcttcctgg

SEQ ID NO: 318 - DNA, 1427 bp, Homo sapiens
  source 1..1427: mol_type = genomic DNA
atggtccgctgcctggggcctgcgctgctgctgctgctgttactggggtcggcgagctcggtcggagggaaccgatgtgtggacgcggccgaagcctgcacggcggacgcgcggtgccagcgtttgcgctccgagtatgtggcgcagtgcctgggccgggctgcgcaggggggctgtccccgcgcccgctgccgccgggccctgcgccgcttcttcgcccgcgggccgcccgcgctcacccacgcactgctcttctgcccgtgcgcgggccccgcgtgcgccgagcgtcggcgccagaccttcgtgccctcctgcgccttttcggggcccggccccgcgccgccctcctgccttgagcccttaaacttctgcgagcgcagccgggtctgcaggcctcgcctcctggcctttcaggtctcgtgcaccccagcgcccagcgcccccgacggctgcctgctggaccagggcgcccgctgcctgcgcgcctacgcgggcctcgtgggcaccgccgtcacccctaactacgtggacaacgtgagcgcgcgcgtggcgccctggtgcgactgcggagccagcgggaaccggcgtgaggactgcgaagccttccgggggctctttaccaggaaccgctgcttggatggtgccattcaggcctttgccagcgggtggcccccagtcctgctggaccagctgaacccccagggagacccggagcacagcctcctgcaggtgtcctccacaggcagggccctggagagacgctccctgctctccatacttcctgtcctggctctcccggccctgctctgattaggacagcgacctcggatagcacagccagctactccaccctgcctgcctgggccgcctctgtggcctactggccccttgagaaggggctggcttaccccccaagccggccctggtgctttcactccgctgccctttgtaggtttggacaccctgtgtgccgtcccctggggcaagggatgtaggctggggcctgactgtaaagcccccgtctccctgtcaggaggcatcttggttgtaagtccctttattcacagaccttgagaccactggggtctcccacaaggtggggtcaggagagggtcacttttgtagctgagacctctctggagacccagatcccctagagcaggtcagagaccatccagaatcccagaattctaggaaattgtatcagcctcccaagcatataaccccctaaggaatccatcggacaagaccccgtctaacactgcatcctcccaactgggcattacccaccattgtagccacctgtgcgccatgaccatgctggcagagtctttcctgttccccatatgctgcttgaggggccccaccctgtgccctgcctggcattggccctgtggccatcttccccctggtttcctgcagctgta

SEQ ID NO: 319 - DNA, 2084 bp, Homo sapiens
  source 1..2084: mol_type = genomic DNA
gctgcctctgcctgcctattcagcatttgcctgttaacaggaagctctttctggctcccaactgaagctctctgaggccagcagccgccgtcaatgttcacagagtgcaggcaggcagccaaatgagtgggaattgggtgcacccaggccagatcctaatttgggctatctgggtccttgcagcccccaccaaagggccttctgctgaagggccacagaggaacaccaggctgggatggattcagggcaagcaagtcactgtgctgggaagccctgtgcctgtgaacgtgttcctcggagtcccctttgctgctcccccgctgggatccctgcgatttacgaacccgcagcctgcatcgccctgggataacttgcgagaagccacctcctaccctaatttgtgcctccagaactcagagtggctgctcttagatcaacatatgctcaaggtgcattacccgaaattcggagtgtcagaagactgcctctacctgaacatctatgcgcctgcccacgccgatacaggctccaagctccccgtcttggtgtggttcccaggaggtgccttcaagactggctcagcctccatctttgatgggtccgccctggctgcctatgaggacgtgctggttgtggtcgtccagtaccggctaggaatatttggtttcttcaccacatgggatcagcatgctccggggaactgggccttcaaggaccaggtggctgctctgtcctgggtccagaagaacatcgagttcttcggtggggaccccagctctgtgaccatctttggcgagtccgcgggagccataagtgtttctagtcttatactgtctcccatggccaaaggcttattccacaaagccatcatggagagtggggtggccatcatcccttacctggaggcccatgattatgagaagagtgaggacctgcaggtggttgcacatttctgtggtaacaatgcgtcagactctgaggccctgctgaggtgcctgaggacaaaaccctccaaggagctgctgaccctcagccagaaaacaaagtctttcactcgagtggttgatggtgctttctttcctaatgagcctctagatctattgtctcagaaagcatttaaagcaattccttccatcatcggagtcaataaccacgagtgtggcttcctgctgcctatgaaggaggctcctgagatcctcagtggctccaacaagtcccttgccctccatctgatacaaaacatcctgcacatcccgcctcagtatttgcaccttgtggctaatgaatacttccatgacaagcactccctgactgaaatccgagacagtcttctggacttgcttggagatgtgttctttgtggtccctgcactgatcacagctcgatatcacagagatgctggtgcacctgtctacttctatgagtttcggcaccggcctcagtgctttgaagacacgaagccagcttttgtcaaagccgaccacgctgatgaagtccgctttgtgttcggtggtgccttcctgaagggggacattgttatgttcgaaggagccacggaggaggagaagttactgagccggaagatgatgaaatactgggctacctttgctcgaaccgggaatcctaatgggaacgacctgtctctgtggccagcttataatctgactgagcagtacctccagctggacttgaacatgagcctcggacagagactcaaagaaccgcgggtggatttttggaccagcaccatccccctgatcctgtctgcctccgacatgctccacagtcctctttcttccttaactttcctctctctcctccagcctttctttttcttttgtgctccttgagaagttatctttctgtgattttggtttcccttctcctcccataatttctcccgcaatcattagcttctttctgagctcagctgctttctatggggatccttgcaaaacaagctgctttcgctgatattttatggacttaggaatgatccttacagaattcttttcaacatcaaaaagtgcaatttgtcttggaaggcaacaagatttcttcaataaatttggaagagggctggc

SEQ ID NO: 320 - DNA, 1173 bp, Homo sapiens
  source 1..1173: mol_type = genomic DNA
cctctcttccagggctgccgtccacactctcccggtcagagtcctgggaccacatggggacgctgccatggcttcttgccttcttcattctgggtctccaggcttgggatactcccaccatcgtctcccgcaaggagtggggggcaagaccgctcgcctgcagggccctgctgaccctgcctgtggcctacatcatcacagaccagctcccagggatgcagtgccagcagcagagcgtttgcagccagatgctgcgggggttgcagtcccattccgtctacaccataggctggtgcgacgtggcgtacaacttcctggttggggatgatggcagggtgtatgaaggtgttggctggaacatccaaggcttgcacacccagggctacaacaacatttccctgggcatcgccttctttggcaataagataggcagcagtcccagccctgctgccttatcagctgcagagggtctgatctcctatgccatccagaagggtcacctgtcgcccaggtatattcagccacttcttctgaaagaagagacctgcctggaccctcaacatccagtgatgcccaggaaggtttgccccaacatcatcaaacgatctgcttgggaagccagagagacacactgccctaaaatgaacctcccagccaaatatgtcatcatcatccacaccgctggcacaagctgcactgtatccacagactgccagactgtcgtccgaaacatacagtcctttcacatggacacacggaacttttgtgacattggatatcacttcctggtgggccaggatggtggcgtgtatgaaggggttggatggcacatccaaggctctcacacttatggattcaacgatattgccctaggaattgccttcatcggctactttgtagaaaagcctccaaatgctgcagcgctggaggcggcccaggacctgatccagtgtgccgtggttgaggggtacctgactccaaactacctgctgatgggccacagtgacgtggtcaacatcctgtcccctgggcaggctttgtataacatcatcagcacctggcctcatttcaagcactgaaggaggccccactccctttgagactgccctccctcccctgctgggtctctccaaccctcaccagccaaggtggctcagcaccttgtgtccccct

SEQ ID NO: 321 - DNA, 1079 bp, Homo sapiens
  source 1..1079: mol_type = genomic DNA
ggttgctaaggagtgggtgcctcagaatcaggctgcaatgggcattgtctgtgcacaatgttcctttattctgctgctgtccataataagggctcgtccacctcccttcctcttctgcccattgagcagtcaaagaactgaaagtccttataagcctgtgcacctgggcctgggccctacagataaggtagctgctattgctatggcccgcatcattgacctggtgccctgggacgatggctccacacatgtgtatgcctccccggccatcctgcttcccatggagcggcagcgcaaccagctggcgggcgtgaagcagcagctctaccacccagccctgcccaccctgcgccacatggacagggacaccgtcaaggcctgccttcctgatgagcactgccagtccaccacctactgccgcaaagatgaatttgacaacgcccattttacactccttggggtccccaacaaacccctgcagtgtttggacatcaccgccacaggccagaagcttcgcaacaggtaccacgagggaaagctggcgcccatcgcgccaggcatcaaccgagtggactggccctgcttcacgcgcgccatcgaggactggtcccacttcgtgtcctcggccggggagttcaagctgccttgcctgaggaagcgagcggagggtctcagcggctacgcggtgcggtacttgaagcccgacgtgacccagacctggcggcaggaagccctgtgtggggcgtgggcagggcgtccgtgctcccccgactcaccgcgcccctatccctgctgcccgcctcagtactgcctcagccagaaccccagcctggaccgctacggacagaagcccctgcctttcgactccctgaacactttccgaagcttcggctccagctacagtcgtgtcaactacctgaccccctggcattaatctctggaaaggaggctgactcccaggctgccggacggtgccacctcaggtcccctggccagacagaggacttatggtggcaccagccatctccccaggagttcagcctaactagaaataaacctaatgctcccttagagacaca

SEQ ID NO: 322 - DNA, 5985 bp, Homo sapiens
  source 1..5985: mol_type = genomic DNA
gccccagcttggccgggcgcggagcggggcgcatggcgccgggcgcactgcgcgggggctgcgaacaaagggcccccggcggcggcgcgaggacggccgcgctcggaccctggccctggcccagccctggcccggccccctccccaggcgcggcgccccccaggagccgaaaaatgagcggcgccctgctctggccgttgctcccgctcctgctcctgctgctgtcggcgcgggacggcgtgcgcgccgcgcagcctcaggccccgggttacttgattgcagctccctctgtttttcgcgcgggcgtggaggaagtcatcagcgtgaccatctttaactctccaagggaagtcacggtccaggctcagctggtggcccagggtgagccggtggtgcagagccagggagccatcctggataaagggacaatcaaactcaaggtgcccacgggcctccggggccaagcgcttctgaaagtgtggggccgcggctggcaggcggaggaggggcccctctttcacaaccagacctcggtgaccgtggacggccggggcgcttctgtattcatccagacggacaagcctgtgtacagaccccagcaccgagtgctcataagcatcttcaccgtctctccaaatctgaggcctgtcaacgagaagctggaagcctacatcctggacccccgaggctctcggatgatagagtggagacacttaaagccgttctgctgcggcatcaccaacatgagcttccccttgtccgaccagcctgtgttgggagaatggttcatttttgttgaaatgcaaggccacgcgtacaacaagtcttttgaagttcagaagtatgtgttgcccaagtttgagcttctgattgacccgccccggtatatccaagacctggacgcctgtgagacaggcactgtgcgggccaggtatacctttgggaaacctgtggctggtgccttaatgatcaacatgactgttaatggtgtagggtactacagccacgaggtgggacgccctgtcctcagaacaaccaagatcctcggctcccgggacttcgacatctgcgtgagggacatgatcccagcggacgtccctgagcacttccggggcagggtcagcatctgggccatggtgaccagtgtggacgggagccagcaggtcgcgttcgatgactccacccccgtgcagaggcagctggtggacatccggtactccaaggacacgaggaagcagttcaagccgggcctggcctacgtggggaaggtggagctatcctaccccgatggcagcccagctgagggggtgacggtccagattaaggcagagctgacaccaaaggataacatctacaccagtgaagttgtgtcccagcgtggactagtggggtttgaaatcccctccatccccacgtcagcccagcacgtgtggctggagaccaaggtgatggcactgaacgggaagcctgtgggggctcagtacctgcccagctacctctccctcggcagctggtactcccccagccagtgctacctgcagctgcagccaccctcccacccactgcaggttggggaagaagcctatttttctgtgaagtccacatgtccctgcaactttaccctgtactacgaggtggctgcacggggcaatattgtgctatcgggccagcagcctgcccacaccacccagcagcgaagcaagcgggcggcccctgccctggagaaaccgattcgtttaacacacctttctgagacagagcccccaccagccccagaagctgaggtcgacgtgtgtgtgacctctcttcatctggccgtgacccccagcatggtcccccttggtcgcctgctggtcttctacgtcagggagaatggagaaggggtcgccgacagccttcagtttgcagtcgagaccttcttcgaaaaccaggtttcagtgacgtattcagcaaatgagacccaacctggggaggttgtcgacctgcggatcagggctgcaaggggcagctgtgtgtgcgtcgccgcagttgataagagtgtctacctgctcaggtctgggttccggctgactcctgcccaggttttccaggaactggaagattatgatgtttctgattcctttggcgtgtccagggaggatggtcctttttggtgggctgggctgacggcacaacgacgccggcgctcctctgtcttcccgtggccttggggcatcaccaaggactctgggtttgccttcaccgaaacgggactggtggtgatgaccgaccgagtgagcctgaaccaccggcaggacggtggcctctacaccgatgaggctgtccccgctttccagccccacacagggagcctggtggcagtggctccttccaggcacccccccagaacagagaagagaaaaaggactttcttccccgaaacatggatttggcattgtctcaacatcagtgacccatctggtgaggggacactcagtgtgaaggtcccggactccatcaccagctgggtgggtgaggccgtggccctgtccacctctcagggcttaggcatcgccgagccctccctgctgaagaccttcaagcccttcttcgtggacttcatgctccccgctctcatcatccgtggggagcaggtcaagatcccgctcagtgtctacaactacatgggcacctgcgctgaggtgtacatgaagctctcggttcccaagggcatccagtttgttgggcatcctggcaaacgccatgtgaccaagaagatgtgtgtggcccccggggaggctgagcccatctgggtcgttctgtccttcagcgacctgggactcaacaacatcacggccaaagcccttgcttacggagacacaaattgctgccgggatgggaggtccagcaaacaccctgaggagaatcacgccgacaggagggtccccatcggggtggatcacgtcaggcgcagtgtgatggttgaggcggaaggagtcccccgggcgtacacctacagcgcattcttctgtcccagtgagagagtccacatctccacccccaacaagtatgagttccagtatgtgcagcggccactgcgcctcacccgctttgatgtggctgtgcgagctcacaatgatgcccgtgtggccttgtcttctgggccccaggacacagcaggcatgatcgagatcgtcctgggggggcatcagaacaccaggtcatggatctccaccagcaagatgggagagcccgtggccagtgcacacacggccaagatcctctcctgggatgaattcagaacattctggatcagctggcgtggtggccttatccaggttggccatggtccagagccatccaatgagtctgtcattgtggcctggaccctcccgaggccaccagaggtccagttcattggcttttccaccggctggggctccatgggtgaattccgaatctggaggaagatggaggtggacgagagctacagcgaggccttcaccctgggggtcccacacggcgccatccctgggtctgagcgagccaccgcctccatcatcggggacgtcatggggccaaccctgaaccacctcaacaacctcctgcggctgccgtttggctgtggagagcagaacatgatccactttgcacccaacgtctttgtcttgaagtatcttcagaaaacccagcagctcagccctgaggtggagagagagaccaccgactacctagtacaaggctaccagcgccagctgacctacaagcgccaggatggctcctacagcgcgtttggggagcgggacgcatcggggagcatgtggctcacagcctttgtcctgaagtccttcgcacaggctcgcagctttatcttcgtggacccccgggagctggctgccgccaagagctggatcatccagcagcagcaggccgatggctccttcctggccgtgggcagggtcctgaacaaggacatccagggtgggatccacggcactgtcccgctgacagcctacgtggtggttgctctcctggaaacaggcacagcctcagaggaggagagaggctccactgacaaagcgaggcacttcctggagtctgctgcgcccctggccatggacccttatagctgtgccctgactacctacgcgctgaccctgctccgcagcccggcagcccctgaggcactgcgcaagctccgtagcctggccatcatgcgagatggggtcacccactggagcctgtcaaattcctgggacgtggacaagggcacattcttgagcttcagtgacagggtctctcagtcagtggtctcggccgaggtggaaatgacagcctacgcccttctgacctacactctgctgggtgacgtggctgccgccctgcctgtggtgaagtggctgtcccagcagcgaaatgcacttgggggcttctcctccactcaggacacctgcgtggctctgcaggccttggctgaatatgccatcttgtcctatgctggaggcatcaacctcactgtctccctggcctccaccaacctggactaccaggaaaccttcgagctgcacaggaccaaccagaaggttctgcagacagcagcgatccccagcctccccacggggctgtttgtgagtgccaagggggacggctgctgcctgatgcagattgatgtcacctacaatgtgcctgacccggtggccaagccagctttccagctgctcgtaagcctccaggagcctgaggcccagggacgcccgccccccatgcctgcctccgcagctgagggttcccgaggagactggcccccagctgacgatgatgacccagcggccgatcagcatcaccaggaatacaaggtgatgctggaggtgtgcaccaggtggctgcatgcagggtcttccaatatggctgtcctggaggtgcccctgctgtcaggcttccgggcagacatcgagagcctggagcagctgctccttgacaagcacatggggatgaagaggtatgaagtggctggacgccgagtgctcttctactttgatgagatccccagccggtgcctgacgtgcgtgcggttccgtgctctccgggagtgcgtggtgggcaggacgtcggcgctgccagtctccgtgtacgactactacgaacccgccttcgaggccactcgcttctacaacgtcagcacccacagcccactcgcccgggaactgtgcgccggacccgcgtgcaacgaagtggagcgcgcccctgcccggggcccgggctggttccccggcgagtcgggccctgccgtggcccctgaggagggggcggcgatcgcgcgatgcggctgcgaccacgactgcggcgcccaggggaacccggtgtgcggctccgacggggtggtctacgccagcgcctgccgcctgcgggaggccgcctgccgccaggccgcgcccctggagcccgcgcctcccagctgctgcgccctcgagcagcggctgccggcctcgtcgtcctccacctacggggatgacctggcttctgtggccccggggcctttacagcaggacgtgaagctgaatggagccggccttgaggtggaggactcagaccctgagcctgaaggggaggcggaggacagggtcacagccgggcctcggcctcctgtgagcagcgggaacctggaaagcagcacccagagcgccagcccgttccacagatggggccagactccggcccctcagagacatagtggccgggtggtgggggcccacaggccagggcttctgagccctgtcttcgtctacagcccagcctttcagagtggtggggaggagggtttatggatgtcaaacacctgcaccttgagataatcctacaaccacatgcagttgtgggaccgcagtttggtcctggggaccattcatacccacacacccagcttgtgcctgtggttaacatctcagaaaactctggtaaatgatcactccaggatattgacaagaatacacgttactgatcttactc

SEQ ID NO: 323 - DNA, 3434 bp, Homo sapiens
  source 1..3434: mol_type = genomic DNA
cggggagcgcagtccgggtgcgtaggggccgctcggcgggggccgcgcgggcaagatggtgtgcgctcgggcggccctcggtcccggcgcgctctgggccgcggcctggggcgtcctgctgctcacagcccctgcgggggcgcagcgtggccggaagaaggtcgtgcacgtgctggagggtgagtcgggctcggtagtggtacagacagcgcctgggcaggtggtaagccaccgtggtggcaccatcgtcttgccctgccgctaccactatgaggcagccgcccacggtcacgacggcgtccggctcaagtggacaaaggtggtggacccgctggccttcaccgacgtcttcgtggcactaggcccccagcaccgggcattcggcagctaccgtgggcgggctgagctgcagggcgacgggcctggggatgcctccctggtcctccgcaacgtcacgctgcaagactacgggcgctatgagtgcgaagtcaccaatgagctggaagatgacgctggcatggtcaagctggacctggaaggcgtggtctttccctaccacccccgtggaggccgatacaagctgaccttcgcggaggcgcagcgcgcgtgcgccgagcaggacggcatcctggcatctgcagaacagctgcacgcggcctggcgcgacggcctggactggtgcaacgcgggctggttgcgcgacggctcagtgcaataccccgtgaaccggccccgggagccctgcggcggcctgggggggaccgggagtgcagggggcggcggtgatgccaacgggggcctgcgcaactacgggtatcgccataacgccgaggaacgctacgacgccttctgcttcacgtccaacctgccggggcgcgtgttcttcctgaagccgctgcgacctgtacccttctccggagctgcgcgcgcgtgtgctgcgcgtggcgcggccgtggccaaggtggggcagctgttcgccgcgtggaagctgcagctgctagaccgctgcaccgcgggttggctggccgatggcagtgcgcgctaccccatcgtgaacccgcgagcgcgctgcggaggccgcaggcctggtgtgcgcagcctcggcttcccggacgccacccgacggctcttcggcgtctactgctaccgcgctccaggagcaccggacccggcacctggcggctggggctggggctgggcgggcggcggcggctgggcagggggcgcgcgcgatcctgctgcctggacccctctgcacgtctaggctgggagtaggcggacagccagggcgcttgaccactggtctagagccctgtggtcccctggagcctggccacgcccttgaagccctggacactggccacattccctgtggtcccttacaaactaactgtgcccctggggtccctgaagactggctagtcctggcagaacagtactttggagttccctggagcctggccagccctcacctcttctggatagaggattcccccaactccccaactttctccatgagggtcacgccccctgaggacctcaggaggccagcagaacccgcaggctcctgaagactggccacgcctcctgagaccacttggaaacagaccaactgcccccgtggtcgcctggtggctggacccccgggattgactagagaccggccgtacaccttctgcatctcactggagactgaacactagtcccttgcggtcacgtgggacactgggcgcctcctcctccccctcctcctcacctggagagactacaggaacttcagggtcactccccgtggtcacatggaggttgtgggccgaggcgcttattttcccttatggtgacctgagtcctggagactcccattctccccctctccctgagagtcccctgcagtttctgggtaacagggcacacccctctagtttcatgggcgagcacccccatctgccacctcagactgacacacagccagctggctcacttactgggggccacgtcccacccctcagatatttctttgaagggagagcaaacccaccctgtcctctgacgtccctttcccaactgtcaccaaacagaccatcttcccaggcctggggaccggtaagatccatgtcactagttatgcagagcagttgccttgggtcccactgtcaccaaggcaaccagtcctgctgctacctgtcacctagagtcacacaccccttccctcatcaggcacacccatgaagacagtgcctccctcctccagctgtaaccatggataccacacatttctcatctcattggcccccaccccagagacctccacctcaacttctggctgtccctaccctgactcaccgccatggagatcaccctccccgaagctgtcgccagggtgacccaacatccagttctccggctctcaccatggaaacaaactgtccctgtccccaggcccactccagttccagaccaccctccatgctccacccccaggcggtttggaccccaccactgttgccatggtgaccaaactctggagtccgaggtaacagaacacctgtccccctaggcttttccttgtggacaacggggccctgttcaccaagctgttgccatagagactgtcaacgttgtcctcatgacaaccagacttccagttctcaggaacttctcattgtgggccagaagtcctgggtgcctcctactagggctaccctactgcaccccatcaggggcctgatggctgccccttccccagacagggctggacttctggagctgctaagccaccctccgtttgcacgttaactctatgccggatagcagctgtgcacgagacaatcttgcaacacccgggcatgtttgtcgtcgtcctacaaatgaggaaaccgagcctatggcgtgccctggtctgttgagatatgcaagcactgagctcctcttttgtcctctgagaccccatctccattctcacccagttcctctctccttccctgacccccacccacatttccctccttagagatccaggagggatggaatgttctttaaaattcaacacccaccaggctctaagcggcgatctgtgctaagaggtcaggacccagccgaagtcctcggcgttgacaggcagctggggggacatgatccatggacaaggccatcccggccgtgggagaccccagtcccgaagtcttgcctgcaggagtactggggtccccctggggccctctttactgtcacgtcatctctaggaaacctatctctgagttttgggaccaggtcggtttgggtttgaattctgcctcttcttgctcactgtgtgaccaagtgacaaactccttctgaacctgtgttctcccactgtaccagggctgttctgtggtccccgtgagtgccaagcatacagtaggggctcaataaatccttgtttcttttgatgaatg

SEQ ID NO: 324 - DNA, 2532 bp, Homo sapiens
  source 1..2532: mol_type = genomic DNA
ggcagatgccgcctggtccagctatcgtgctcggtattcagttttccggagcagcgctctttctctggcccgcggagcggtcccgcggccgagtaccggattcccgagtttgggaggctctgctttcctccttaggacccactttgccgtcctggggtggctgcagttatgtccgcgctgcgacctctcctgcttctgctgctgcctctgtgtcccggtcctggtcccggacccgggagcgaggcaaaggtcacccggagttgtgcagagacccggcaggtgctgggggcccggggatatagcttaaacctaatccctcccgccctgatctcaggtgagcacctccgggtctgtccccaggagtacacctgctgttccagtgagacagagcagaggctgatcagggagactgaggccaccttccgaggcctggtggaggacagcggctcctttctggttcacacactggctgccaggcacagaaaatttgatgagttttttctggagatgctctcagtagcccagcactctctgacccagctcttctcccactcctacggccgcctgtatgcccagcacgccctcatattcaatggcctgttctctcggctgcgagacttctatggggaatctggtgaggggttggatgacaccctggcggatttctgggcacagctcctggagagagtgttcccgctgctgcacccacagtacagcttcccccctgactacctgctctgcctctcacgcttggcctcatctaccgatggctctctgcagccctttggggactcaccccgccgcctccgcctgcagataacccggaccctggtggctgcccgagcctttgtgcagggcctggagactggaagaaatgtggtcagcgaagcgcttaaggtgccggtgtctgaaggctgcagccaggctctgatgcgtctcatcggctgtcccctgtgccggggggtcccctcacttatgccctgccagggcttctgcctcaacgtggttcgtggctgtctcagcagcaggggactggagcctgactggggcaactatctggatggtctcctgatcctggctgataagctccagggccccttttcctttgagctgacggccgagtccattggggtgaagatctcggagggtttgatgtacctgcaggaaaacagtgcgaaggtgtccgcccaggtgtttcaggagtgcggcccccccgacccggtgcctgcccgcaaccgtcgagccccgccgccccgggaagaggcgggccggctgtggtcgatggtgaccgaggaggagcggcccacgacggccgcaggcaccaacctgcaccggctggtgtgggagctccgcgagcgtctggcccggatgcggggcttctgggcccggctgtccctgacggtgtgcggagactctcgcatggcagcggacgcctcgctggaggcggcgccctgctggaccggagccgggcggggccggtacttgccgccagtggtcgggggctccccggccgagcaggtcaacaaccccgagctcaaggtggacgcctcgggccccgatgtcccgacacggcggcgtcggctacagctccgggcggccacggccagaatgaaaacggccgcactgggacacgacctggacgggcaggacgcggatgaggatgccagcggctctggagggggacagcagtatgcagatgactggatggctggggctgtggctcccccagcccggcctcctcggcctccataccctcctagaagggatggttctgggggcaaaggaggaggtggcagtgcccgctacaaccagggccggagcaggagtgggggggcatctattggttttcacacccaaaccatcctcattctctccctctcagccctggccctgcttggacctcgataacgggggaggggtgccctagcatcagaagggttcatggccctttcccctcctcccccctcagctgggcctggggaggagtcgaagggggctgcagagagggtagagaagggactttgcaggtgaatggctggggccccaaatccaggagattttcatcagaggtgggtgggtgttcacaatatttattttttcatttggtaatgggaggggggcctgggggtatttatttaggagggagtgtggtttccttagaaggtatagtctctagccctctaaggctggggctggtgatcagccccaacagagaaaatgaggagtttagagttgcagctggggaaggggtttgaaggaagttggaagtggggaggggtgggggcatctggtctcagaaatggaccagctggatgcagggcaggggactgagggtgcttgagtaggatgtgagacttcatgggcctgggttctgttgagttttttcagtatcaatttcttaaaccaaattttaaaaaaaacaaggtgggggggtgctcatctcgtgacctctgccacccacatccttcacaaactccatgtttcagtgtttgagtccatgtttattctgcaaataaatggtaatgtattgga

SEQ ID NO: 325 - DNA, 2671 bp, Homo sapiens
  source 1..2671: mol_type = genomic DNA
gagttatcagaggtgagcccgtgctcttcagcggagaagatcccctacctggccgccggccactttctgtgggccgtggggtcctcaaggagacggcccttgggctcaggggctgcgtttccacacgcgcctttcccagggctcccgcgcccgttcctgcctggccgccggccgctccaacagcagcacaaggcgggactcagaaccggcgttcagggccgccagcggccgcgaggccctgagatgaggctccaaagaccccgacaggccccggcgggtgggaggcgcgcgccccggggcgggcggggctccccctaccggccagacccggggagaggcgcgcggaggctgcgaaggttccagaagggcggggagggggcgccgcgcgctgaccctccctgggcaccgctggggacgatggcgctgctcgccttgctgctggtcgtggccctaccgcgggtgtggacagacgccaacctgactgcgagacaacgagatccagaggactcccagcgaacggacgagggtgacaatagagtgtggtgtcatgtttgtgagagagaaaacactttcgagtgccagaacccaaggaggtgcaaatggacagagccatactgcgttatagcggccgtgaaaatatttccacgttttttcatggttgcgaagcagtgctccgctggttgtgcagcgatggagagacccaagccagaggagaagcggtttctcctggaagagcccatgcccttcttttacctcaagtgttgtaaaattcgctactgcaatttagaggggccacctatcaactcatcagtgttcaaagaatatgctgggagcatgggtgagagctgtggtgggctgtggctggccatcctcctgctgctggcctccattgcagccggcctcagcctgtcttgagccacgggactgccacagactgagccttccggagcatggactcgctccagaccgttgtcacctgttgcattaaacttgttttctgttgattacctcttggtttgacttcccagggtcttgggatgggagagtggggatcaggtgcagttggctcttaaccctcaagggttctttaactcacattcagaggaagtccagatctcctgagtagtgattttggtgacaagtttttctctttgaaatcaaaccttgtaactcatttattgctgatggccactcttttccttgactcccctctgcctctgagggcttcagtattgatggggagggaggcctaagtaccactcatggagagtatgtgctgagatgcttccgacctttcaggtgacgcaggaacactgggggagtctgaatgattggggtgaagacatccctggagtgaaggactcctcagcatggggggcagtggggcacacgttagggctgcccccattccagtggtggaggcgctgtggatggctgcttttcctcaacctttcctaccagattccaggaggcagaagataactaattgtgttgaagaaacttagacttcacccaccagctggcacaggtgcacagattcataaattcccacacgtgtgtgttcaacatctgaaacttaggccaagtagagagcatcagggtaaatggcgttcatttctctgttaagatgcagccatccatggggagctgagaaatcagactcaaagttccaccaaaaacaaatacaaggggacttcaaaagttcacgaaaaaattgaattaaaagataaaaattaaaaaatgttttatttctcagcatgagctccatcaaggtcgagacgcttctgcaagtaatggtaccagccattcagttcatccctaaagaattgggcaccctgggaatttaaccatgccacttcagtctttgtgacgttattaactgaagaaaagtgggtgccctttaaagattttttaaaattataaaacagaagtaaccaaatcaggcctggaaggtgtatgcctagtgatttcccattgaaactctcacaaaactggccttgtttgatgagaggaatgagcaggagcattgtcatggtggagaagggctctctggtgaagctttccggggtgacgatttcctgggtgttttcctgctaaatcgttggctgactttctctatacactctcataataagatgttactgttctttggccctccagaaagtcaataagcaagatgccttgagcattcacaaaacggttgccacgacctttgcccttgacatgtctgcttttactctgatgggaccacgcccacctctaggtagtcattgctttgcttgtgctttgccttcaggagtgtactggttaagccacatttcatctccggctataattatatgaagaaatgcttcaggatcttgattccacttgtttaaaatggccatagaacgcttttctcttatctgcagctgagctgggagaaagttttggcacccaccgagtggacagtttactcaactttaatttcagtcagaattgtgtaagctgaacaccttgggatacctacagcgttggctattgtttctgctgctattaatcagtcctcttaaattagggcacaaacaagatgaattgtttcctcacagactgatgtggctggcctgctgctgtggacttcctctccaacatcatctcttctcttcttccaatgagttatccacttacttaa

SEQ ID NO: 326 - DNA, 1711 bp, Homo sapiens
  source 1..1711: mol_type = genomic DNA
agaacgaggctcacttccgtccgtggggggagctgcggcggtggcggtgcaggaggccgggcaggggtgcggagggaccgacggacgcacgggcgggcggccgggagccatggagcgcggccctggggcccgggggcgcgggccggggtgggcttcccacggcacgacatggagacctgtggttgcgaggctccctggggctcggcttggaccgcgatggggctgggccctggcctcctaacggggctgctgtctggggcggtagctgggggggcgctctcccccctgcccgcgactcggagcacccccacccctcccctgccgggccaggccgggcggcgttgttggcgggggccccggtggaggcccggcctgggcggcgcccgccatgaatgggctgtcgctgagtgagctctgctgcctcttctgctgcccgccctgccccggccgcatcgctgccaagctcgccttcctgccgccggaggccacctactccctggtgcctgagcccgagccggggcctggtggggccggggccgcccccttggggaccctgagagcctcctcgggcgcacccgggcgctggaagctgcacctgacggagcgtgccgacttccagtacagccagcgcgagctggacaccatcgaggtcttccccaccaagagcgcccgcggcaaccgcgtctcctgcatgtatgttcgctgcgtgcctggtgccaggtacacggtcctcttctcgcacggcaatgccgtggacctgggccagatgagcagcttctacattggcctgggctcccgcctccactgcaacatcttctcctacgactactccggctacggtgccagctcgggcaggccttccgagaggaacctctatgccgacatcgacgccgcctggcaggccctgcgcaccaggtacggcatcagcccggacagcatcatcctgtacgggcagagcatcggcacggtgcccaccgtggacctggcctcgcgctacgagtgtgccgcggtggtgctgcactcgccgctcacctcgggcatgcgcgtcgccttccccgacaccaagaagacctactgcttcgacgccttccctaacatcgagaaggtgtccaagatcacgtctcccgtgctcatcatccacggcacggaggacgaggtgatcgacttctcgcacgggctggcgctctacgagcgctgccccaaggcggtggagccgctgtgggtggagggcgccgggcacaacgacatcgagctctacagccagtacctggagcgcctgcgtcgcttcatctcccaggagctgcccagccagcgcgcctagcggcggccccaaccggccggacctcagcaataaggcggcccccggacctcaccccgcgccggcccccacccaggggctgcatgtggaccccccgggcggcccaggggaccccgccccgacccaggggctgtggacgatgtacaggcaacagagctacgcactcctttccttttggaagcaagaagaaaatacgtgaaaacggaaattaaagatttaaaattttagggctgctctccttcctttcatggctctgctcactctctcgagcgctcagcgagctcgaaagggggccggggttcccaggtttcgtccctgagtccctaggagagatcggcacggacccccttataggttttactctgcggaagtggggtgggtctctgtctagtc

SEQ ID NO: 327 - DNA, 2386 bp, Homo sapiens
  source 1..2386: mol_type = genomic DNA
gcttctctcctctccctcaacacagccggtcttaccagtacagcaggcggcagctgagagtcccctctggtggccagcagcggctacagagccgtcactatggggagggacaggacttgaggggttgcctcggtccacctcactggagaatgggcagagtttatggagtctgaaccacctggtctccaggcccctctggggatgggcctggcttactgaccactgacctcagcctaggagggacagaagagactgggggagaccaggatgcccagatgaccttgacccagggtacgctgccccatgtccctgctgcctcccgcccacagctctacgagaggcaggtctgtcattcgccgctggactttgacagtggtcaaaggctctgctcagttctctgtgcctgtctccctccagcactgccgaggttctctgccgaggccaaccagaaataccccttggaagctggaatcctgcaacaatggcccagggtgtcctctggatcctactcggattgctactgtggtcagacccagggacagcctccctgcccctgctcatggactctgtcatccaggccctggctgagctggagcagaaagtgccagctgccaagaccagacacacagcttctgcgtggctgatgtcagctccaaactctggcccccacaatcgcctctaccacttcctgctgggggcatggagcctcaatgctacagagttggatccctgcccactaagcccagagctgttaggcctgaccaaggaggtggcccgacatgacgtacgagaagggaaggaatatggggtggtgctggcacctgatggctcgaccgtggctgtggagcctctgctggcggggctggaggcagggctgcaagggcgcagggtcataaatttgcccttggacagcatggctgccccttgggagactggagatacctttccagatgttgtggccattgctccagatgtaagagccacctcctccccaggactcagggatggctctccagatgtcaccactgcagatattggagccaacactccagatgctacaaaaggctgtccagatgtccaagcttccttgccagatgccaaagccaagtccccaccgaccatggtggacagcctcctggcagtcaccctggctggaaacctgggcctgaccttcctccgaggttcccagacccagagccatccagacctgggaactgagggctgctgggaccagctctctgcccctcggacctttacgcttttggaccccaaggcatctctgttaaccatggccttcctcaatggcgccctggatggggtcatccttggagactacctgagccggactcctgagccccggccatccctcagccacttgctgagccagtactatggggctggggtggccagagacccagggttccgcagcaacttccgacggcagaacggtgctgctctgacttcagcctccatcctggcccagcaggtgtggggaacccttgtccttctacagaggctggagccagtacacctccagcttcagtgcatgagccaagaacagctggcccaggtggctgccaatgctaccaaggaattcactgaggccttcctgggatgcccggccatccacccccgctgccgctggggagcggcgccttatcggggccgcccgaagctgctgcagctgccgctgggattcttgtacgtgcatcacacctacgtgcctgcaccaccctgcacggacttcacgcgctgcgcagccaacatgcgctccatgcagcgctaccaccaggacacgcaaggctggggagacatcggctacagtttcgtggtgggctcggacggctacgtgtacgagggacgcggctggcactgggtgggcgcccacacgctcggccacaactcccggggcttcggcgtggccatagtgggcaactacaccgcggcgctgcccaccgaggccgctctgcgcacggtgcgcgacacgctcccgagttgtgcggtgcgcgccggcctcctgcggccagactacgcgctgctgggccaccgccagctggtgcgcaccgactgccccggcgacgcgctcttcgacctgctgcgcacctggccgcacttcaccgcggtgagtcttcgcagcctgcactacacggcccgccgcccctccgtctacacaagctccacgaggcccctgccccctgcctgtaacagctgtgcccgcacagcctcagccaggcccccaacttcccggcggcacgtctattcaggaaacctaggcccagcctttgcgggtcactctgcgggcaacatccctgatcctgtgacttctgcctatgcagcctcagctcagccccagacccagccagcctgtcctttccccagctcctaa

SEQ ID NO: 328 - DNA, 952 bp, Homo sapiens
  source 1..952: mol_type = genomic DNA
ttggtccaagcaagaaggcagtggtctactccatcggcaacatgctggtcctttatggacacagcacccaggaccttccggaaaccaatgcccgcgtagtcggagggactgaggccgggaggaattcctggccctctcagatttccctccagtaccggtctggaggttcccggtatcacacctgtggagggacccttatcagacagaactgggtgatgacagctgctcactgcgtggattaccagaagactttccgcgtggtggctggagaccataacctgagccagaatgatggcactgagcagtacgtgagtgtgcagaagatcgtggtgcatccatactggaacagcgataacgtggctgccggctatgacatcgccctgctgcgcctggcccagagcgttaccctcaatagctatgtccagctgggtgttctgccccaggagggagccatcctggctaacaacagtccctgctacatcacaggctggggcaagaccaagaccaatgggcagctggcccagaccctgcagcaggcttacctgccctctgtggactacgccatctgctccagctcctcctactggggctccactgtgaagaacaccatggtgtgtgctggtggagatggagttcgctctggatgccagggtgactctgggggccccctccattgcttggtgaatggcaagtattctgtccatggagtgaccagctttgtgtccagccggggctgtaatgtctccaggaagcctacagtcttcacccaggtctctgcttacatctcctggataaataatgtcatcgcctccaactgaacattttcctgagtccaacgaccttcccaaaatggttcttagatctgcagtaggacttgcgatcaaaaagtaaaacacattctgaaagactattgagccattgatagaaaagcaaataaaactagatatacatt

SEQ ID NO: 329 - DNA, 1816 bp, Homo sapiens
  source 1..1816: mol_type = genomic DNA
atccctcgggtcccgggatgggggggcggtgaggcaggcacagccccccgcccccatggccgcccgtcggagccagaggcggagggggcgccggggggagccgggcaccgccctgctggtcccgctcgcgctgggcctgggcctggcgctggcctgcctcggcctcctgctggccgtggtcagtttggggagccgggcatcgctgtccgcccaggagcctgcccaggaggagctggtggcagaggaggaccaggacccgtcggaactgaatccccagacagaagaaagccaggatcctgcgcctttcctgaaccgactagttcggcctcgcagaagtgcacctaaaggccggaaaacacgggctcgaagagcgatcgcagcccattatgaagttcatccacgacctggacaggacggagcgcaggcaggtgtggacgggacagtgagtggctgggaggaagccagaatcaacagctccagccctctgcgctacaaccgccagatcggggagtttatagtcacccgggctgggctctactacctgtactgtcagagttccgatgccctggaagcctgggagaatggggagagatcccggaaaaggagagcagtgctcacccaaaaacagaagaagcagcactctgtcctgcacctggttcccattaacgccacctccaaggatgactccgatgtgacagaggtgatgtggcaaccagctcttaggcgtgggagaggcctacaggcccaaggatatggtgtccgaatccaggatgctggagtttatctgctgtatagccaggtcctgtttcaagacgtgactttcaccatgggtcaggtggtgtctcgagaaggccaaggaaggcaggagactctattccgatgtataagaagtatgccctcccacccggaccgggcctacaacagctgctatagcgcaggtgtcttccatttacaccaaggggatattctgagtgtcataattccccgggcaagggcgaaacttaacctctctccacatggaaccttcctggggtttgtgaaactgtgattgtgttataaaaagtggctcccagcttggaagaccagggtgggtacatactggagacagccaagagctgagtatataaaggagagggaatgtgcaggaacagaggcgtcttcctgggtttggctccccgttcctcacttttcccttttcattcccaccccctagactttgattttacggatatcttgcttctgttccccatggagctccgaattcttgcgtgtgtgtagatgaggggcgggggacgggcgccaggcattgtccagacctggtcggggcccactggaagcatccagaacagcaccaccatctagcggccgctcgagggaagcacccgccggttggccgaagtccacgaagccgccctctgctagggaaaacccctggttctccatgccacacctctctccaggtgccctctgcctcttcaccccacaagaagccttatcctacgtccttctctccatctatcggaccccagtttccatcactatctccagagatgtagctattatgcgcccgtctacagggggtgcccgacgatgacggtgccttcgcagtcaaattactcttcgggtcccaaggtttggctttcacgcgctccattgccccggcgtggcaggccattccaagcccttccgggctggaactggtgtcggaggagcctcgggtgtatcgtacgccctggtgttggtgttgcctcactcctctgagctcttctttctgatcaagccctgcttaaagttaaataaaatagaatgaatgata

SEQ ID NO: 330 - DNA, 3160 bp, Homo sapiens
  source 1..3160: mol_type = genomic DNA
gcccgcgccgccaccgcctcttccctccccgtgtccggtccccgtgcgtcccgaggctccccgccgcccgtcccggcgcgcaccgcgggcgtctgtccgaacgccttccagccacctgagccctcctgcgggcgactcgctcagctagcccgtgcccgcctccaccttctccgtcatcccctcttccttgcgtccggctctccactggggctgcacagtcgagggctgctcgcgtcgggaaggagatgcccagagtctctggggcgcaccctcccgtcccgctcagccgcacccagctttagaaggtgctctcagcagccactttcgggctctagcgaggacaccctctcgcagaagtccttgccgagaccccccgccccagccattctctgaaggggctgaggacactcttatcgcgcccctcatggccaagcctcggctgctagttctctacttcgctctgattgtggttccggcctgggtgtccagcattgtcctcacagggacaagcgagcccccagatgcgcagacagtggcgcctgcggaggacgagactctgcaaaacgaggcggacaaccaggagaacgttttatctcagttgctgggggactatgacaaggtcaaggctatgtctgagggctcggactgtcagtgcaagtgtgtggtgagacccctgggccgggatgcctgccagaggatcaatgcgggggcctccaggaaggaagacttctataccgtggaaaccatcacctcaggctcgtcgtgcaagtgtgcctgtgtagcacccccatcggccctcaatccctgcgagggagacttcaggctccagaagctgcgggaggcagacagccaggacttgaagctctccacaatcatagacatgttggaaggagcgttctatggcctggatctcctgaagctacattcagtcaccaccaaactggtggggcgagtggataaactggaggaggaagtgtctaaaaacctcaccaaggaaaatgaacaaatcaaagaggacatggaagaaattcgaaccgagatgaataagcgaggcaaagaaaattgctctgaaaacatcctagatagcatgccagacatccgctcagccctgcagagggatgcagcagcagcctacgcccacccagagtatgaagagcggtttctgcaggaagaaaccgtgtcccagcagatcaactccatcgaacttctgcagacgcgacccctggctctgcctgaggtggtgaagtcacagcggcccctgcagaggcaggtccacctgagaggccggccggcctcccagcccactgtcatccggggcatcacctactataaagccaaggtctctgaagaagagaatgacattgaagagcagcaagatgagtttttcagcggtgacaatggagtggatttgctgattgaagatcagctcctgagacacaacggcctgatgaccagtgtcacccggaggcctgcagccacccgtcagggacacagcactgctgtgacaagcgacctgaacgctcggaccgcaccctggtcctcagcactgccacagccctcgacctcagatcccagcatcgccaaccatgcctcagtgggaccaacactccaaacaacctcggtgtctccagatcccacaagggagtcagtcctgcagccttctcctcaggtaccagccaccactgtggcccacacagccacccagcaaccagcagccccagctcctccggcagtgtctcccagggaggcattgatggaagctatgcacacagtcccagtgcctcccaccacagtcagaacagactcgctggggaaagatgctcctgctgggtggggaacaacccctgccagccccacgctgagccccgaagaagaagatgacatccggaatgtcataggaaggtgcaaggacactctctccacaatcacggggccgaccacccagaacacatatgggcggaatgaaggggcctggatgaaggaccccctggccaaggatgagcggatttacgtaaccaactattactacggcaacaccctggtagagttccggaacctggagaacttcaaacaaggtcgctggagcaattcctacaagctcccgtacagctggatcggcacaggccacgtggtatacaatggcgccttctactacaatcgcgccttcacccgcaacatcatcaagtacgacctgaagcagcgctacgtggctgcctgggccatgctgcatgacgtggcctacgaggaggccaccccctggcgatggcagggccactcagacgtggactttgctgtggacgagaatggcctatggctcatctacccggccctggacgatgagggcttcagccaggaggtcattgtcctgagcaagctcaatgccgcggacctgagcacacagaaggagaccacatggcgcacggggctccggaggaatttctacggcaactgcttcgtcatctgtggggtgctgtatgccgtggatagctacaaccagcggaatgccaacatctcctacgctttcgacacccacaccaacacacagatcgtccccaggctgctgttcgagaatgagtattcctatacgacccagatagactacaaccccaaggaccgcctgctctatgcctgggacaatggccaccaggtcacttaccatgtcatctttgcctactgacacccttgtccccacaagcagaagcacagaggggtcactagcaccttgtgtgtatgtgtgtgcgcgcacgtgtgtgtaggtgggtatgtgttgtttaaaaatatatattattttgtataatattgcaaatgtaaaatgacaatttgggtctatttttttatatggattgtagatcaatccatacgtgtatgtgctggtctcatcctccccagtttatatttttgtgcaaatgaacttctccttttgaccagtaaccaccttccttcaagccttcagcccctccagctccaagtctcagatctcgaccattgaaaaggtttcttcatctgggtcttgcaggaggcaggcaacaccaggagcagaaatgaaagaggcaagaaagaagtgctatgtggcgagaaaaaaagttttaatgtattggagaagttttaaaaaacccagaaaaacgctttttttttttaataaagaagaaatttaaaatca

SEQ ID NO: 331 - DNA, 766 bp, Homo sapiens
  source 1..766: mol_type = genomic DNA
atgaagctgggctgtgtcctcatggcctgggccctctacctttcccttggtgtgctctgggtggcccagatgctactggcagctggatgtcatgccgaactgtttccagcgccaattctcagagctgtaccctcagctgaaccccaagcaggaagccccatgaccctgagttgtcagacaaagttgcccctgcagaggtcagctgcccgcctcctcttctccttctacaaggatggaaggatagtgcaaagcagggggctctcctcagaattccagatccccacagcttcagaagatcactccgggtcatactggtgtgaggcagccactgaggacaaccaagtttggaaacagagcccccagctagagatcagagtgcagggtgcttccagctctgctgcacctcccacattgaatccagctcctcagaaatcagctgctccaggaactgctcctgaggaggcccctgggcctctgcctccgccgccaaccccatcttctgaggatccaggcttttcttctcctctggggatgccagatcctcatctgtatcaccagatgggccttcttctcaaacacatgcaggatgtgagagtcctcctcggtcacctgctcatggagttgagggaattatctggccaccggaagcctgggaccacaaaggctactgctgaatagaagtaaacagttcatccatgatctcacttaaccaccccaataaatctgattctttattttctcttcctgtcctgcacatatgcataag

SEQ ID NO: 332 - DNA, 4516 bp, Homo sapiens
  source 1..4516: mol_type = genomic DNA
gggagaaggagtgggaggttgtttaaactgagaaagacagttgcaaaacttcgtacaacagcatgagctccaagcttcaaacgcattctcatgctcagacgagcactttatttttcatcaagttattttttgcattgttttggagtagcttcgaataataaacacatatttctgctttaaatttttaatagttaactacattcatgggacaaccaaagcaagaaagcctcatgttttgggggaaagtttgatatcagcaatgtccagacaagagccaaagatgtttgtcttgctctatgttacaagttttgccatttgtgccagtggacaaccccggggtaatcagttgaaaggagagaactactcccccaggtatatctgcagcattcctggcttgcctggacctccagggccccctggagcaaatggttcccctgggccccatggtcgcatcggccttccaggaagagatggtagagacggcaggaaaggagagaaaggtgaaaagggaactgcaggtttgagaggtaagactggaccgctaggtcttgccggtgagaaaggggaccaaggagagactgggaagaaaggacccataggaccagagggagagaaaggagaagtaggtccaattggtcctcctggaccaaagggagacagaggagaacaaggggacccggggctgcctggagtttgcagatgtggaagcatcgtgctcaaatccgccttttctgttggcatcacaaccagctacccagaagaaagactacctattatatttaacaaggtcctcttcaacgagggagagcactacaaccctgccacagggaagttcatctgtgctttcccagggatctattacttttcttatgatatcacattggctaataagcatctggcaatcggactggtacacaatgggcaataccggataaagaccttcgacgccaacacaggaaaccatgatgtggcttcggggtccacagtcatctatctgcagccagaagatgaagtctggctggagattttcttcacagaccagaatggcctcttctcagacccaggttgggcagacagcttattctccgggtttctcttatacgttgacacagattacctagattccatatcagaagatgatgaattgtgatcaggaccaagatccctgtggtaaacactctgattgaatctggggttccagaaggtggaacaagcaggaatgggatccaaagagactcccactcagattctaaagcatttaaagacaattctagcagaatttatcaaaacaagatgaaacacagaaaagttgaaaccacaacaaaatgaattctattaaagaatagccccagatataaattctcttgaaagcaatgttcataaatatttaagcaaattaaagacaatgttaacaaattttctattaaatgccctgagtgataaaaccagttggcaataatattgccttattaaatcttcaaaaaatatattttagtctgttatttaagaaaaacataacatcccaaaatctttgacaattctcgaaaggctatatagtaagtcaaaaaccaaaggtaagagatgctaactatttttcaagcaagctacagagaaatgataaatgttttttgttttattatttattccttcatgtttgtatatattcactcaacaaccctttaatgagcctgtaaggaccagacactgtggcgctgaatcagatttaataatgagttaagacaaagcccctacctatgggctagtgtgtggtgatcaaactatcacaattcagtgtgatgagcagcatagcaaacagatggatttgaagctaaaagcacacagggtctgctattcctgaggctgggggccagagaagcttttacgcatggaaaaacactaatcatgccaaggtgtatgtgtttaagggggtgtgatggatgcaaagggaatgaggaattcagcactgcattctctttgcaccctcaatgcatgattggtattctcaacagcaaaggggtgaaaaatctagagacagaggaggcctggcaggggtgataaaaatggagattgaaatgaagagaaatagccagcaggtgattcttctgaatcctttagtgtgatggtttcccaagacaaacatttgtcctaatagctttctcataaatatgggcaccactttacattgtggtaagacattgcttctcatggatctgctaggtatttatttcaaataaagcaaggcatatgttcactgatttacgagtaagctgatgagagcaatgaacaggagaaggagggagagagccaaatgtctgagtaaacagatatcccttccaagtctcacacctcccttagtcccactcttgcttgtgtcagcaccttgttcttcactgaactgcaattcttcaattattctcttccatgattttgtctgatctaccatttctatggtttatggtaatagtattccctttatccctcccttttggtaacttccaatcctccttctatgtattcctttctctgctcattgacttataaatagttttcatacctcttatgtttgaatcaccatgctagattctgtgaagacagaagagtatcaagattaatatattaatagtatagctctgactggtaaatttcttttttttaatcttccccaatttaaattttttaatttaaaagtaaattttactgtcgaaaatgcaaacttggggagggcggaaacatcacacacaaggtttccacttcacacttggagggttgcatggcggctgggcaaaggtgctccccacttcccagatggtgcggcggctggccagaggcactcttcacttcccagacagaggggcggccgggcagaggtgctcctcacttcccagagggtgcaggagccagctctgactagtaaatttctaaggataccagaaaggaaatggcatgcacacacacaaaaaatacctaaattttggatgagaaaatgataaaatatgctaagttctaggctggaaataagggcaaaatgctgtgaaagaagaggaaatgtttacttccaaattaggatgtgacagagaagggatagggaaatcctctctgctcattgggccttacatgatgggtgacacttggagtggcacaagttgggggaaagcgcacttgagacagaggtaatgatggggacgaagtgagaacagagacccagaaggagaatcaatggaccatatttgtaagagctttgaaagccagcctgagaattggaggatttattcataagaaagtgtagagaccctgtgtatttcagagctggatactgccattaccacagatgaaagttgcaatgatctagcagttgtgtgcaaaggcaaggcttgcttttcctgtctttcaaccctatcttgcttttcctgtctttcaaccctatcttgctttcattgtcttcatcttcctgccatactttgtgcacttattgctctccttctgagtcaggacatgtgtacaggagaccaagaacaatgagtattagaaaaaaaggagacagcaaaggtggtttgaggtagtcacctgcttacagataacagccaaagatagaattccaagttataaagcataaaaaagagccaacagaagtaactaatccgggaaaagtgaacatatgggccctttaaagactacaagatttgctagataaactggaaatggagaagttattgcagacagtcatgaaccacaaatcactgtgattaaaattttcttctgatcgtaatccacgaatgcattcattttttggacattgcttacttatcttttaaatgtttcttttattacaaagcctattttgagtagcttttaaaactgaatttcctttaattggtttgaagcctagagatgaatttcgttttcaaatatctggtgggatggtaatggggattagagaactgacatgagaaaagaggagctgttttggtattaaacgaataaaatcttaagcaaatataggtgtcttttattcttaaaaaatagcagatacagtttatccacatttgtaaatatttgtataaagaaagtagcaaaacagttttggtttaaaaagttccaagtctcattgcaatcattctttgtaaaggctgacttgtaatgaatatgtattaagcaatatttattgactatacaccatcttgttctagaagagtttaaagccacttaagaagataaataagatataaaaagaaaacagcagtcaaaagcagatgagaagaaatgggaaaaacaaaaaaaaaagaaaataatgaggctaatataatgctgtgtgtacatgaacatgaatgtgcctgtgttacacattttcaggccacaaatgtttctttgtgcccctgcatgcacaagggtatttccaggtcatttatcattgtgaacagtgttgcttatgataaaaaatagattctataaactctaaatatactttttttctaccactctgtgtaaaagatcatgaacgtaaataaattttagatat

SEQ ID NO: 333 - DNA, 1584 bp, Homo sapiens
  source 1..1584: mol_type = genomic DNA
ggggagaggaagagtggtagggggagggagagagagaggaagagtttccaaacttgtctccagtgacaggagacatttacgttccacaagataaaactgccacttagagcccagggaagctaaaccttcctggcttggcctaggagctcgagcggagtcatgggctctctggtcctgacactgtgcgctcttttctgcctggcagcttacttggtttctggcagccccatcatgaacctagagcagtctcctctggaagaagatatgtccctctttggtgatgttttctcagagcaagacggtgtcgactttaacacactgctccagagcatgaaggatgagtttcttaagacactaaacctctctgacatccccacgcaggattcagccaaggtggacccaccagagtacatgttggaactctacaacaaatttgcaacagatcggacctccatgccctctgccaacatcattaggagtttcaagaatgaagatctgttttcccagccggtcagttttaatgggctccgaaaataccccctcctcttcaatgtgtccattcctcaccatgaagaggtcatcatggctgaacttaggctatacacactggtgcaaagggatcgtatgatatacgatggagtagaccggaaaattaccatttttgaagtgctggagagcaaaggggataatgagggagaaagaaacatgctggtcttggtgtctggggagatatatggaaccaacagtgagtgggagacttttgatgtcacagatgccatcagacgttggcaaaagtcaggctcatccacccaccagctggaggtccacattgagagcaaacacgatgaagctgaggatgccagcagtggacggctagaaatagataccagtgcccagaataagcataaccctttgctcatcgtgttttctgatgaccaaagcagtgacaaggagaggaaggaggaactgaatgaaatgatttcccatgagcaacttccagagctggacaacttgggcctggatagcttttccagtggacctggggaagaggctttgttgcagatgagatcaaacatcatctatgactccactgcccgaatcagaaggaacgccaaaggaaactactgtaagaggaccccgctctacatcgacttcaaggagattgggtgggactcctggatcatcgctccgcctggatacgaagcctatgaatgccgtggtgtttgtaactaccccctggcagagcatctcacacccacaaagcatgcaattatccaggccttggtccacctcaagaattcccagaaagcttccaaagcctgctgtgtgcccacaaagctagagcccatctccatcctctatttagacaaaggcgtcgtcacctacaagtttaaatacgaaggcatggccgtctccgaatgtggctgtagatagaagaagagtcctatggcttatttaataactgtaaatgtgtatatttggtgttcctatttaatgagattatttaataagggtgtacagtaatagaggcttgctgccttcaggaaatggacaggtcagtttgttgtaggaaatgcatatttt

SEQ ID NO: 334 - DNA, 500 bp, Homo sapiens
  source 1..500: mol_type = genomic DNA
cgcatccccctgctggtctgcccgccgacctgcgcgccctcgctgccgcccgtgtgcgcccctcgaccccagcggcaccatgcatctctcccagctgctggcctgcgccctgctgctcacgctgctctccctccggccctccgaagccaagcccggggcgccgccgaaggtcccgcgaaccccgccggcagaggagctggccgagccgcaggctgcgggcggcggtcagaagaagggcgacaaggctcccgggggcgggggcgccaatctcaagggcgaccggtcgcgactgctccgggacctgcgcgtggacaccaagtcgcgggcagcgtgggctcgccttctgcaagagcaccccaacgcgcgcaaatacaaaggagccaacaagaagggcttgtccaagggctgcttcggcctcaagctggaccgaatcggctccatgagcggcctgggatgttagtgcggcgccccctggcggcggtgagtacggcccacccgac

SEQ ID NO: 335 - DNA, 2292 bp, Homo sapiens
  source 1..2292: mol_type = genomic DNA
aatcagcgcgttccgcggcgggcccggcccctcctggtcagcgcgctagctgggctcggctccgcactgctagctgcgcgccgccctggacggggcgcaccgactgcgcgcgcggctgcgggcaaacatcgggagtcctgcctcagctgccgcttctccagcagcagcttcaggcttctcccgcaggagcttcgggcttctcctggtagagacgtgggaacttttcttctcctggcgaggctgcagaggtgatgggccgctcccggggctcccgcggggaggcggcacggtgagcgtcctcgggctccggtgcggcgatcagtacctagttccggacgcgccggtccgacttggatgccggctctagtcgagtcttctgagctacgataattttttggaacggcagaaatgattggttctagcaacagatgggaatttggagtcactctgaaatatatcctggaataagtgtgtttgactagaaccacatcttatgaggtccccaaggatgagagtctgtgctaagtcagtgttgctgtcgcactggctctttctagcctacgtgttaatggtgtgctgtaagctgatgtccgcctcaagccagcacctccggggacatgcaggtcaccaccaaatcaagcaagggacctgtgaggtggtcgccgtgcacaggtgctgcaataagaaccgcatagaagagcggtcacaaacggtcaagtgctcttgcttcccgggacaggtggcgggcacaactcgggctcaaccttcttgtgttgaagcttccattgtgattcagaaatggtggtgtcacatgaatccgtgtttggaaggagaggattgtaaagtgctgccagattactcaggttggtcctgtagcagtggcaataaagtcaaaactacgaaggtaacgcggtagcgaagagagaggtgtgcttcaatcctggaggggcagcaggaggcggagctcttttgcttggattcccatcatggcccctttgcagaaaattgtctaggatttcagcaacttcatatttgtatatgtgagctgtgagaggtggcattcacttaactggcccagccctctctgcttcgtgattttatttcattgaattataaccacaagccaccacccatttgacatcctctctggattcccaaggagcatacctccaaaatccgagaagagcaaatcagagtcttcaaaatggatcaccactaagggcatgttcattcttcactttctttctgcttttacaaaagaacttggatgtatgttccaaagggtcctcattctgttcctcttttgaacttttccttttgtccttgtattaaagtggttttaaaggggtctaaaaagattttggcaaaacatatttgcagatgtagattagctggtgaagaaaattactgctagagatcaactgattaactggtaaagaacgtttattttataacccttgaagaatagaaggacatagttggattattgtgtgtgcattgtatttttacttctattttttttttgctttccattttccagttagcagagataaaatgagagcgttttaacttcaatgtaccattttactgagtgctaaggaagcatatcaattccaatattttataaccaaagctctatcagaacatatttataaaacttgttggaatttttacggcttttgtgtagtcatgtaggtaaatcatttaaaatataaaacaatctcaatttagatcaagggttatttcttagatcaaatttatgccaattatatgaaaagattttaactccgagacaggagtctttcagtgctgaatttttagactgtaaatgagttcttcttaacttagctgtttccctacttctgtgacttctgtgttagccatcttatttctttaaaatctgagtcctgattggcttaatgattttgcagcagacatgtctccacatattctcaaatgctgtcatgcggaaacgtatgaaacagatgaagaatgactgacccagattttagatgtataatgttgttaaagtacatactactgtaaaaatatgggatgaattttatatattaagaaatgccaaaaacatagtttctgcaccaagttaattatccctgtcctttcacatttatagggggaaaataaatactttaatgttgtttatagcctaacagttatttgattttattcttgcagagggaatggaaaggaatggaaagatttgttggcgtaatttttgaatatttgttatgatcatatgaataagtaaaaaaattcatcctgctgatggca

SEQ ID NO: 336 - DNA, 4138 bp, Homo sapiens
  source 1..4138: mol_type = genomic DNA
gccgtctcctccgcctcctcctcggtagttcacggctgccccggctccaggcctgtggaaatcgaatcaagggtttctggagtggagtgattccagctgctttgagctgaaggaaaagtagcctggccagtaaagcgtccgtgtgctggaggagtgcagccacccatcccggcgggccttgcaggacgaccgacaccaggaaggctttgtgccaggcccagcagccacccccagccgccttatgcaagtgggtacatgccctcgccagacgccagctttctgatctgcgtctttagattttttccatcgcctaagcgttacttctccactgatcggttttagagacctgaaacatcacagaagcttctgagtggttctgaagattcaagaggtttgcaggttgctatgttaatgttgtttgtctttggagtcttacttcatgaagtctcactgagtggtcagaatgaagctcctcctaatactcacagcattccaggcgaacctctgtataactatgccagcatccgcttgccagaggagcacattcccttctttttgcacaacaataggcatattgccactgtctgtaggaaagactctctttgtccatataagaaacacctagagaagctaaagtactgctggggttatgagaaatcctgcaaaccagagttcaggtttggttacccagtttgcagctatgtcgacatgggatggacggacactcttgagtcagctgaggacatattttggaaacaagctgactttggatatgccagagagaggctggaggagatgcatgtgctctgtcagcctaaggaaacgagtgactcaagtctggtgtgttcccgttatcttcagtactgcagagcaaccaatctctatcttgatttaagaaacatcaagagaaatcatgacagatttaaggaggactttttccagagtggtgaaattggagggcactgtaaacttgacatccgtacattgacgtctgaaggtcagcgcaaaagccctctgcagtcatggtttgctgagctacaaagctatactcagctcaacttcagacctatagaagatgctaaatgtgacattgtcattgaaaaaccaacatatttcatgaaattagatgcaggtgttaacatgtatcaccacttctgtgatttcatcaatctttatattactcagcacgttaataactcattcagtactgacgtgtacatcgtgatgtgggacaccgatggaaaaattcgagtcaccattcttgcacggagcacagaataccggaaaatccttaaccaaaatgagcttgtaaatgcactgaaaacagtatctacatttgaagtccagattgttgattacaagtatagagaacttgggtttttagatcaactaaggatcacacacaacacggacatatttattggaatgcatggagctggtctgacccatttacttttccttccagactgggctgctgtatttgaactgtacaactgtgaagatgaacgctgttacttagacttggccaggctgagaggcgttcactacatcacttggcgacggcagaacaaagtctttcctcaggataagggccaccatccaaccctgggggagcacccgaagttcaccaactactctttcgatgtagaagaatttatgtatcttgtccttcaggctgcagaccacgtattgcaacacccaaagtggccatttaagaagaaacatgatgagctataaatatgctgagtctgtttgcaaaaagagagtgtttaaacactccaacacccagacttagaattaaatcagtaaagcaatctgttatttcctatccccgaattaccttttctatgccaaaacataccttcaggatattgttatgtgttgtatagatgttaagtgtttcatgtggtttttgtgtcattgctatttatcaatagcaataattttgcactgaaaactttttatagttcaaaaattaagcatggactccccagtatactttaactttctttctttctttttttttttttggagacagagtctcactgtcacccaggctggagtgcagtggcatgatctcagtttatgcaacttctgcctccccaggttcaagcgattcttttgcctcagccacctgactagctgggattgcagcctgcaccaccacacctggctaaatttttgttgttgtcgttgagatacagtttcactctgtcacccaggctggagtgcagtggcatgatctcagctcactgcaacctctgccttctggattcaagtgattcttgtgccttagcctcccaagtagctgggattacaggcgtgcaccaccacgcccagttgatttttgtatttttgatagagacggagtttcaccatgttggccaggctggtctcgaactctgggttcaagaaatcctcccaccttgcctcccaaagtgctgggattacaggtgtgagccaccacgcatggccctgaactttctctttttaggaataccaaagttttcaactttttcagctttagaatttgtaaatatttttgtagaatatcatatgactgtaattccagagtgttccaacttgtttatgatatatttgggtaaatttacaactgttcttttatttgccataatctggttataacactgtttgtggtaggaaaggaaaacatgcaaaacatacacacacacacacacacacacacacacacgcagagttgtgattctcagtaccaagctataggaccatgttatagatcagcgtttagtcacctccaggttatatgcatcgagaacctgaataaatcatgccactatattaatttatattacatgtttcatatttaaatcatgttttcctaaaatgtagcaactacatgtgataaaagcaaattagaacattctgtaggactgtcttgcataccttctgtctggtttccactgattccttcttagccatggagagcatttgtgattaattaatttatatatgaaataatggtttccattttatgcgagtatttgtaactgcatataccagtgcgtgtgcgtctacctctgtcagcatgaaagtattccagtctttaatttcaaaaacttcaaattagcctcatgaagagaatttttccctgtgaaaagtaagaccaagaaaaaacaaactaaagacatgtgacttattcaatgaaagtgaaaaagaagctctaaaacagtgtcattgattaaaaagaatatctggaatgtagccccactctttgagtgggattcatttcttactgcttatgaactttcaatttagtagtcagaaaccatggatttattttactgcacaatgtgaagtttacattttattaacacttgagtagtctgatttagagactagttacttctattttttaaaataatggagtaacaaattacagaatagctaaataattttttaaaaatattttacagttgtaaaaaatatccatcagaaaaatgacacacaaaacaaaatatctggacctttacagaagacgtttgctgacccccactttaaaggattggaacagtcttctagaattgaggaatatttattaaaatacctgtaaagaaaatagtgaatcactgtagcaatggctttgattcagaccttaaaatcacataagaagaattacaacatgttatggatttttaagtggcaggtattgtaactgttttttgtgtgcaaaatactgagtaaccactgggaaaatatttcagatgaaagggatgacaaaagcatgttgcgctttgcatcagcaaggcattgacttctgaaaaaatgatctgaaaaaagtttcaccgtttgtcttcttacctcattttaagaagcatgtgaaaatgggatactatagactactgagaatttcagaaattgagaacaatttcataataaaacggctatatttgaagagagaatacattttatataaacaggaaaatacatttgacactttatggaattttatgagactttttgtgggaacagaaggtcttcaaattgtaaaatgtaaagattgctctttttattaagtctttaacagggatgtatttcattgtatgttttgggtatggctttggaataaatcattttatattttatttgaatatcagaa

SEQ ID NO: 337 - DNA, 676 bp, Homo sapiens
  source 1..676: mol_type = genomic DNA
aataaatctgttcttcagcaaccctacctgcttctccaaactgcctaaagagatccagtactgatgacgctgttcttccatctttactccctggaaactaaccacgttgtcttctttccttcaccaccacccaggagctcagagatctaagctgctttccatcttttctcccagccccaggacactgactctgtacaggatggggccgtcctcttgcctccttctcatcctaatcccccttctccagctgatcaacccggggagtactcagtgttccttagactccgttatggataagaagatcaaggatgttctcaacagtctagagtacagtccctctcctataagcaagaagctctcgtgtgctagtgtcaaaagccaaggcagaccgtcctcctgccctgctgggatggctgtcactggctgtgcttgtggctatggctgtggttcgtgggatgttcagctggaaaccacctgccactgccagtgcagtgtggtggactggaccactgcccgctgctgccacctgacctgacagggaggaggctgagaactcagttttgtgaccatgacagtaatgaaaccagggtcccaaccaagaaatctaactcaaacgtcccacttcatttgttccattcctgattcttgggtaataaagacaaactttgtacctctc

SEQ ID NO: 338 - DNA, 2745 bp, Homo sapiens
  source 1..2745: mol_type = genomic DNA
atcagtccgcgccggcgtaacggcccgcggtatctcagcaaccgctgggcatccggaggatgtggggacgcggagctgagaggctccgggctagctaggtgtaggggtggacgggtcccaggaccctggtgagggttctctacttggccttcggtgggggtcaagacgcaggcacctacgccaaaggggagcaaagccgggctcggcccgaggcccccaggacctccatctcccaatgttggaggttccctcccaggaatccgacacgtgacggtctgtccgccgtctcagactagaggagcgctgtaaacgccatggctcccaagaagctgtcctgccttcgttccctgctgctgccgctcagcctgacgctactgctgccccaggcagacactcggtcgttcgtagtggataggggtcatgaccggtttctcctagacggggccccgttccgctatgtgtctggcagcctgcactactttcgggtaccgcgggtgctttgggccgaccggcttttgaagatgcgatggagcggcctcaacgccatacagttttatgtgccctggaactaccacgagccacagcctggggtctataactttaatggcagccgggacctcattgcctttctgaatgaggcagctctagcgaacctgttggtcatactgagaccaggaccttacatctgtgcagagtgggagatggggggtctcccatcctggttgcttcgaaaacctgaaattcatctaagaacctcagatccagacttccttgccgcagtggactcctggttcaaggtcttgctgcccaagatatatccatggctttatcacaatgggggcaacatcattagcattcaggtggagaatgaatatggtagctacagagcctgtgacttcagctacatgaggcacttggctgggctcttccgtgcactgctaggagaaaagatcttgctcttcaccacagatgggcctgaaggactcaagtgtggctccctccggggactctataccactgtagattttggcccagctgacaacatgaccaaaatctttaccctgcttcggaagtatgaaccccatgggccattggtaaactctgagtactacacaggctggctggattactggggccagaatcactccacacggtctgtgtcagctgtaaccaaaggactagagaacatgctcaagttgggagccagtgtgaacatgtacatgttccatggaggtaccaactttggatattggaatggtgccgataagaagggacgcttccttccgattactaccagctatgactatgatgcacctatatctgaagcaggggaccccacacctaagctttttgctcttcgagatgtcatcagcaagttccaggaagttcctttgggacctttacctcccccgagccccaagatgatgcttggacctgtgactctgcacctggttgggcatttactggctttcctagacttgctttgcccccgtgggcccattcattcaatcttgccaatgacctttgaggctgtcaagcaggaccatggcttcatgttgtaccgaacctatatgacccataccatttttgagccaacaccattctgggtgccaaataatggagtccatgaccgtgcctatgtgatggtggatggggtgttccagggtgttgtggagcgaaatatgagagacaaactatttttgacggggaaactggggtccaaactggatatcttggtggagaacatggggaggctcagctttgggtctaacagcagtgacttcaagggcctgttgaagccaccaattctggggcaaacaatccttacccagtggatgatgttccctctgaaaattgataaccttgtgaagtggtggtttcccctccagttgccaaaatggccatatcctcaagctccttctggccccacattctactccaaaacatttccaattttaggctcagttggggacacatttctatatctacctggatggaccaagggccaagtctggatcaatgggtttaacttgggccggtactggacaaagcaggggccacaacagaccctctacgtgccaagattcctgctgtttcctaggggagccctcaacaaaattacattgctggaactagaagatgtacctctccagccccaagtccaatttttggataagcctatcctcaatagcactagtactttgcacaggacacatatcaattccctttcagctgatacactgagtgcctctgaaccaatggagttaagtgggcactgaaaggtaggccgggcatggtggctcatgcctgtaatcccagcactttgggaggctgagacgggtggattacctgaggtcaggacttcaagaccagcctggccaacatggtgaaaccccgtctccactaaaaatacaaaaattagccgggcgtgatggtgggcacctctaatcccagctacttgggaggctgagggcaggagaattgcttgaatccaggaggcagaggttgcagtgagtggaggttgtaccactgcactccagcctggctgacagtgagacactccatctcaaaaaaaaaaaaaaaaaaaaaagtaacccttggacctgggacatggagtgggcaggatcccttggtgctggccacggtgaccctaaggaactaaaggccacagtgcctctgaatgtaagtacaagtacacattccttgccaaactttattgtgattaaaattccagagacagtacca

SEQ ID NO: 339 - DNA, 2823 bp, Homo sapiens
  source 1..2823: mol_type = genomic DNA
taagaggcaggcaggaagcaatggacagggagtccgagtgaggttgtgctctttcctgagagaggggttccgcaagggattggaggcgtctttgtagccaggtacagctttccccttagagatgagcgctcttggagaaatgagaatggggagaaatcgtccatgaacatggagattggacatccccacgaaggaaaggatgatttaggagacaagagggtcatcatgggaacaaaatttcccatggagttggggatcagagtaggattaggaaaagaagattcccgatgcggggagagccctgtggttagtaataagtgtgagggaaggatggcaccaccagaaacaaaatttccattgagcaaggggcttgaaatgggattagaaagacagaatatttctaggactgtcatgcagaggggtagtttaggagtcgacagtgtctcagcttcacagggaacaaaaccttctctgttgccaggaagaatggggttagaaaatgagagtcttcttgcaggatatacccatgaacggataatacagcctcctttgggcagggtgtgtggaagttcacaggctgcagggagcaggagagctcctttggctagtggccctgaaggggtagaggaattagtgggaaagcctgctttcgttatggaaccaagacaggaaatggaaaaagagtctacctgtgttttaatgaaacccaacacagagattaagcttcctgtggaggtggacattggactaacccaagccgaggggccagatgagactaagaatacagagccccaaatgggcttggtgatagaacctccccaatgccagtttgcccaacaacatgaacagagaaaggaggctggaaacattgaatcaggagtggaacctccagatcgcatcagacccatatactctgggaagttttttgatcggaccccttgctggccaagtgcaggaaaagttattccagttggttacagagttgcaacctgcttgactgaaaaacttcccaggctaattactccacctgaagcaaaaaagtatttcaacttcagatatccacctgctggagtagaaagagtattttacggaagagcaaatgatccccagattgcaccttatttgacacatggaattagatctaaaatttcagtactggcaaacacattgataaacccacagcctattaccacatttcaacagaaaattaaagataaaaaagaatctatatatcttagcaatcgacgagcaccattaggaaaatctcacgatcaagcaccaggattaccaaaaggcatggacacaaccaatacgacatttgggacagcagtcatcaaagaatactctgctaaagatgtggtgaatccaccaaaatcctatgaagaagtatttaaagaaggaaatgaaggacatgatttgtatgttgtttctcacaatgattattatgcaggagaggcaaagaaccgaaagtataacccatcaagtttccataggtgtagtgtgtatggagtaccaacaccacattttaatgatggacgagccatggcaaaatctctatattggctccatgaactacaaatgaaaagaggagctaagtttgtatccaaaagagcagatgatttcaaagaaaagtttcaacataaacttggaagagttttagatcccattgcagaaacaatgaatgttcccccagactgcacatttggagcttgtctccgtcctgaggaatatggagttggtgatctcatccataatagacttccggatgaatatcttcgaggcaaggatagacagcgagccctgattgcagcagttcggcatcacctgaagaaagttaattaccaaaagtttgacactttgctggcagccttcaggcactatgacaagaagggagatgggatgatagataaagacgagctgcaggaagcttgtgaccaggccaacttgagtttagatgacaagctcctggaccagctatttgactactgtgatgtggataatgatggcttcattaactatctggaattcgcaaattttcttaactggaaagacaaaatgcttcttaaagagtatgaagagagggtcattattaaaggtagaaaaccagattgtgtaaaccctactgaggctaatgttgaagaacctgaacaaactctcctcataaagccagaagatattgtcttaaaagaagcaggaagcacagaaaagactctccggacacttctgagaccaagtgataaagtttccaactactataagacaacttcttctgagatcaatgcaattgtaggagccattccttctacttgttaccccatttgtggtgttccaaccattcgatctgacattcctgctccccgaattcgtcgcatcagtgacagaactaattatggtgaagaaggtagtgcatattcactactatatcctaccatttttgcccggaaaggagtgtttgaaagagacttcttcaagaccagatcaaaagaagagattgcagagatattgtgtaacattggtgtcaaactgtctgatgaagaatttgaaaatgtatggaatcttgcatcaaaaaagcatcacagaggagaagtttgtgttgagaacatcagaaatgttctagatgagctacggcatgcagaccggatcaagtgtaaaacactcatgtgatatttttggacttcattcattcaagcaaaagaattattaactctgtgtttatctaaaatgttgaatccattctggttttagatattatgttagagttcacagtggtaagactcatatgcctgtatgtgttgctaataaattagattttggattttaaaa

SEQ ID NO: 340 - DNA, 2709 bp, Homo sapiens
  source 1..2709: mol_type = genomic DNA
ggtgcgtcccccaacctgatgctagcccctttcctgttacttctcacccacagcaggagccccttgtctttcaggccatgcagccatgttccgggagccctaattgcacagaagcccatggggagctccagactggcagccctgctcctgcctctcctcctcatagtcatcgacctctctgactctgctgggattggctttcgccacctgccccactggaacacccgctgtcctctggcctcccacacggatgacagtttcactggaagttctgcctatatcccttgccgcacctggtgggccctcttctccacaaagccttggtgtgtgcgagtctggcactgttcccgctgtttgtgccagcatctgctgtcaggtggctcaggtcttcaacggggcctcttccacctcctggtgcagaaatccaaaaagtcttccacattcaagttctataggagacacaagatgccagcacctgctcagaggaagctgctgcctcgtcgtcacctgtctgagaagagccatcacatttccatcccctccccagacatctcccacaagggacttcgctctaaaaggacccaaccttcggatccagagacatgggaaagtcttcccagattggactcacaaaggcatggaggacccgagttctcctttgatttgctgcctgaggcccgggctattcgggtgaccatatcttcaggccctgaggtcagcgtgcgtctttgtcaccagtgggcactggagtgtgaagagctgagcagtccctatgatgtccagaaaattgtgtctgggggccacactgtagagctgccttatgaattccttctgccctgtctgtgcatagaggcatcctacctgcaagaggacactgtgaggcgcaaaaaatgtcccttccagagctggccagaagcctatggctcggacttctggaagtcagtgcacttcactgactacagccagcacactcagatggtcatggccctgacactccgctgcccactgaagctggaagctgccctctgccagaggcacgactggcataccctttgcaaagacctcccgaatgccacagctcgagagtcagatgggtggtatgttttggagaaggtggacctgcacccccagctctgcttcaagttctcttttggaaacagcagccatgttgaatgcccccaccagactgggtctctcacatcctggaatgtaagcatggatacccaagcccagcagctgattcttcacttctcctcaagaatgcatgccaccttcagtgctgcctggagcctcccaggcttggggcaggacactttggtgccccccgtgtacactgtcagccaggcccggggctcaagcccagtgtcactagacctcatcattcccttcctgaggccagggtgctgtgtcctggtgtggcggtcagatgtccagtttgcctggaagcacctcttgtgtccggatgtctcttacagacacctggggctcttgatcctggcactgctggccctcctcaccctactgggtgttgttctggccctcacctgccggcgcccacagtcaggcccgggcccagcgcggccagtgctcctcctgcacgcggcggactcggaggcgcagcggcgcctggtgggagcgctggctgaactgctacgggcagcgctgggcggcgggcgcgacgtgatcgtggacctgtgggaggggaggcacgtggcgcgcgtgggcccgctgccgtggctctgggcggcgcggacgcgcgtagcgcgggagcagggcactgtgctgctgctgtggagcggcgccgaccttcgcccggtcagcggccccgacccccgcgccgcgcccctgctcgccctgctccacgctgccccgcgcccgctgctgctgctcgcttacttcagtcgcctctgcgccaagggcgacatccccccgccgctgcgcgccctgccgcgctaccgcctgctgcgcgacctgccgcgtctgctgcgggcgctggacgcgcggcctttcgcagaggccaccagctggggccgccttggggcgcggcagcgcaggcagagccgcctagagctgtgcagccggctcgaacgagaggccgcccgacttgcagacctaggttgagcagagctccaccgcagtcccgggtgtctgcggccgcaacgcaacggacactggctggaaccccggaatgagccttcgaccctgaaatccttggggtgcctcgaggacgactggccgaaaagccgcattccctgcctcacaggccggaagtcccagcccagtccccgcgcgcgtccctcttcctcctcatactttcccttgactgagagctcctctaacccctgttctgatgggggagggcggtcttcccacttcctctccagaactccagaaagagcagtgtgcttatgcttcagtccaggctggagaggttggggccggggtagggaggcaggagccatgtcagttctgaaggagggtgaggcggtgggggattgcagggggcggctgagagaaaacctccttgggggccagggattccctttcccactctgaggctctggccagagggagagaggactctggacctaggaaaagaggcttttggctccaggtggtcaggacagtgggggttgggggtggggtgggtgggtgctggcggtggggaccaagatccggaaagatgaataaagacaaacatgacaaact

SEQ ID NO: 341 - DNA, 936 bp, Homo sapiens
  source 1..936: mol_type = genomic DNA
cttctgcaggcttgtgtgtttgttttatttttttggcacgcctgcagccaagttggggagggtttcctggacagaggtcctttggctgctgccttaagacgtgcagcctgggccgtggctgtcactgcgttcggacccagacccgctgcaggcagcagcagcccccgcccgcgcagcagcatggagctctggggggcctacctcctcctctgcctcttctccctcctgacccaggtcaccaccgagccaccaacccagaagcccaagaagattgtaaatgccaagaaagatgttgtgaacacaaagatgtttgaggagctcaagagccgtctggacaccctggcccaggaggtggccctgctgaaggagcagcaggccctgcagacggtctgcctgaaggggaccaaggtgcacatgaaatgctttctggccttcacccagacgaagaccttccacgaggccagcgaggactgcatctcgcgcgggggcaccctgggcacccctcagactggctcggagaacgacgccctgtatgagtacctgcgccagagcgtgggcaacgaggccgagatctggctgggcctcaacgacatggcggccgagggcacctgggtggacatgaccggcgcccgcatcgcctacaagaactgggagactgagatcaccgcgcaacccgatggcggcaagaccgagaactgcgcggtcctgtcaggcgcggccaacggcaagtggttcgacaagcgctgccgcgatcagctgccctacatctgccagttcgggatcgtgtagccggcggggcgggggccgtggggggcctggaggagggcaggggccgcgggaggccgggaggagggtggggaccttgcagcccccatcctctccgtgcgcttggagcctctttttgcaaataaagttggtgcagcttcgcggagagga

SEQ ID NO: 342 - DNA, 1864 bp, Homo sapiens
  source 1..1864: mol_type = genomic DNA
cagacttggcgcgggtgtctcgaagatgctcgagggcctggggtcgcccgcctcgccccgggcagctgcaagcgcctcggtcgcagggtcgtcggggccagcggcctgctcgcctccctcgtcctcggccccgaggtccccggaatccccggccccccggcggggcggtgtgcgcgccagcgtcccacagaaactggccgagatgctgagcagccagtatgggctgatcgtgttcgtggcggggctgctgctgctgctggcctgggccgtgcacgccgcgggcgtgagcaagagcgacctgctgtgcttcctgacggcgctcatgctgctgcagctgctgtggatgctgtggtacgtgggccgcagctccgcgcaccgccgcctcttccgcctcaaggacacgcacgcgggtgccggctggctgcgcggtagtatcacattgtttgcagtcattaccgtcatcctgggatgccttaaaattggatacttcattggattttcagaatgtttatcagccactgaaggagttttcccagtcacccattcagtgcatactttgttgcaggtatattttctttgggggcatgcaaaggatattatccagtctttcaaaacactggaaaggtttggagtgatccactcggtgttcaccaacctgcttctgtgggccaatggcgtcctcaatgagtcaaagcaccaactcaatgagcacaaggaacggctcatcactctgggttttgggaacataacaacagttttagatgaccacacaccgcagtgtaactgcacgcccccaactctgtgcactgccatctcccacgggatctactacctctaccccttcaacatagagtatcagatcctggcctccacaatgctctacgtcctgtggaagaacatcgggcgcaaagttgacagccatcagcaccagaagatgcagttcaagtctgatggggtcatggtgggcgcagtcctgggcctgaccgtgctggccgccaccattgctgtggtggtggtatacctgattcatattgggcgctccaagaccaagagcgagtcggcactcatcatgttctacctgtatgccatcaccctgctgatgcttatgggggctgcggggctggctggaatccggatttacaggatagacgagaagtcactggatgagtccaaaaatccggcccgcaaactggactcggacctcttggtgggcactgcctcgggctcctggcttatctcctggggctcaatcttggccatcctctgtgctgagggccacccccgctacacctggtacaacctgccctactccatcctggcgatcgtggagaagtacatccagaacctcttcatctttgaatccattcaccgagagcctgaaaaactctctgaggacatccaaacccttcgggtggtcacagtctgcaatggcaacaccatgccccttgcttcttcctgccccaagagtggaggtgtggccagagatgtggctccccagggcaaggacatgccaccagcagccaatggaaatgtgtgcatgagagaaagccatgacaaggaggaggagaagcaggaggagagcagctggggagggagcccaagcccagtccgccttccccgtttcttacagggcaacgccaagagaaaagtcctgaggaatattgcagccttcttgttcctctgcaatatttcgctttggatacctcccgcctttggctgtcgacctgagtatgacaatggattggaggagattgtctttggctttgaaccctggataattgtggtcaacctggccatgcctttttctattttctatcgaatgcacgcagctgcctccctctttgaggtctattgtaagatatag

SEQ ID NO: 343 - DNA, 4037 bp, Homo sapiens
  source 1..4037: mol_type = genomic DNA
gggagtgtgtgtatttcctcccgttctttatcagagcccccaaaataagtaggaatgggcagtggctattcacattcactacaccttttccatttgctaataaggccctgccaggctgggagggaattgtccctgcctgcttctggagaaagaagatattgacaccatctacgggcaccatggaactgcttcaagtgaccattctttttcttctgcccagtatttgcagcagtaacagcacaggtgttttagaggcagctaataattcacttgttgttactacaacaaaaccatctataacaacaccaaacacagaatcattacagaaaaatgttgtcacaccaacaactggaacaactcctaaaggaacaatcaccaatgaattacttaaaatgtctctgatgtcaacagctacttttttaacaagtaaagatgaaggattgaaagccacaaccactgatgtcaggaagaatgactccatcatttcaaacgtaacagtaacaagtgttacacttccaaatgctgtttcaacattacaaagttccaaacccaagactgaaactcagagttcaattaaaacaacagaaataccaggtagtgttctacaaccagatgcatcaccttctaaaactggtacattaacctcaataccagttacaattccagaaaacacctcacagtctcaagtaataggcactgagggtggaaaaaatgcaagcacttcagcaaccagccggtcttattccagtattattttgccggtggttattgctttgattgtaataacactttcagtatttgttctggtgggtttgtaccgaatgtgctggaaggcagatccgggcacaccagaaaatggaaatgatcaacctcagtctgataaagagagcgtgaagcttcttaccgttaagacaatttctcatgagtctggtgagcactctgcacaaggaaaaaccaagaactgacagcttgaggaattctctccacacctaggcaataattacgcttaatcttcagcttctatgcaccaagcgtggaaaaggagaaagtcctgcagaatcaatcccgacttccatacctgctgctggactgtaccagacgtctgtcccagtaaagtgatgtccagctgacatgcaataatttgatggaatcaaaaagaaccccggggctctcctgttctctcacatttaaaaattccattactccatttacaggagcgttcctaggaaaaggaattttaggaggagaatttgtgagcagtgaatctgacagcccaggaggtgggctcgctgataggcatgactttccttaatgtttaaagttttccgggccaagaatttttatccatgaagactttcctacttttctcagtgttcttatattacctactgttagtatttattgtttaccactatgttaatgcagggaaaagttgcacgtgtattattaaatattaggtagaaatcataccatgctactttgtacatataagtattttattcctgctttcgtgttacttttaataaataactactgtactcaatactctaaaaatactataacatgactgtgaaaatggcaatgttattgtcttcctataattatgaatatttttggatggattattagaatacatgaactcactaatgaaaggcatttgtaataagtcagaaagggacatacgattcacatatcagactgttagggggagagtaatttatcagttctttggtctttctatttgtcattcatactatgtgatgaagatgtaagtgcaagggcatttataacactatactgcattcattaagataataggatcatgatttttcattaactcatttgattgatattatctccatgcattttttatttcttttagaaatgtaattatttgctctagcaatcattgctaacctctagtttgtagaaaatcaacactttataaatacataattatgatattatttttcattgtatcactgttctaaaaataccatatgattatagctgccactccatcaggagcaaattcttctgttaaaagctaactgatcaaccttgaccacttttttgacatgtgagatcaaagtgtcaagttggctgaggttttttggaaagctttagaactaataagctgctggtggcagctttgtaacgtatgattatctaagctgattttgatgctaaattatcttagtgatctaaggggcagtttagtgaagatggaatcttgtatttaaaatagccttttaaaatttgttttgtggtgatgtattttgacaacttccatctttaggagttatataatcaccttgattttagtttcctgatgtttggactatttataatcaaggacaccaagcaagcataagcatatctatatttctgactggtgtctctttgagaaggatgggaagtagaaaaaaaaaaaagaaagaaaggaaaggaagagaggagagaagaaggcagggatctccactatgtatgttttcactttagaactgttgagcccatgcttaattttaatctagaagtctttaaatggtgagacagtgactggagcatgccaatcagagagcatttgtcttcagaaaaaaaaaaaatctgagtttgagactagcctggccaacatgttgaaaccccatatctactaaaaatacaaaaattagcctggtgtggtggcgcacgcctgtagtcccagctactctggagcctgaggaacgtgaatcgcttgaacccagaagacagaggttgcagtgagctgagatggcactattgcactccagcctgggtgacacagcaagactctgtctcaaaaaaaaaaaaaaaaaaaaggaaaaaaaagaaagaaagaaagtcccagcacacctagataatttaccgagctcttcagcaaaaaccatgttacatacagcatattccaaagaaatgaactcttctgcaatttaaattataagtaatatgttattttggatcctagagaaaccattttctctacatttcatgagcatggttagaaaagagtttacaagaattaggaagagggaacaattttaatggtcagaaaagaataaaatttattctagttcaagaagtgcacacaaagaatatgcattaatctaacaactatgagattaaatctttcaaaaaggtcaaaggaggattgagaagtttacagagatgtccacggcattttatatcaatctcaaaggtaaggtctgcatttttataaaccaacttaaacttctgttgagataggatattttgttttcaagccaaaattaccattaatcaaatatgttttaattatctgatttagatgatctactttttatgcctggcttactgtaagttttttattctgatacacagttcaaacatcattgcaacaaagaagtgcctgtatttagatcaaaggcaagactttctatgtgtttgttttgcataataatatgaatataatttaagtctatcaatagtcaaaacataaacaaaagctaattaactggcactgttgtcacctgagactaagtggatgttgttggctgacatacaggctcagccagcagagaaagaattctgaattccccttgctgaactgaactattctgttacatatggttgacaaatctgtgtgttatttcttttctacctaccatatttaaatttatgagtatcaaccgaggacatagtcaaaccttcgatgatgaacattcctgattttttgcctgattattctctgttgagctctacttgtggtcattcaagattttatgatgttgaaaggaaaagtgaatatgacctttaaaaattgtattttgggtgatgatagtctcaccactataaaactgtcaattattgcctaatgttaaagatatccatcattgtgattaattaaacctataatgagtattcttaatggagaattcttaatggatggattatcccctgatcttttctttaaaatttctctgcacacacaggacttctcattttccaataaatgggtgtactctgccccaatttctagggaa

SEQ ID NO: 344 - DNA, 7143 bp, Homo sapiens
  source 1..7143: mol_type = genomic DNA
agggccaggtgcgcaggggagaaacaaggcgccttggagttcaggtgactcccacacgggtcatgctgttgtctcctgatccagccggccctgccaggtgaccatgcctgctctgggcccagctcttctccaggctctctgggccgggtgggtcctcaccctccagccccttccaccaactgcattcactcccaatggcacgtatctgcagcacctggcaagggaccccacctcaggcaccctctacctgggggctaccaacttcctgttccagctgagccctgggctgcagctggaggccacagtgtccaccggccctgtgctagacagcagggactgcctgccacctgtgatgcctgatgagtgcccccaggcccagcctaccaacaacccgaatcagctgctcctggtgagcccaggggccctggtggtatgcgggagcgtgcaccagggggtctgtgaacagcggcgcctggggcagctcgagcagctgctgctgcggccagagcggcctggggacacacaatatgtggctgccaatgatcctgcggtcagcacggtggggctggtagcccagggcttggcaggggagcccctcctgtttgtggggcgaggatacaccagcaggggtgtggggggtggcattccacccatcacaacccgggccctgtggccgcccgacccccaagctgccttctcctatgaggagacagccaagctggcagtgggccgcctctccgagtacagccaccacttcgtgagtgcctttgcacgtggggccagcgcctacttcctgttcctgcggcgggacctgcaggctcagtctagagcttttcgtgcctatgtatctcgagtgtgtctccgggaccagcactactactcctatgtggagttgcctctggcctgcgaaggtggccgctacgggctgatccaggctgcagctgtggccacgtccagggaggtggcgcatggggaggtgctctttgcagctttctcctcggctgcaccccccactgtgggccggcccccatcggcggctgctggggcatctggagcctctgccctctgtgccttccccctggatgaggtggaccggcttgctaatcgcacgcgagatgcctgctacacccgggagggtcgtgctgaggatgggaccgaggtggcctacatcgagtatgatgtcaattctgactgtgcacagctgccagtggacaccctggatgcttatccctgtggctcagaccacacgcccagccccatggccagccgggtcccgctggaagccacaccaattctggagtggccagggattcagctaacagctgtggcagtcaccatggaagatggacacaccatcgctttcctgggtgatagtcaagggcagctgcacagggtctacttgggcccagggagcgatggccacccatactccacacagagcatccagcaggggtctgcagtgagcagagacctcacctttgatgggacctttgagcacctgtatgtcatgacccagagcacacttctgaaggttcctgtggcttcctgtgctcagcacctggactgtgcatcttgccttgctcacagggacccatactgtgggtggtgcgtgctccttggcaggtgcagtcgccgttctgagtgctcgaggggccagggcccagagcagtggctatggagcttccagcctgagctgggctgtctgcaagtggcagccatgagtcctgccaacatcagccgagaggagacgagggaggttttcctatcagtgccagacctgccacccctgtggccaggggagtcatattcctgccactttggggaacatcagagtcctgccctgctgactggttctggtgtgatgtgcccctccccagaccctagtgaggccccagtgctgccgagaggagccgactacgtatccgtgagcgtggagctcagatttggcgctgttgtgatcgccaaaacttccctctctttctatgactgtgtggcggtcactgaactccgcccatctgcgcagtgccaggcctgtgtgagcagccgctgggggtgtaactggtgtgtctggcagcacctgtgcacccacaaggcctcgtgtgatgctgggcccatggttgcaagccatcagagcccgcttgtctccccagaccctcctgcaagaggtggacccagcccctccccacccacagcccccaaagccctggccacccctgctcctgacacccttcccgtggagcctggggctccctccacagccacagcttcggacatctcacctggggctagtccttccctgctcagcccctgggggccatgggcaggttctggctccatatcttcccctggctccacagggtcgcctctccatgaggagccctcccctcccagcccccaaaatggacctggaaccgctgtccctgcccccactgacttcagaccctcagccacacctgaggacctcttggcctccccgctgtcaccgtcagaggtagcagcagtgccccctgcagaccctggccccgaggctcttcatcccacagtgcccctggacctgccccctgccactgttcctgccaccactttcccaggggccatgggctccgtgaagcccgccctggactggctcacgagagaaggcggcgagctgcccgaggcggacgagtggacggggggtgacgcacccgccttctccacttccaccctcctctcaggtgatggagactcagcagagcttgagggccctcccgcccccctcatcctcccgtccagcctcgactaccagtatgacacccccgggctctgggagctggaagaggcgaccttgggggcaagctcctgcccctgtgtggagagcgttcagggctccacgttgatgccggtccatgtggagcgggaaatccggctgctaggcaggaacctgcaccttttccaggatggcccaggagacaatgagtgtgtgatggagctggagggcctcgaggtggtggttgaggcccgggtcgagtgtgagccacctccagatacccagtgccatgtcacctgccagcagcaccagctcagctatgaggctctgcagccggagctccgtgtggggctgtttctgcgtcgggccggccgtctgcgtgtggacagtgctgaggggctgcatgtggtactgtatgactgttccgtgggacatggagactgcagccgctgccaaactgccatgccccagtatggctgtgtgtggtgtgagggggagcgtccacgttgtgtgacccgggaggcctgtggtgaggctgaggctgtggccacccagtgcccagcgcccctcatccactcggtggagccactgactgggcctgtagacggaggcacccgtgtcaccatcaggggctccaacctgggccagcatgtgcaggatgtgctgggcatggtcacggtggctggagtgccctgtgctgtggatgcccaggagtacgaggtctccagcagcctcgtgtgcatcaccggggccagtggggaggaggtggccggcgccacagcggtggaggtgccgggaagaggacgtggtgtctcagaacacgactttgcctaccaggatccgaaggtccattccatcttcccggcccgcggccccagagctgggggcacccgtctcaccctgaatggctccaagctcctgactgggcggctggaggacatccgagtggtggttggagaccagccttgtcacttgctgccggagcagcagtcagaacaactgcggtgtgagaccagcccacgccccacgcctgccacgctccctgtggctgtgtggtttggggccacggagcggaggcttcaacgcggacagttcaagtataccttggaccccaacatcacctctgctggccccaccaagagcttcctcagtggaggacgtgagatatgcgtccgtggccagaatctggacgtggtacagacgccaagaatccgggtgaccgtggtctcgagaatgctgcagcccagccaggggcttggacggaggcgtcgcgtggtcccggagacggcatgttcccttggaccctcctgcagtagccagcaatttgaggagccgtgccatgtcaactcctcccagctcatcacgtgccgcacacctgccctcccaggcctgcctgaggacccctgggtccgggtggaatttatccttgacaacctggtctttgactttgcaacactgaaccccacacctttctcctatgaggccgaccccaccctgcagccactcaaccctgaggaccccaccatgccattccggcacaagcctgggagtgtgttctccgtggagggggagaacctggaccttgcaatgtccaaggaggaggtggtggctatgataggggatggcccctgtgtggtgaagacgctgacgcggcaccacctgtactgcgagccccccgtggagcagcccctgccacggcaccatgccctccgagaggcacctgactctttgcctgagttcacggtgcagatggggaacttgcgcttctccctgggtcacgtgcagtatgacggcgagagccctggggcttttcctgtggcagcccaggtgggcttgggggtgggcacctctcttctggctctgggtgtcatcatcattgtcctcatgtacaggaggaagagcaagcaggccctgagggactataagaaggttcagatccagctggagaatctggagagcagtgtgcgggaccgctgcaagaaggaattcacagacctcatgactgagatgaccgatctcaccagtgacctcctgggcagcggcatccccttcctcgactacaaggtgtatgcggagaggatcttcttccctgggcaccgcgagtcgcccttgcaccgggacctgggtgtgcctgagagcagacggcccactgtggagcaagggctggggcagctctctaacctgctcaacagcaagctcttcctcaccaagttcatccacacgctggagagccagcgcaccttttcagctcgggaccgtgcctacgtggcatctctgctcaccgtggcactgcatgggaagcttgagtatttcactgacatcctccgcactctgctcagtgacctggttgcccagtatgtggccaagaaccccaagctgatgctgcgcaggacagagactgtggtggagaagctgctcaccaactggatgtccatctgtctgtataccttcgtgagggactccgtaggggagcctctgtacatgctctttcgagggattaagcaccaagtggataaggggccagtggacagtgtgacaggcaaggccaaatacaccttgaacgacaaccgcctgctcagagaggatgtggagtaccgtcccctgaccttgaatgcactattggctgtggggcctggggcaggagaggcccagggcgtgcccgtgaaggtcctagactgtgacaccatctcccaggcaaaggagaagatgctggaccagctttataaaggagtgcctctcacccagcggccagaccctcgcacccttgatgttgagtggcggtctggggtggccgggcacctcattctttctgacgaggatgtcacttctgaggtccagggtctgtggaggcgcctgaacacactgcagcattacaaggtcccagatggagcaactgtggccctcgtcccctgcctcaccaagcatgtgctccgggaaaaccaggattatgtccctggagagcggaccccaatgctggaggatgtagatgaggggggcatccggccctggcacctggtgaagccaagtgatgagccggagccgcccaggcctcggaggggcagccttcggggcggggagcgtgagcgcgccaaggccatccctgagatctacctgacccgcctgctgtccatgaagggcaccctgcagaagttcgtggatgacctgttccaggtgattctcagcaccagccgccccgtgccgctcgctgtgaagtacttctttgacctgctggatgagcaggcccagcagcatggcatctccgaccaggacaccatccacatctggaagaccaacagcttgcctctgaggttctggatcaatataataaaaaacccgcagtttgtgttcgacgtgcaaacatctgataacatggatgcggtgctccttgtcattgcacagaccttcatggacgcctgcaccctggccgaccacaagctgggccgggactccccgatcaacaaacttctgtatgcacgggacattccccggtacaagcggatggtggaaaggtactatgcagacatcagacagactgtcccagccagcgaccaagagatgaactctgtcctggctgaactgtcctggaactactccggagacctcggggcgcgagtggccctgcatgaactctacaagtacatcaacaagtactatgaccagatcatcactgccctggaggaggatggcacggcccagaagatgcagctgggctatcggctccagcagattgcagctgctgtggaaaacaaggtcacagatctataggaacccaggagccacggcctgctgttgcttcagcctggcctgggcagccctggaagctcggaggagaggccaccttcttaggtgcctgtagtgactgacaagcagagttagtggaaggtgactcccagtctcctggtggctctggcctcggccctgctggatccacctcctagacccggggcctcaaggctcatggggtagtacccagcctgctccccgagtccagcgaccctgtgacaccggtctgcagggagttggggactaagggcttccagagagtggctggaagagactccaggcccctggggagactgtactgttcctgaacactggccttggccacactgggattcggagaggaaggaggagagccccatgcttcctgtctgcctcctccaccatccctgacctcagttgagctgcctctggccttgttgctgctgccacatcctaggtctaagagttgaacgcctctcctaggccactacaaactgacccctcagcagggctggctgccacagggctgccctgcctcataggtagccatggtgagggctatctgctgcaggggggtcttggggagagtggtgactccattgacccagcttttcattaaaggataacacactgca

SEQ ID NO: 345 - DNA, 973 bp, Homo sapiens
  source 1..973: mol_type = genomic DNA
ctttcctcttctctctctctctctctctcacacacagacacacaaacacacacacacacacacacacacacttttcttaagggaaaaatcactctgtgttcttttaaaatccctcaggttttatgttttattgctaccagagtctgcctccctgaggttcttgtatagactagttatttccctctgtaaagaagctgttctattcgttctcgcctggtttggaacaaactgaacacttccaaaggaggcagtccttgcagccttgtctccttccactcccctcctccccacagtcctggctggagcagcgagtctgtcgatcccaggccagagacaaggcagacaaaggttcatttgtaaagaagctccttccagcacctcctctcttctccttttgcccaaactcacccagtgagtgtgagcatttaagaagcatcctctgccaagaccaaaaggaaagaagaaaaagggccaaaagccaaaatgaaactgatggtacttgttttcaccattgggctaactttgctgctaggagttcaagccatgcctgcaaatcgcctctcttgctacagaaagatactaaaagatcacaactgtcacaaccttccggaaggagtagctgacctgacacagattgatgtcaatgtccaggatcatttctgggatgggaagggatgtgagatgatctgttactgcaacttcagcgaattgctctgctgcccaaaagacgttttctttggaccaaagatctctttcgtgattccttgcaacaatcaatgagaatcttcatgtattctggagaacaccattcctgatttcccacaaactgcactacatcagtataactgcatttctagtttctatatagtgcaatagagcatagattctataaattcttacttgtctaagacaagtaaatctgtgttaaacaagtagtaataaaagttaattcaatctaatttttctctgtgga

SEQ ID NO: 346 - DNA, 4727 bp, Homo sapiens
  source 1..4727: mol_type = genomic DNA
agaagccccgcagccgccgcgcggagaacagcgacagccgagcgcccggtccgcctgtctgccggtgggtctgcctgcccgcgcagcagacccggggcggccgcgggagcccgcgccccgcccgccgcgcctctgccgggacccacccgcagcggagggctgagcccgccggcggctccccggagctcacccacctccgcgcgccggagcgcaggcaaaaggggaggaaaggctcctctctttagtcaccactctcgccctctccaagaatttgtttaacaaagcgctgaggaaagagaacgtcttcttgaattctttagtaggggcggagtctgctgctgccctgcgctgccacctcggctacactgccctccgcgacgacccctgaccagccggggtcacgtccgggagacgggatcatgaagcgctcggtagccgtctggctcttggtcgggctcagcctcggtgtcccccagttcggcaaaggtgatatttgtgatcccaatccatgtgaaaatggaggtatctgtttgccaggattggctgatggttccttttcctgtgagtgtccagatggcttcacagaccccaactgttctagtgttgtggaggttgcatcagatgaagaagaaccaacttcagcaggtccctgcactcctaatccatgccataatggaggaacctgtgaaataagtgaagcataccgaggggatacattcataggctatgtttgtaaatgtccccgaggatttaatgggattcactgtcagcacaacataaatgaatgcgaagttgagccttgcaaaaatggtggaatatgtacagatcttgttgctaactattcctgtgagtgcccaggcgaatttatgggaagaaattgtcaatacaaatgctcaggcccactgggaattgaaggtggaattatatcaaaccagcaaatcacagcttcctctactcaccgagctctttttggactccaaaaatggtatccctactatgcacgtcttaataagaaggggcttataaatgcgtggacagctgcagaaaatgacagatggccgtggattcagataaatttgcaaaggaaaatgagagttactggtgtgattacccaaggagccaagaggattggaagcccagagtatataaaatcctacaaaattgcctacagtaatgatggaaagacttgggcaatgtacaaagtgaaaggcaccaatgaagacatggtgtttcgtggaaacattgataacaacactccatatgctaactctttcacaccccccataaaagctcagtatgtaagactctatccccaagtttgtcgaagacattgcactttgcgaatggaacttcttggctgtgaactgtcgggttgttctgagcctctgggtatgaaatcaggacatatacaagactatcagatcactgcctccagcatcttcagaacgctcaacatggacatgttcacttgggaaccaaggaaagctcggctggacaagcaaggcaaagtgaatgcctggacctctggccacaatgaccagtcacaatggttacaggtggatcttcttgttccaaccaaagtgactggcatcattacacaaggagctaaagattttggtcatgtacagtttgttggctcctacaaactggcttacagcaatgatggagaacactggactgtataccaggatgaaaagcaaagaaaagataaggttttccagggaaattttgacaatgacactcacagaaaaaatgtcatcgaccctcccatctatgcacgacacataagaatccttccttggtcctggtacgggaggatcacattgcggtcagagctgctgggctgcacagaggaggaatgaggggaggctacatttcacaaccctcttccctatttccctaaaagtatctccatggaatgaactgtgcaaaatctgtaggaaactgaatggtttttttttttttttcatgaaaaagtgctcaaattatggtaggcaactaacggtgtttttaagggggtctaagcctgccttttcaatgatttaatttgattttattttatccgtcaaatctcttaagtaacaacacattaagtgtgaattacttttctctcattgtttcctgaattattcgcattggtagaaatatattagggaaagaaagtagccttctttttatagcaagagtaaaaaagtctcaaagtcatcaaataagagcaagagttgatagagcttttacaatcaatactcacctaattctgataaaaggaatactgcaatgttagcaataagtttttttcttctgtaatgactctacgttatcctgtttccctgtgcctaccaaacactgtcaatgtttattacaaaattttaaagaagaatatgtaacatgcagtactgatattataattctcattttactttcattatttctaataagagattatgtgacttctttttcttttagttctattctacattcttaatattgtatattacctgaataattcaatttttttctaattgaatttcctattagttgactaaaagaagtgtcatgtttactcatatatgtagaacatgactgcctatcagtagattgatctgtatttaatattcgttaattaaatctgcagttttatttttgaaggaagccataactatttaatttccaaataattgcttcataaagaatcccatactctcagtttgcacaaaagaacaaaaaatatatatgtctctttaaatttaaatcttcatttagatggtaattacatatccttatatttactttaaaaaatcggcttatttgtttattttataaaaaatttagcaaagaaatattaatatagtgctgcatagtttggccaagcatactcatcatttctttgttcagctccacatttcctgtgaaactaacatcttattgagatttgaaactggtggtagtttcccaggaaggcacaggtggagttatttgtgagaagcaaagtgtttactaatgacaaagtagtaaaccattttcaagatgaaaactgatttctatttattttgcttcaaaggtcctgaaaaaataagcaattatcataacaatttgttattgatactggaggtttcattgacatgtctctcaaattaaagctcacactgcctccataaaagtcttcaacatctaatttataagctttacaagtatttattttataaggcttagacagaattattggagttttaaattaagtgtattggaaaagaaaggatggtatgtgtatgaaatgttaagatcctacgcaacactgctatttttttcctttaatatttgtgctgcataacaaaagccactagactgttactgtcttgtctgtccatgtgttaacagcatttcttaatgatgtatatatggagtggtcttcaatcatagtgaagaatttaaagagaaagtcaattgtattggcatttttaataagaacaaaattagttcgtctaaggggactggctggccacatatttgttccttgcccatatgctttctacttcttgttcttattatgaaattatgaatttgaagcctctgaaatggtgatcagttttcaacatctttcaaaaacaaaattactatttcctccatattgccttttttagataactttaaagttaggattttaaaatatttgtaactggctaaattttaaagtcgtgacaaataattacttaggttcagaaatatacacacacttactctttagccagtttctttcaaggtttactgtcccatcagatatctagccattttcctttgcaaattacataccttcttaagagtgtatttttaagattattacttacgctttatgatgatatagtttttcaaaattatttatagcttcatatgatgttttgtaattttttctattgatacctgttttaaaaatattttccaaggaagttgattaaaattatatttgttaccttttagaaaaagcattgaaatgagtttctcttgctttttcattttccctctgctttatatgctcttcgcaatacatcatgtccaacgggatacctattgttctcatgacacccaaaattgatgagagcaaaggggtcgcaccatatggaaatgttgaaaactattgtaaagtagtattatgaagtagcttttgtgtcattcatgtcgatgacatgaaagtgaagtaaatttattctatgtaaattcacactaaaaccagtacagtaccataagtagaatacatgtaagaatcacctagtcttcactatattgagtaaatataacatgctaattttacaattaatgaaactaaacttttaaacatctccattatatctacatccttttgaaggtatttatcatagttgccaattttaattttaggattgactttctctttctgaatgacttcataaagtttggtgtgaattttgaagacttgggttactaatgattgtatctttgctagtcaacaacttatgaaatatactcaatgcgtctgatgtgtcattaagtgcagaaataactaagacacaaataacctttgcaaaccttcaagctgtgtaatattccaatgttgtttttttctttgtatatatacttatatcacgtaggatgtaaaaccagtatgaccttgtctagtctccaaacttaaaataaacttttgaaaagctgggattcttttgaagcagttgtaattaaacacatttataagaata

SEQ ID NO: 347 - DNA, 3936 bp, Homo sapiens
  source 1..3936: mol_type = genomic DNA
aaattctgcaagtgaacttgactcaggaaggccagcggctcaaggtccagcccctggaagagagaatagctacagattctccatcctcagtctttgcaaggcgacagctgtgccagccgggctctggcaggctcctggcagcatggcagtgaagcttgggaccctcctgctggcccttgccctgggcctggcccagccagcctctgcccgccggaagctgctggtgtttctgctggatggttttcgctcagactacatcagtgatgaggcgctggagtcattgcctggtttcaaagagattgtgagcaggggagtaaaagtggattacttgactccagacttccctagtctctcgtatcccaattattataccctaatgactggccgccattgtgaagtccatcagatgatcgggaactacatgtgggaccccaccaccaacaagtcctttgacattggcgtcaacaaagacagcctaatgcctctctggtggaatggatcagaacctctgtgggtcactctgaccaaggccaaaaggaaggtctacatgtactactggccaggctgtgaggttgagattctgggtgtcagacccacctactgcctagaatataaaaatgtcccaacggatatcaattttgccaatgcagtcagcgatgctcttgactccttcaagagtggccgggccgacctggcagccatataccatgagcgcattgacgtggaaggccaccactacgggcctgcatctccgcagaggaaagatgccctcaaggctgtagacactgtcctgaagtacatgaccaagtggatccaggagcggggcctgcaggaccgcctgaacgtcattattttctcggatcacggaatgaccgacattttctggatggacaaagtgattgagctgaataagtacatcagcctgaatgacctgcagcaagtgaaggaccgcgggcctgttgtgagcctttggccggcccctgggaaacactctgagatatataacaaactgagcacagtggaacacatgactgtctacgagaaagaagccatcccaagcaggttctattacaagaaaggaaagtttgtctctcctttgactttagtggctgatgaaggctggttcataactgagaatcgagagatgcttccgttttggatgaacagcaccggcaggcgggaaggttggcagcgtggatggcacggctacgacaacgagctcatggacatgcggggcatcttcctggccttcggacctgatttcaaatccaacttcagagctgctcctatcaggtcggtggacgtctacaatgtcatgtgcaatgtggtgggcatcaccccgctgcccaacaacggatcctggtccagggtgatgtgcatgctgaagggccgcgccagcactgccccgcctgtctggcccagccactgtgccctggcactgattcttctcttcctgcttgcataactgatcatattgcttgtctcagaaaaaaacaccatcagcaaagtgggcctccaaagccagatgattttcattttatgtgtgaataatagcttcattaacacaatcaagaccatgcacattgtaaatacattattcttggataattctatacataaaagttcctacttgttaaaaaagatacaaaccttgtttttccagaaggtaggaaaatcctagctttccatttgtgcagttatatgtcattttctcctttcttttcacgttactcaggatgaactctctgagcagggacctgctcctgcagcaaccaaacttggagtggttattgcagacagacgtggctctgggcccctctctgtcccaccttgcacaaaggaccccctcagaccaggcccttgtctgtgccctgtccacacccaggagccatcctcagtgtctgtggccacaatcctgtactgttccttccatccctgataaaaggaggtctacatgaaagcaaaagctactgtctatttctgacccagctcatggaattttttcatcttatactgagctccagaaaggacgtaacttagcatggatcaccaatcaatcaaaaaataaataaatcactaaggattggagaactcatagaacaaggtgaaagacatgagtgccctcccaaagtctgagtgcacgaaaatttctctcttgccttgaggagcagaaaagcttctgatggacatgggcttctgtgagacttatcacacatagtgtatcgtggcatgaagcccggcacatagcaggccctgcatattgatggacaaatggatggcctgcctgccttccctgtccgttcacctgtgcaaaggcttcctcagacatgccactctgtggctcccaatatagggtgcagacaagagcaatccctgacatgacattatagcctgggaaagggctggctcactgatgagaatgtggaggcatcagcaaggatctcggtgggttgctcagagaggtgatgcactaagccttaatcctggacaccagtacccctgcagcatggcttgctcaacaacagtctttgagtggcatagaattccaaagaaaatggtgctgggtggagaatggagagagcatgatggagcagagtcccagtcactgaccaactaactggtcgtttgattaggaaacagtttggccaaagtaccacctttgagacctaagttcttttgatacctttgagaagagccactgagcctgagttgaaatatttttagcttagtcatctgtgtttgctataggagaaattgtaacacaagaaataactcctttttacatgatcatttatatctatatacatatatatacttgcatacactatcactgcattaaaaaatgagtttgggctgggcatggtggctcacacctataatcccaacactttcggaggccaaggagggacaaacgaacccttgaggccaggagttccagactaacttgggcaacacagggcgacccccatctctacaaaacataaaagatttttaaaaaattagccaggcatggtggcacatgcctgtggtctcagctacttgggaggctgaggcaggagaatcatttgagcccaggaggtcaaggctgcagtgagctttgatcacaccactgcactccagcctgggcaacagagcaagaccccatcctccaccccccccaaaaaatagaaagaaaaaaaaagtttgcactaattgaggtacatctgcaagtgagactttttgtcaggaaaaggcaatatatcaggtctcctcaggacgatggaggccttatatggtgtgttaccttgaaaactgaatatcaacgttcaccttgattcaggaaagctgggtgctgtctccatgccatgaatcatgagagcaaaggatcactgcttaaaaatactgaatttaccttcacaaaagatttctaaagatttatgtaatgtgttttaaaagcgccagtaaaccatcggatcaattggaaagaaggcaactcttcagcctttgttatctagctgaaaacaaatgacaactttcaaaacattggcagtagttgttgaaaaagacgtctattgttcaaagtttctttctccttaaaggacggtgttccaatgaattcagtagagcccactttcctccactgtggaggaagaatccctaagagatactcaaatgattaaattaaaattggatcatcaaactcaagagaggcataaacttagacacagtcttgcatttttgtctttcctgaactcttctgccattttcctccttcactcgtcctgaaaatctgcaagttacataataaaactttagatatttgtctgacaaagtgtaattactcaactgaataaatgactgagaacaagttacaaaaggaatcatgaatcctggtaaacaataaagaagattcagacactgagggaaaaaaataaagctttttacttaaataatgca

SEQ ID NO: 348 - DNA, 915 bp, Homo sapiens
  source 1..915: mol_type = genomic DNA
agacggttgacccgggccctcctccacacccccttccttcttcgcctcctccctctttcctgcacgggggctcgggctcactataaaaggtgggagcgcgtggtgccccagcaacgacgagtttcagaacgatggagagctcccgcgtgaggctgctgcccctcctgggcgccgccctgctgctgatgctacctctgttgggtacccgtgcccaggaggacgccgagctccagccccgagccctggacatctactctgccgtggatgatgcctcccacgagaaggagctgatcgaagcgctgcaagaagtcttgaagaagctcaagagtaaacgtgttcccatctatgagaagaagtatggccaagtccccatgtgtgacgccggtgagcagtgtgcagtgaggaaaggggcaaggatcgggaagctgtgtgactgtccccgaggaacctcctgcaattccttcctcctgaagtgcttatgaaggggcgtccattctcctccatacatccccatccctctactttccccagaggaccacaccttcctccctggagtttggcttaagcaacagataaagtttttattttcctctgaagggaaagggctcttttcctgctgtttcaaaaataaaagaacacattagatgttactgtgtgaagaataatgccttgtatggtgttgatacgtgtgtgaagtattcttattttatttgtctgacaaactcttgtgtacctttgtgtaaagaagggaagctttgtttgaaaattgtatttttgtatgtggcatggcagaatgaaaattagatctagctaatctcggtagatgtcattacaacctggaaaataaatcaccctaagtgacacaaattgaagcatgtacaaattatacataataaagtgtttttaataattgcc

SEQ ID NO: 349 - DNA, 2020 bp, Homo sapiens
  source 1..2020: mol_type = genomic DNA
gaaaagagaggaaagctaaataaccaagtaaatctgtatctaattaacaaattggctaaataaggtgttatcagctgcttgatatagagctgataaaatcttcagctaggcatacttgaggcctgattacagaagtgaccgtagtccacccacacacctgaaatttatttaagagaccaagctaggctcttcctggcctttaggaagaggactggcatggagaaatatgttcctcactagttctcccaagccatggcacgtcccaacaaattcctcctttggttttgctgctttgcctggctgtgttttcctattagccttggttctcaggcttctgggggagaagctcagattgctgctagtgctgagttggaatctggggctatgccttggtccttgctgcagcatatagatgagagagacagagctggcctccttcccgcgcttttcaaagttctatctgttgggcgaggtgggtcacctaggctgcagccagactccagagctttgcactacatgaagaagctctataagacatatgctaccaaggaagggattcctaaatccaatagaagtcacctctacaacactgttcggctcttcaccccctgtacccggcacaagcaggctcctggagaccaggtaacaggaatccttccatcagtggaactgctatttaacctggatcgcattactaccgttgaacacttactcaagtcagtcttgctgtacaatatcaacaactcagtttctttttcctctgctgtcaaatgtgtgtgcaatctaatgataaaggagccaaagtcttctagcaggactctcggcagagctccatactcatttacctttaactcacagtttgaatttggaaagaaacacaaatggattcagattgatgtgaccagcctccttcaacctttagtggcctccaacaagagaagtattcacatgtctataaattttacttgcatgaaagaccagctggagcatccttcagcacagaatggtttgtttaacatgactctggtgtccccctcactgatcttatatttgaatgacacaagtgctcaggcttatcacagctggtattcccttcactataaaaggaggccttcccagggtcctgaccaggagagaagtctgtctgcctatcctgtgggagaagaggctgctgaggatgggagatcttcccatcaccgtcaccgcagaggtcaggaaactgtcagttctgaattgaagaagcccttgggcccagcttccttcaatctgagtgaatacttcagacaatttcttcttccccaaaatgagtgtgagctccatgactttagacttagctttagtcagctgaagtgggacaactggattgtggctccgcacaggtacaaccctcgatactgtaaaggggactgtccaagggcagttggacatcggtatggctctccagttcacaccatggtacagaacatcatctatgagaagctggactcctcagtgccaagaccgtcatgtgtacctgccaaatacagccccttgagtgttttgaccattgagcccgatggctcaattgcctataaagagtacgaagatatgatagctacaaagtgcacctgtcgttaacaaatggtcctcttaaaaccttgagcctatttggcaaagtaactactgtgtgcctatgtgtgccttcaagagaaagcttcatatattaagtctctaaatgtagcatatgttatataaagaggagcctgtgtaggttagtaccttctatggcatctatcaggataaagggataacatcaattgttgctacagagcctttttttatttccaaatttaaatgaaatataattattgtggagaactttacatttttttccttgagtgattttttttcttttcataggagtcttattcttgatagggaaaaaaccttaattagcatcaatcctggatggacttgcagctataaataggcaattcagattgctgtagtcttaatagaagaataaatttctgtcaatggc

SEQ ID NO: 350 - DNA, 2207 bp, Homo sapiens
  source 1..2207: mol_type = genomic DNA
aggactagaatcaggacagtcagatctgtggtcacatcctgcccaattccagctctgaggtccatcaaaccatctgcttctcccttggcaagaagctccctctgtctgactggcagcagggtcagtggccatccttttctaccttcagctgttgtgcatctcctccacgttttcctggagtaaaggaacaagcaggttcttatccaaatacccaacctgtgaagatgagacggcccttgggaagaggtattagccaagttttcagtatgatgcccggcagaaagaatttgttgtctttgtcttaagcttattatcctcccaggtcataggaagatctaaagtccaatcagtctccttactcagaattcacagctttcccctcaaacttaaaatgcccatgtcatttcacgagtacccataactacccatcgtttagatacatgtcctcccttggtctagaaatctgcagcagttcctacttaaactgatggatgctttgggctttggaggtatctcatccctatgcctgttgccctgaagctgccggaaggaaaggccccactcaactactgggaagaaagcccataattcaaggcttttaatacagtcactacacaagctctccctctgatttaggagatcttgttacctcctcatctacatgtgcttaaaaacaaaaagaaacctataattattcaattcacctgtggtccaaataagtctcacatccagccattcccctgagagggcaggaggccagactttgaactttccacagctgggtcttcattttactagtgagataaagaggtgcagattagggtgacagtccatctaagcaagtggacgatctggggaactgtaggccttgctgaagcatcctcccacagaaaggagataagggccttatccaattggctgtacacaatagatcagtgcttctttcctagacaaggctgaaaggggccaacattatttctgaagacttcattattggaattctatgggagtgatctcactgagctattttggaatagaaatgtggctagttgcctgacctccctcaatggtttcacgtggctttcaaagggaaggaagggcagtgctgacttttggtaaaatgggcgaaagggtccatgccagcaacacaatcactcaaagtccagatgagggatcagtaaatacaacgtgcctgaaaggtggcccttgagcacattcctccggtagacattaacttattaaattgattctgattacaaatataaactttgcccccatctcacccagtaacaatgcaagagttgatgtcagtctataaaaggaagtaggaactgtccctggctttcaggctccaacatcctccccctgtcaagatgtggcacctcaaactttgtgcagtcctcatgatcttcctgttgctgttgggccagatagatggctccccaataccagaagtgagttcggcaaagagaaggccacggagaatgaccccattttggagaggggtttccctcaggcctattggagcctcctgccgggatgattctgagtgtatcacaaggctatgcagaaaaagacgctgttccttaagtgtggcccaggaatgatgtacataccagggaaagaaaggacagcagtcacctccgacaatgctccgttctatggaatattgattaactgcattttggctggagacacccaagtgaagcaatcttgtatttttaatatttaaaggcagatgtacgctttaaattggtctccatttcttcttagaatgttgatatatggataagcataactaaacttgtcaatttagagtttatttttctatggatactattaaatgtctcaaattgaaattttagcagtctggaattcaagcttttgagggaaagaaggattcattttgtatactaaagaaaaaaacagcattgcccaataatgtgttaacttctcaatctggaaagtgtagtgagagctacataatcaatagctacgtaatcaacttcagcaagttcctaagctgtggccctggatcccttcactccatactcttcagggaggtgtcaaaggtggtcaagcttgggaggctgaggcaggagaatcacttgaacctgggaggtggaggttgcagtgagccaagatcatgccactgcaccccagcctgggtgacatagagagactctgtctcaaaaaaaaaaaaaaaa

SEQ ID NO: 351 - DNA, 2520 bp, Homo sapiens
  source 1..2520: mol_type = genomic DNA
agcatagctcctaggatgcgagggccatttgtctccggccgggggtcagatcctcgggaagccgagccatcccatccagccgcttgccccaaaccgggcgcaggccgtggtcacttctctaggaagctccgaagatcccgccactccgtccctcaaaggtgcggaaagccggcttcccccagccctcggagaagattcctgactctccgctcggtcggggcatctgagggcaggagctgcgccaggcgtaccggatagaccagtggacaacacccacgccggaccgcctgtcccctacccggacccagactcggcgccgcacattgccccgggggggcccggcgcagtcacgcgcgcgcagagctcacgctctccgccccgcacacctgcgctccgccccctggtcctgggcccgcgacgggtgaaggcatttgggaagccagggcggctgcggaggcgatctccctgacccagggccggagttgcccggagcctgccaccgctctcagccagcccgcatccttctctgttcttccctccccccgcctgccacggcgcgggtatccgcagccacagcccggggccggtgaggcggcgaagggggaggggaggaatcaagggatgagcgccggaagggcgtcgggggccctgagccgcactaggacgcccctggagccggaaccccagcagaagccggaaccagaaccaaatcaccggtaccgggtcggccaggtggtcagggtgggagaaaccaaaaagggagaggggtgcgggagtactgagaggaaggggctgcagaggcctggctcaggccggcgtggaggaggtgcgggcgctgactcaggcaggatttctgctcccgccgcctaagaatgccgtcccatctcgtgctgcagtgtccttgggagggacagaagcgcgaacaagctggaaaggggaacgctcggggcgtcggggaagcgggaccagggtcgtggtagagagcttgcgttgccgctgacctcttgccgaaaggcgaaacagcactcctggcccggacagctccctggttgggtagggggtggggccggacctcagccggacgtcttagacgtgcttgtttcagatcctgaggacggcattcctacccctcccccattcccagctgcagccccctaaacccaggaggcgccctggcccgcgctcgccccccagggcctcatgtcggaaccacagcctgacctggaaccgccccaacatgggctatatatgctcttcctgcttgtgctggtcttcttcctcatgggcctggtaggcttcatgatctgccacgtgctcaagaagaagggctaccgctgccgcacgtcgaggggctctgagcctgacgatgcccagcttcagccccctgaggacgatgacatgaatgaggacacagtagagaggattgttcgctgcatcatccagaatgaagccaatgctgaggccttgaaggagatgctgggggacagtgaaggagaagggacagtgcagctgtccagtgtggatgccacctccagcctgcaggacggagccccctcccatcatcacacagtgcacctgggctctgcagccccttgcctccattgcagccgcagcaagaggcctccacttgtccgtcagggacgctccaaggaaggaaaaagccgcccccggacaggggagaccactgtgttctctgtgggcaggttccgggtgacacacattgagaagcgctatggactgcacgaacaccgtgatggctcccccacagacaggagctggggctctggtgggggacaggacccagggggtggtcaggggtctgggggagggcagcccaaggcagggatgcctgccatggagaggctgccccctgagaggccacagccccaggtcctagccagccccccagtacagaatggaggactcagggacagcagcctaacccctcgtgcacttgaagggaaccccagagcttctgcagagccaacactgagggccggagggaggggcccaagcccagggctgcccactcaagaggcaaatgggcagccaagcaaaccagacacttctgatcaccaggtgtctctaccacagggagcagggagtatgtgagtctccttcattgtgctgatggactaccagctggcagggccagggggtgggtgggcgtgaaagccctcccctccactggacagcactgccccccagctgagggaccagctctacttccacctggagttgcacagtctcaggctgggggcctcaggagaggtcacagcccctcagtctcttctccttcccctgcctgcaacaggctgcctgccccgccttccccaacacctcgctccatatgatagagcgtggcagctgggagcaggcccctgcccgtggtgggcccctaaagcaatagcaccgtaggccccctgccctcttagcacaagaggcccaggccctggcctggccttcgtgccctttattcattgtcaataaatccgctcagaccattacagctgcttcgca

SEQ ID NO: 352 - DNA, 3801 bp, Homo sapiens
  source 1..3801: mol_type = genomic DNA
gggcagccccgccacccgcccgggcctcgacgggcgcgccgccagggctggggaggggcggcgcggagggcgggggccgggcgcagggcagggcccggctgtgcctcgccggccgctcgggcagctcccgggccgcggccagccgaggatcagagcgcttgccccgggggtctgtcgcgtcgcaggcgccgccggagccctggccatgaggaccctgtggatggcgctgtgcgcgctgtcgcggctgtggcccggggcccaggccggctgcgccgaggccgggcgctgctgtcccggccgggaccccgcctgcttcgcccgcggctggaggctggacagggtctacgggacgtgtttctgcgaccaagcctgtcgcttcaccggggactgctgcttcgactacgacagggcgtgcccagctcgcccgtgcttcgtgggggaatggagcccctggagtggttgtgcagaccagtgcaagcctacaacccgtgtgcggaggcgctcggtgcagcaggagcctcagaacggcggggcgccctgcccacccctggaagagagagctggctgcctggagtactccaccccgcagggccaggactgcgggcacacctatgttcctgcctttataactacctctgcattcaacaaggagagaacacgacaagctacgtctccacactggtctacacacacagaggatgctggatactgtatggagtttaagacagagtccttgactcctcactgtgctctggaaaactggcccttgactagatggatgcagtatctccgagagggatacacggtgtgtgtggattgtcagcctccagctatgaactctgtgagccttcgttgttctggagatggcctggactccgatggaaatcagactctccattggcaagcaattggtaatcctcggtgtcaaggaacttggaaaaaagttcggcgagtagaccagtgttcttgtccagctgttcacagttttatttttatatagatggtgatataaatatttccaaatgcatttgtaaacattctaaatattctcaagtcatgttcaatgtttcctaaaccttcaattttggccaaagtccccaaacacatcattgccacactctgaagtagagaaagaaaatttaggggccagttctcaaggaacacaggtcctttatttttattttaactaagttgaagacccactcaaaaagctcttgtggttttatgttcttgacctttcaactggagtcctctcattcagcaggtggcccgtgagacacagaatacatgtctgtttgctaaagtaaaattactgtaactcagtccgattattggtgacggaagtgtcatttaaggggatctatgttttgaaccttgcagtctattttataatcttttaaaagtttctcactttaaaacatgtatacaggtatgcacactctacacatatatttccatatatttaatattccataaattctgaaataatttcaagcaaattatcacaaataatttttccacagggcaaattatttaaaattttagtaagcattctgtaatgaaaaaccaagttatactaaaaacattttttgaagaagaaattttttttttgcttaagaagtgaaaggatcaaatgctcattgtaggtcaatgggagttcttttaaatgttataattttcatgaaaagaaatgttgacaccagtgaatgaaacaattgctttcattctgaaaattctaccaccatttgcatctaagattatttccaaggcttaaagcctgaagctgaataaaataatctttcagagtccagcttcaagtttagttgatgtaagctcactatttttttcctaccgcatgcattttctaatgtttggggtggatggtgtgtcggttatggaaggcatagacgtcattacaggtgctacgatctcacacacacacaaggaaatgttagtctccttattttatgattggaaaatcaatgacctagaggcaaaatggcatgtttaaggacctgggatgacaagtcattctgcagtcagccacagagccaaatttggactcctcaaccagaactccatgaaaagcctgactttgccaaacactgtgctggaaaagctaagcccctttcatttgtgaagtaaattttaaattcaagatatttagtttagagaattgagtcttgagatgtaaactacatgagatttctttggtttcaattgaataatattcactaacaaatgatttactaaaatacgtatttcttggtccttatcatgtaatgacagattcacaacagcaataaggatggagatttccccaataattaataacaccgagagtagcaatattttttactgtattttcatttaattgtcaaagttgtttttgtggaaaattaaattcttcagaaattaataataaaatatgtgagtctcatcaaggctagcaactttaagtcagtattaacattttcatactgtttctaacatttattaagctagatttttgaagctatgtctgggtaatttccaatgttacttaaaagtttttttttctttgagacagagtctcactctgttgcccaggctggagtgcagtggccccatctcggctcactgcaagctccgcctcccgggttcacgccattcttctgcctcagcctcccaagtagctgggactacaggcgccgtcatcacgcctggctaattttttgttttttttttttagtagagacagggtttcactgtgttagccagggtggtctcgatctcctgacctcgtgatccacccacctcggcctcccaaggtgctgggattatgggcgtgagccactgcgcctggcctgttacttaaaatttttatactagtaaataaactttttgttcacatttataaaagctctatatttgtttgactagaaaataacccaaattttctggaccagtcagagaatgataaaatttcaccaaaaataaaacaaaaaaatccttcagaactgataggtataggtacaacaactactaatagcaataaagcaatggtgcttttatagttccgatatgtgttataacatttaacataattgaggtgtataaaataaatttttcaccttatgcatttaatttttggtggatgaccagtaattgctttcttattgaagttaaatttttgttatttctattcttgagaaaattttatgggctagaggagttaactgttaaataacagttttgaaaagcttgttattaattttagcaaagcccaagggaaatagttcagaactgaaacatgtagtccaagtgatgaatgaaaaaccaaaagtttttattttcaaatttaaaaatcaaagtatataagacctcttggcactcttttttaataagtaccttagtcttagggccctatccccaggcactctaaaaagatttacgaactctaaaatcccttaatagactgattttcaaaagtgctcatggaaaataattcgaacaaaaataaatacagccaccaggaaagaagggaaaagaagcaagggataatggccatttttgaagagaaaagtgaaaaacaagtgaaggaaaaaaagaatagaaaaaggaataaggtaactataatcacagtattctttttggagttttgctttggtttttattcgagaatgttacaattaagcataaaccgcaacagcaataatttaaagtgtttggttatcatctggcataaaaatttcagttagctatcttttctagatgtgcacaaaattgatgttaataaaactggttcctgccctctaagaa

SEQ ID NO: 353 - DNA, 795 bp, Homo sapiens
  source 1..795: mol_type = genomic DNA
gtgggatagtagcgtgtccacattgtcctttgagaatgagaagtcatcctggagcacagctcttcccacgctccgggcccacacacccagcctcactccatcaaaggagccccgctgcctgcccacccaccctgggtgctttctggcttgcagtgctcttggcagacatgaggcaacgattgctcccgtccgtcaccagccttctccttgtggccctgctgtttccaggatcgtctcaagccagacatgtgaaccactcagccactgaggctctcggagaactcagggaaagagcccctgggcaaggcacaaacgggtttcagctgctacgccacgcagtgaaacgggacctcttaccaccgcgcaccccaccttaccaagtgcacatctctcaccgggaggctcgaggaccctcatttaggatctgtgtggactttttagggcctagatgggccaggggatgttccaccgggaattagaaataccatctgccatatgcagcaagggatctgcagactttttttctgccattctggtgagaaaaagcgtgacatttgctctgatccctggaataggtgttgcgtatcaaatacagatgaagaaggaaaagagaaaccagagatggatggcagatctgggatctaaaatataagctcccggaaggcagggatgttgaagtatcccaagggcttaaaggaatgtgtggcttatagtaggtgttcaataaatatttgttgaatgaatttagcaccaaaggtgaagagctgataaaagacatttttttaacttccttac

SEQ ID NO: 354 - DNA, 5064 bp, Homo sapiens
  source 1..5064: mol_type = genomic DNA
cgggagtgagagcaggagcgacgcagagcggccgtcgccgtgcccgggtctcagggcgcctggctgaagtgagcatggcttcagtggcctgggccgtcctcaaggtgctgctgcttctccccactcagacttggagccccgtgggagcaggaaatccacctgactgtgatgccccactggcctctgccttgcctaggtcatccttcagcagctcctcagagctgtccagcagccacggcccggggttttcaaggcttaatcgaagagatggagctggtggctggactccacttgtgtcaaataaataccaatggctgcaaattgaccttggagagagaatggaggtcactgctgtcgccacccaaggaggatatgggagctctgactgggtgaccagctacctcctgatgttcagtgatggtgggagaaactggaagcagtatcgccgagaagaaagcatctggggttttccaggaaacacaaacgcagacagtgtggtgcactacagactccagcctccctttgaagccaggttcctgcgctttctccctttagcctggaaccctaggggcaggattgggatgcggatcgaagtgtacggatgtgcatataaatctgaggtggtttattttgatggacaaagtgctctgctgtatagacttgataaaaaacctttaaaaccaataagagacgttatttctttgaaatttaaagccatgcagagcaatggaattctacttcacagagaaggacaacatggaaatcacattactctggaattaattaaaggaaagcttgtcttttttcttaattcaggcaatgctaagctgccttccactattgctcctgtgaccctcaccctgggcagcctgctggacgaccagcactggcattccgtcctcatcgagctcctcgacacgcaggtcaacttcaccgtggacaaacacactcatcatttccaagcaaagggagattccagttacttggatcttaattttgagatcagctttgggggaattccgacacccggaagatcgcgggcattcagacgtaaaagctttcatgggtgtttagaaaatctttattataatggagtggatgttaccgaattagccaagaaacacaaaccacagatcctcatgatgggaaatgtgtccttctcatgtccacagccacagactgtccctgtgacttttctgagctccaggagttatctggctctgccaggcaactctggggaggacaaagtgtctgtcacttttcaatttcgaacgtggaacagagcaggacatttgcttttcggcgaacttcgacgtggttcagggagtttcgtcctctttcttaaggatggcaagctcaaactgagtctcttccagccgggacagtcaccaaggaatgtcacagcaggtgctggattaaacgatgggcagtggcactctgtgtccttctctgccaagtggagccatatgaatgtggtggtggacgatgacacagctgttcagcccctggtggctgtgctcattgattcaggtgacacctattattttggaggctgcctggacaacagctctggctctggatgtaaaagccccctgggagggtttcagggctgcctaaggctcatcaccattggtgacaaagcggtggatcccatcttagtacagcagggggcgctggggagtttcagggacctccagatagactcctgcggcatcacagacaggtgcttgcccagctactgtgagcatgggggcgagtgttcccagtcgtgggacaccttctcctgtgactgtctaggcacaggctatacgggcgagacctgccattcctctctctacgagcagtcttgtgaagcccacaagcaccgagggaacccgtctgggctttactatattgatgcagatggaagtggccccctgggaccatttcttgtgtactgcaatatgacagcagacgccgcgtggacggtggtgcagcacggtggccccgacgcggtgaccctccgaggtgcccccagcgggcacccgcgctcggctgtgtccttcgcgtacgcagcgggcgcggggcagctgcggtccgcggtgaacctggcggagcgctgcgagcagcggctggctctgcgctgcgggacggcgcggcgcccggactcacgagatggaaccccactgagctggtgggttggaagaaccaatgaaacacacacttcctggggaggttctctgcctgatgctcaaaagtgtacttgtggattagaggggaactgcattgattctcagtattactgcaactgtgatgctggccggaatgaatggactagtgacacaatagtcctttcccaaaaggagcacctgccagtcactcagattgtgatgacagacgcaggccgaccacattccgaagcagcttatacactggggccactgctctgccgcggagatcagtcattctggaattcagcttccttcaacactgagacttcataccttcatttccctgctttccacggagaactcactgctgacgtgtgcttcttttttaagaccacagtttcctccggggtgtttatggagaacctggggatcacagatttcatcaggattgagctgcgtgctcccacagaagtgaccttttccttcgatgtggggaatggaccttgtgaggtcacggtgcagtcacccactccctttaatgacaatcagtggcaccacgtgagggcagagagaaatgttaaaggagcgtctcttcaagttgatcagcttcctcagaagatgcagcctgcccctgctgatgggcacgttcgtttacagctcaacagccagctcttcattggtggaacggccaccagacagagaggctttctaggatgcattcggtctctgcagttgaacggggtggccctggatctggaagaaagagccacagtgacgccaggagtggagccagggtgtgcaggacactgcagcacctatggacacttgtgtcgcaatggagggagatgcagagagaaacgcaggggggtcacctgtgactgtgccttctcagcctatgatgggccgttctgctccaatgagatttccgcatattttgcaactggctcctcaatgacataccattttcaagaacattacactttaagtgaaaactccagctctctcgtttcttcattacacagagatgtaacattgaccagagaaatgatcacactgagcttccgaaccacacgaactccgagcttattgctgtatgtgagctctttctatgaggaatacctttcagttatcctcgccaacaatggaagtttgcagattaggtacaagctagatagacatcaaaatcctgatgcatttacctttgattttaaaaacatggctgatgggcaacttcaccaagtgaagattaacagagaagaagctgtggtcatggtagaggttaaccagagcacaaagaaacaagtcatcttgtcctcagggacagaattcaacgccgtcaaatctctcatattgggaaaggttttagaggctgccggcgcggacccggacacaaggcgggcggcgactagtggcttcactggctgcctctcggcggtgcgcttcggccgcgctgctcccctgaaggcggcgctgcgccccagcggcccctcccgggtcaccgtccgcggccacgtggcccctatggcccgctgcgcagcgggggcggcgtccggctccccggcgcgggaactggctccccgactcgcggggggcgcaggtcgttctggaccagcggatgagggagagcccttggttaatgcagacagaagagactctgctgtcatcggaggtgtgatagcagtggtgatatttattttgctttgcatcactgccatagccatacgcatctatcaacagagaaagttacgcaaagaaaatgagtcaaaagtctcaaaaaaagaagagtgctaggacagctctaaacagtgagctcgatgtgcaaaacgcagtccatgaaaaccagaaagagcgagtcttctgattggcagctgtggctgtctctatcatcgtgactgtggacttccctgctgttgccatcagggtgcacacaagcaggtgcagtgctgtcacctggctgaagacctgcagcctcggagcctctgggaggtccctttctccctcggtgaaacacagtcctccacatcaatttccaaacaatgaattaggtatggccattcatcactgttcagtagtttccccgtccaaaggctctcttccaaaactgcagtttgatctgtgttaataattgtggggttttagatgagaaaatggctataaagctgtggccctactttattttttaaaaatgacagaacttttgttcagatgtaaaagacaaaattgcactttaatgttttttgttacttgaaaacatatctgggatccctttttttggtcctctgctgatatttataaaacaagaaatgcttcttggactaccttcactggcatttccatagtcctggaatccagagccaagtggcctatctaaaattcacagcccttttattctcctgtgtgatggttaatacaacacagttgaagcctggaaacactaccattatttttggtgtattgctttttctaattgactgtttttaatgattttgatacattttaatgttgaaattaatattgaatgttagctatgaaattttagtattgaattttataatggaacagaacattggtaggtaacaagatgcaagaggatgtcaatacaagattgtctgcctgtttttctttgtaatttgtaattacagtttttgtaacttgtgattatgtttttaactaaatttaccaccagatacaaacaatacttcttacacagagttatcctttatttatatcattaagacgtgaatgaaacatcatcctaacttacttccccaagatattgagaggtcatatctgtttttctttatcattcatttctttttctaaaagttgttactgatatgcttttgatttcctatgactctattatgttgtacagaacatcttttcaatttattaaaaaaatagcttaactgaa

SEQ ID NO: 355 - DNA, 3078 bp, Homo sapiens
  source 1..3078: mol_type = genomic DNA
gctctaggaaagtggcggagcgaccctctatggtcccgggcccacccgaaagcgttgttcgtttcttcctgtggttttgttttctcctccccccaactcggaaggcgtcctgtgacccccgggacctcaagagctgtaaccgcccctgtgtgtggtcgaggcttttgaaaccaaactctagcctctccaacctagaaactgcatactttccacaaattttgagatttttgagaccctggtacttttcacgaagtcaccttaattatcaccaaaaagctcctgcaagatgggagtggttatactccatttacaggaaaggaaccaaggctcagagaagaaatgtgctccgttcaccgtgtgctcctcctcagccatcctggccgtgctcagtcatctgaccagctgacctccgtgttcccccactccctggggagctcctccgccttttggcttccaatgctattgctgcatgctgaagactcccgcattggtaactccagtctgactgtgggacataaatgttattgaactttagacttgtatatcgaactgattactcaagagctgcatttgcatgtgtaatggacatcccaaacctaacataccccccaaatgaattcctgatatctacctaacctgttcttgcaacagtcttcttcccagggatgggtgaagatcccatcatctttccagttgctcaagccaaaaaccttgatgtcactgttgtctcttctttttttcatccaaaattcacctgtgatttatccacaaattctgtcggcttcatcgttaaaatatattcattatcaagccactttcaacacttccactgctataaccaccaagccaccttcatccaccttctggattattatattggcttccagacgggttgccctacagtctattcacggccccagagtaatcctcttaaacctaagttagatcatgtcattcatttgttcaaaaccttcaaaggcttcccaacttattagagcaaagccaaggacctcgcagtggcacccgatgcctctcatgatctgtctctttagttctttattgtgtctgcagtgctgaaaacagtgctcagcagggaacagacactcagtaaatagctgttgaatgaatgaatttataagatgccttattgtttacaaagtacttttacatcttatcttctggttattcatcttcaccatagtctcatgaagcacagattatcatatctgtcttgcaaatcagtaaactgaagcaagagaggctgacctgcctgaagtaatacagtggtttgttggtggaggctaaactaagtcataggttcattctcttaagttggggctttctgctctgtagggagctgtctctgcatatggcaaagcacaaagctgaatgaggtctggacaaagaagctccactcgcaatctagagagtatctggactattgcagtgattaaatgaggtaatgtaaggcacttagcacaatgtataacacagaagaaatgagagtcgttgttacttttattattaaattgttataagttggttgatgctggtggttggagagtttggggtaaagggcaatggccagagatctagaaatggtttaggaaaagcgtcaggagcaaacatgacccgttgggactgtctgctctatgtacactaaaataaaaagataatttttaaaaagccattttgttagtaaggtagttactaattaaaactaactcctttaatgtctacataaagatggattatccctttttcctatacctgaaaacaactgggccagccatagaagggccagaggtatgtcaactaaagcattgggtaaacgaggatggattttttaaaaagagagagacgaaagtcaggaaataaaggggtgtgtgtccctaagtgtggacagagtcctgggcagtaaggatggagaggagggagagccagaaaaatatatgaaggagaggagggtaaaggagaatgggaaaaagacagggagagaaagcaggtagggttttatgccttcagcctagctgttagtataataatagttaacacttattgagtgcttattgtgtgccaggcactgtttgcagcatttgaggatctcacgtgagattcctgaggcatgattattcctgagggtttgctccaccttctctggttttggtccctgcactttgtggtgtgactccggtgcctcctggtgaaccacatgcctgtcccactgatgttgacttgaccactgatttgaattggctgaccgcatgtgactggatgcaaggggtacatcacatcccagaagaaacttcaagtcattgtgtttctgccaggactctgctctttccctctgccttgagaatagcatgtcccaagtaggggctgcccctttagtctaggaaccaggatgataagacacatggagcagagccacagaagctcacatgtaaccacaacggtcccacgtaatgttagagaaacaaatgctcttgtaacactgagattcttggtggtattattgcattaaagttgactaatgtacctcccaccaaccgtaagagataggaattgttattatcctgtgatattgtgaaatacatagttgatcttctccccgtttcctgacatacaacttctaaaatccttagaatctccaaagtgatgtctttttatatgctgatgagttgactgatgcctggcagcccctgggtagcttcaggatggggctggtcactggaaagaccacagcaggattagaaggatggcaatttcagctccaccccatcaacatctggggaggagggcaactgaaggtgaagtggatcaccaatggctgatggattaatcaatcatgcctgtgttacaaagtctccataaaagctcccaaaggactgggttcagagagcttctggatacctgaacacatggatgttactggagggtgccacctggggtcggggggtgcaaaggggaaggagtatggaagctccgcaccctttccttcatacctcactatatgcatttctttttctatatcctttggaatatcatttgtaataaaccaggaaatgtgtttcgctg

SEQ ID NO: 356 - DNA, 2846 bp, Homo sapiens
  source 1..2846: mol_type = genomic DNA
ctggctgccggctgctgccaccgcaatcccggctcctaaatcagcgcggggaggcgctccctccccacgcccggctctccgggctctcggggccgcgattggccgcgccggcgccccccaccccgggcccccggctccagctgccgcgccattggctgcgggcctccgccagcctttacataagaccgggcgcgctcgagtggagttgtataaagcgagcgcgcggcgtcggggcgggaggctcgaggccagcccgggaccggggctgggagcaagcaggcggcggcgccggcggcagaggcggcagcgagcgcccgcttcccacgcccctaggcggcggggccgagagcgggaggatggctccgagcgctgaccccggcatgtccaggatgttaccgttcctgctgctgctctggtttctgcccatcactgaggggtcccagcgggctgaacccatgttcactgcagtcaccaactcagttctgcctcctgactatgacagtaatcccacccagctcaactatggtgtggcagttactgatgtggaccatgatggggactttgagatcgtcgtggcggggtacaatggacccaacctggttctgaagtatgaccgggcccagaagcggctggtgaacatcgcggtcgatgagcgcagctcaccctactacgcgctgcgggaccggcaggggaacgccatcggggtcacagcctgcgacatcgacggggacggccgggaggagatctacttcctcaacaccaataatgccttctcgggggtggccacgtacaccgacaagttgttcaagttccgcaataaccggtgggaagacatcctgagcgatgaggtcaacgtggcccgtggtgtggccagcctctttgccggacgctctgtggcctgtgtggacagaaagggctctggacgctactctatctacattgccaattacgcctacggtaatgtgggccctgatgccctcattgaaatggaccctgaggccagtgacctctcccggggcattctggcgctcagagatgtggctgctgaggctggggtcagcaaatatacagggggccgaggcgtcagcgtgggccccatcctcagcagcagtgcctcggatatcttctgcgacaatgagaatgggcctaacttccttttccacaaccggggcgatggcacctttgtggacgctgcggccagtgctggtgtggacgacccccaccagcatgggcgaggtgtcgccctggctgacttcaaccgtgatggcaaagtggacatcgtctatggcaactggaatggcccccaccgcctctatctgcaaatgagcacccatgggaaggtccgcttccgggacatcgcctcacccaagttctccatgccctcccctgtccgcacggtcatcaccgccgactttgacaatgaccaggagctggagatcttcttcaacaacattgcctaccgcagctcctcagccaaccgcctcttccgcgtcatccgtagagagcacggagaccccctcatcgaggagctcaatcccggcgacgccttggagcctgagggccggggcacagggggtgtggtgaccgacttcgacggagacgggatgctggacctcatcttgtcccatggagagtccatggctcagccgctgtccgtcttccggggcaatcagggcttcaacaacaactggctgcgagtggtgccacgcacccggtttggggcctttgccaggggagctaaggtcgtgctctacaccaagaagagtggggcccacctgaggatcatcgacgggggctcaggctacctgtgtgagatggagcccgtggcacactttggcctggggaaggatgaagccagcagtgtggaggtgacgtggccagatggcaagatggtgagccggaacgtggccagcggggagatgaactcagtgctggagatcctctacccccgggatgaggacacacttcaggacccagccccactggagacaccaatgaatgcatccagttcccattcgtgtgccctcgagacaagcccgtatgtgtcaacacctatggaagctacaggtgccggaccaacaagaagtgcagtcggggctacgagcccaacgaggatggcacagcctgcgtggggactctcggccagtcaccgggcccccgccccaccacccccaccgctgctgctgccactgccgctgctgctgccgctgctggagctgccactgctgcaccggtcctcgtagatggagatctcaatctggggtcggtggttaaggagagctgcgagcccagctgctgagcaggggtgggacatgaaccagcggatggagtccagcaggggagtgggaaagtgggcttgtgctgctgcctagacagtagggatgtaaaggcctgggagctagaccctccccaagcccatccatgcacattacttagctaacaattagggagactcgtaaggccaggccctgtgctgggcacatagctgtgatcacagcagacagggtcgctgccctgatggcgcttacattccagtgggtctaatgaccatatcttaggacacagatgtgcccagggaggtggtgtcactgcacaggaagtatgaggactttagtgtcctgagttcaaatcctgattcaggaactcacaaagctatgtgaccttacaccagtcacttaacttgttagccatccattatcgcatctgcaaaatggggattaagaatagaatcttggggttagtgtggagattagattaaatgtatgtaagacacttggcacaaaacctggcacatagtaaaggctcaataaaaacaagtgcctctcactgggctttgtcaacacgtg

SEQ ID NO: 357 - DNA, 1423 bp, Homo sapiens
  source 1..1423: mol_type = genomic DNA
agctacaaccaagtaagcaagtgtcagggctcaccaaccatgcaaggacagggcaggagaagaggaacctgcaaagacatattttgttccaaaatggcatcttacctttatggagtactctttgctgttggcctctgtgctccaatctactgtgtgtccccggccaatgcccccagtgcatacccccgcccttcctccacaaagagcacccctgcctcacaggtgtattccctcaacaccgactttgccttccgcctataccgcaggctggttttggagaccccgagtcagaacatcttcttctcccctgcgaggatcaacagccatgtgaaaaagaagacccaagggaaggttgtagacataatccaaggccttgaccttctgacggccatggttctggtgaaccacattttctttaaagccaagtgggagaagccctttcaccctgaatatacaagaaagaacttcccattcctggtgggcgagcaggtcactgtgcatgtccccatgatgcaccagaaagagcagttcgcttttggggtggatacagagctgaactgctttgtgctgcagatggattacaagggagatgccgtggccttctttgtcctccctagcaagggcaagatgaggcaactggaacaggccttgtcagccagaacactgagaaagtggagccactcactccagaaaaggtggatagaggtgttcatccccagattttccatttctgcctcctacaatctggaaaccatcctcccgaagatgggcatccaaaatgtctttgacaaaaatgctgatttttctggaattgcaaagagagactccctgcaggtttctaaagcaacccacaaggctgtgctggatgtcagtgaagagggcactgaggccacagcagctaccaccaccaagttcatagtccgatcgaaggatggcccctcttacttcactgtctccttcaataggaccttcctgatgatgattacaaataaagccacagacggtattctctttctagggaaagtggaaaatcccactaaatcctaggtgggaaatggcctgttaactgatggcacattgctaatgcacaagaaataacaaaccacatccctctttctgttctgagggtgcatttgaccccagtggagctggattcgctggcagggatgccacttccaaggctcaatcaccaaaccatcaacagggaccccagtcacaagccaacacccattaaccccagtcagtgcccttttccacaaattctcccaggtaactagcttcatgggatgttgctgggttaccatatttccattccttggggctcccaggaatggaaatacgccaacccaggttaggcacctctattgcagaattacaataacacattcaataaaactaaaatatgaattcatctgtcaacaga

SEQ ID NO: 358 - DNA, 2493 bp, Homo sapiens
  source 1..2493: mol_type = genomic DNA
tcagagtaatgccaaactctctctgagtgggatgagcagagcagatgctgcaatgagatgccaaagcggctccccttcctctgtgccttgggtgcctataaattgctccggcgcgcgtttgtcagcctcctcttctcctggcaggtggtacccaggcagaattctgccttcagtctctctctcgctccgctcccggccgtgaggcgctcgccgctgctcgctcgctcctccgccccagctctgagcctcgccgtgccgaccgtgcccgccgccgccgccgctgggcgcacccgggggacgcccgggcccacgcggggctttggggtgcgcgtctattcgagttgtggtggtggcaaaggaggaagagagaaaggaggcaataaaaaaaaaaggcagcggacgggcgaactgagcgagcgaaagaagaggaggaggaggcagaaaaaggcaacttcagacggaaagttggtgcgaacaggcgcagtctgcaaaaacggaaaagtcgatcgcaggcggcggcggcataaaagtgtgagctgcccgggcgagctcaggaggcggcggctggctctgccctcccggtggccgcgccggcgccggctgcagccacaggtgcgaaggagctcgcggggggcgagggcgccccgcgcacccctcccccggcccccaccccgggctcgggacttcggctcaagtcactgggcgcccgcgctccctccccagccgcagcctccgcggggggagcaggagtcggcagcagcggccggcgcacgcacgcccaggggagttggggttcgcagggggttgttttcggctctgaagaggtccccgcccaaccttcaaaattctgtccaaaagcagacaagaggatcgccccgcgctgagccggctggtgggcagcaggaggcgcctgatcgccgccggggcgctgggggtggtgatggtgctgctgctggtgatcctcatcccggtgctggtgagctcggccggcacgtcggcgcactacgagatgctgggcacctgccgcatggtctgcgacccctacgggggcaccaaggcgcccagcaccgctgccacgcccgaccgcggcctcatgcagtccctgcccaccttcatccagggccccaaaggcgaggccggcaggcccgggaaggcgggtccgcgcgggccccccggagagcccgggccacccggccccatggggcccccgggcgagaagggcgagccgggccgccaaggcctgccgggcccgcccggggcgcccggcctgaacgcggccggggccatcagcgccgccacctacagcacggtgcccaagatcgccttctacgccggcctcaagcggcagcatgaaggctacgaggtgctcaagttcgacgacgtggtcaccaacctcggaaaccactacgaccccaccaccggcaagttcacctgctccatcccgggcatctacttcttcacctaccacgtcctgatgcgcggaggggacggcaccagcatgtgggctgatctctgcaaaaacaaccaggtgcgtgctagtgcaattgcccaagatgctgatcagaattacgactatgccagtaacagtgtggttcttcatttggagccgggagatgaagtctatatcaaattagatggcgggaaagcccatggaggaaacaacaacaaatacagcacgttttctggatttattatttatgctgactgataatgcagaaactaagcttattattctgagtttgaacactggattcgtatggctaacgtcagtgaatcaaggatcccaggggatgccaatggcagggcacctcagttgtgtatatgtggggaaatcaaatgctacctgactcacatctgtatcactcagaaacattatgtaaaaaatatcaaagcaagataagcagatgtgtgatccactaccgccaaagcaaatactccttatcgttagtgtccatgtgaatgaagtcctatatagatcacaaatttttatagacaaatctaagacattgaattatttcttctatatatatgatactttggtgtactgtgatcttgctgcttttatccatatgtcagctttggttcttgtgagtttacctgcttattatgatacttggagtccattcatagtgtggggaagaatgatttttgccctgcaggagaaggtctaattgaaataatgctgcttgtccccaaagaaattgtttgccttgtactcttgttaaccttagagctagacctgggaatgattcaacttcaagccttaacctggaattttctggatttgagggaattcccaagcctatgatctttttcacattttctttttcttatatgaattttcttttctctcttttctggtgatagtctttaaaaatagagattgacagtgtatcataggattaccctctaagtgtgaaaatgtgtaattatgtacggtatttagaaaaagcccttatgtgtccattttgtcaactgaatacatttagattc

SEQ ID NO: 359 - DNA, 2361 bp, Homo sapiens
  source 1..2361: mol_type = genomic DNA
gagtcctcctttttgcacacacacgaatacaaagagccatacgaccttcggatgccggaaggtccttctgaatcccttccctgttccttaggttgcactagtcgggggttccatgctggggggcagaaggaatgctctctaccgtctgaaaccgttcatcaggaaggccttgatttgtgatgtgctaggagagcacaggatctgcaaatagaaggcacctgtctcccttctgcaggccgaggagaggccgccatggactgtgtgcttcttcatggcttgtttactcttctttcacagaccctacagcttggggcctgggctcctctgaccatcctcattgagaaaggaaagtgagtccagagaagttgatgcttcctacctgttggagcggcccagcagtgtaagcgtggttgttactgccccatccgccatgtccttcagtgccaccattctcttctcccctcccagtggcagcgaggccagatgctgctgctgcgcctgtaagagtgagactaatggaggcaacacaggctcccagggtgggaatcctcctcccagcacccccatcacagtgactggacatggcttggctgttcagagctcagagcagctcctgcatgttatctaccagcgggtcgataaggcagtgggtttggctgaagctgctctgggtcttgccagggccaacaatgagttgttaaaacgtctccaggaggaagtgggtgacctgaggcaagggaaagtgtccatccctgatgaagatggggaaagccgggcacatagttccccacctgaggagcctgggcctctcaaggaaagtcccggggaagcctttaaggctctgtctgccgtggaagaggagtgtgacagcgtgggcagcggcgtgcaggtggtgattgaggagctgcggcagctgggagcagcctcagtggggcctgggcctttgggcttcccagcaactcagagggacatgcggctcccagggtgcacgctggctgccagcgaggcggcccccctgctcaatcctctggtggatgattacgtggcctctgagggtgcagtacagcgagttctggtccctgcttatgccaagcaactctcaccagccacacaactggcaatccagcgggcaaccccagagacaggaccagaaaatggaaccaagctgccaccaccccgccctgaggacatgctcaatgccgctgctgcgctggacagtgccttggaagagtcaggccctgggagcactggggagctgagacactctctagggctgaccgtttccccatgcaggaccagaggaagtgggcagaagaactccaggcgcaagcgggatcttgtactctctaaactggtccacaatgtgcataaccacatcaccaatgacaagagattcaatgggtctgaaagcatcaagtcctcttggaatatttcagtagtgaagtttcttctggaaaagctcaagcaagagctggtgaccagtccccacaattacactgataaggagctaaaaggagcctgtgtggcctacttccttactaagaggcgtgagtaccgcaactccctgaacccctttaaaggcctgaaggaaaaagaggagaagaaacttcgaagtcgccgatatcggctttttgccaaccgatccagtatcatgaggcattttggacctgaggaccaacgtctgtggaatgatgtgacagaggaactgatgtcagatgaagaggacagtcttaacgagccaggtgtgtgggtggcccgccctccccgtttccgggcccagcgcctcacagagctctgctaccacctggatgctaactctaagcatggcaccaaagccaaccgtgtgtatgggcctccctcagacagactgccttctgctgaagcccagctccttccaccagaactttacaatcctaatttccaagaagaggaagatgagggaggggatgagaatgcacctggctccccatcttttgaccaaccccacaaaacctgctgtcctgacttgaactcattcattgaaatcaaggtggaaaaggatgaataaaatctacagccaagaataactctggcttccgccatgccccatgtctcagaaataggtggccatggggcttcacaaaataatgagatgctctgtgcagtctgagaaagcaaatttgcctcttttcttaacacagtctctactggggaagcagaacactggtgggataaaaacttatctagaaggggagaaactccctccactgtgaacagtaagccagaatatgcttattcctcagcataaacagtatctcggagaagcctgggatgagaaaatgaggaggatgggtccaagaaacatgaggccttcttgacata

SEQ ID NO: 360 - DNA, 5669 bp, Homo sapiens
  source 1..5669: mol_type = genomic DNA
atgcttctgctgggcatcctaaccctggctttcgccgggcgaaccgctggaggctctgagccagagcgggaggtagtcgttcccatccgactggacccggacattaacggccgccgctactactggcggggtcccgaggactccggggatcagggactcatttttcagatcacagcatttcaggaggacttttacctacacctgacgccggatgctcagttcttggctcccgccttctccactgagcatctgggcgtccccctccaggggctcaccgggggctcttcagacctgcgacgctgcttctattctggggacgtgaacgccgagccggactcgttcgctgctgtgagcctgtgcggggggctccgcggagcctttggctaccgaggcgccgagtatgtcattagcccgctgcccaatgctagcgcgccggcggcgcagcgcaacagccagggcgcacaccttctccagcgccggggtgttccgggcgggccttccggagaccccacctctcgctgcggggtggcctcgggctggaaccccgccatcctacgggccctggacccttacaagccgcggcgggcgggcttcggggagagtcgtagccggcgcaggtctgggcgcgccaagcgtttcgtgtctatcccgcggtacgtggagacgctggtggtcgcggacgagtcaatggtcaagttccacggcgcggacctggaacattatctgctgacgctgctggcaacggcggcgcgactctaccgccatcccagcatcctcaaccccatcaacatcgttgtggtcaaggtgctgcttcttagagatcgtgactccgggcccaaggtcaccggcaatgcggccctgacgctgcgcaacttctgtgcctggcagaagaagctgaacaaagtgagtgacaagcaccccgagtactgggacactgccatcctcttcaccaggcaggacctgtgtggagccaccacctgtgacaccctgggcatggctgatgtgggtaccatgtgtgaccccaagagaagctgctctgtcattgaggacgatgggcttccatcagccttcaccactgcccacgagctgggccacgtgttcaacatgccccatgacaatgtgaaagtctgtgaggaggtgtttgggaagctccgagccaaccacatgatgtccccgaccctcatccagatcgaccgtgccaacccctggtcagcctgcagtgctgccatcatcaccgacttcctggacagcgggcacggtgactgcctcctggaccaacccagcaagcccatctccctgcccgaggatctgccgggcgccagctacaccctgagccagcagtgcgagctggcttttggcgtgggctccaagccctgtccttacatgcagtactgcaccaagctgtggtgcaccgggaaggccaagggacagatggtgtgccagacccgccacttcccctgggccgatggcaccagctgtggcgagggcaagctctgcctcaaaggggcctgcgtggagagacacaacctcaacaagcacagggtggatggttcctgggccaaatgggatccctatggcccctgctcgcgcacatgtggtgggggcgtgcagctggccaggaggcagtgcaccaaccccacccctgccaacgggggcaagtactgcgagggagtgagggtgaaataccgatcctgcaatctggagccctgccccagctcagcctccggaaagagcttccgggaggagcagtgtgaggctttcaacggctacaaccacagcaccaaccggctcactctcgccgtggcatgggtgcccaagtactccggcgtgtctccccgggacaagtgcaagctcatctgccgagccaatggcactggctacttctatgtgctggcacccaaggtggtggacggcacgctgtgctctcctgactccacctccgtctgtgtccaaggcaagtgcatcaaggctggctgtgatgggaacctgggctccaagaagagattcgacaagtgtggggtgtgtgggggagacaataagagctgcaagaaggtgactggactcttcaccaagcccatgcatggctacaatttcgtggtggccatccccgcaggcgcctcaagcatcgacatccgccagcgcggttacaaagggctgatcggggatgacaactacctggctctgaagaacagccaaggcaagtacctgctcaacgggcatttcgtggtgtcggcggtggagcgggacctggtggtgaagggcagtctgctgcggtacagcggcacgggcacagcggtggagagcctgcaggcttcccggcccatcctggagccgctgaccgtggaggtcctctccgtggggaagatgacaccgccccgggtccgctactccttctatctgcccaaagagcctcgggaggacaagtcctctcatcccaaggacccccggggaccctctgtcttgcacaacagcgtcctcagcctctccaaccaggtggagcagccggacgacaggccccctgcacgctgggtggctggcagctgggggccgtgctccgcgagctgcggcagtggcctgcagaagcgggcggtggactgccggggctccgccgggcagcgcacggtccctgcctgtgatgcagcccatcggcccgtggagacacaagcctgcggggagccctgccccacctgggagctcagcgcctggtcaccctgctccaagagctgcggccggggatttcagaggcgctcactcaagtgtgtgggccacggaggccggctgctggcccgggaccagtgcaacttgcaccgcaagccccaggagctggacttctgcgtcctgaggccgtgctgagtggggtcatcgctttctccccctcactctccaccccactgatatgccagcgttctgccagctggagtagcgggcagaggacggtggccaggggctcacgccacgatgtcacccacatccggggacaaggaccatgggctggggcgagaggttccctcctcctccctggactgggcagagggaagcccaggaactcccgcacagtctacctcaggccccgctcctcgggccggttgcggggagaggctttgaggtgcagggcagaaggtgctgaggcccagtttccaaggaacttggaggatgggcaccttccaggcagaacttcagggaccccggcccccagaacggaggccacaggctgctggaagagccatgtcccagcagcttggcaccctcaggtggccccatgggctctgagccgtgtctgaacgaggcagggttttcacggtgcttttagcccactttcctttttgaactgacatggactaagcaataaaagctggctggggctgggcagaagccacggggagagtgagattagggcccctggagcctggcactccaccttggaagacgtggacgtgcacagggagtcccgaggtttctcatcctgcactcttggccctcctataaagaagcagcctctccttcctctgatgtgcagggtgtaggactagtggtagggctgccacggaagtgtcctctgaggctctgcaggtagcggggaaagccagtagggagtctgctgtcttcttcaagatggagccggccattacagaaagatgttgacatttgctaggggctatgcagtctgtggctgatgcagggagttttcagaaagttctggagggttctgctgtcactggactggggttggtgctgagctctgggcctggctttgggagatgtcaccctgggatagggaggaggaagctgcatttctaatggcttcctcctccagagaggcacgtatatgcaggctgacatccgagggtctgtgtcgcctcagacagccctgacagtggccacagtcccgtacccattgtgaggggctggggcatgcctaggagggctaggtgctgaacatctatgtgcctataaactcgtcttcgttccaaacagctactgctgtctgccctgggcacgtcacgttgcatcctaggccttagcttctccactgtttgctacctcagattatgccctctgggaacccagccgtatccctcccctaggacagtggtgacctggtccttccaccacactcagtctttggagagcgagctgtccagccacagaaatgagggtgtggtgcgtggcttcctgctccccacagcccagccccctgttggggctccaaagccgaagacagggcctcttcagactccttgggagtaggtttcaggaggcaccaagaatcaatgactgacccagggggcctggcagccactagtatgaactgctggagacctgtctgtcttatagacatgtcaggaaaatagaaacaggcattttctctagctccaagtggggagatattttggggtcacagcttctttggctaagcagggtgtttcttgaaggttcagatgccccactgtgtacatgggatattctgcttctgagtgtaggtgatgaatccaggtcctcagtggagaattttctggagctaagatcaaagcatgtgtcttcctgggagagaagagttccgttcttttatgtgggtttccctaatagtcagaatccacaaaccagccagccagccagccaagcctctgcgatgatgttctcatccggtctaacgctgggctggaaaccttggacagagttcatgcgggggcagagggggtgccagtctctgaggcagggctgcagtcacccctgaagaactaagtgaacaggaacccctctgtgccagtgaccactgtggggctaaagggacaaaaaggaccagggtaccaggcagaagcagatccttgatagctgacgacagcactgcgccctgtgcttggtgcactccctccttcaggaggagagggtggcatggggtctgtgcgggatggcagggggattgggtgggtgggaagagaggtgccatcggtaggaggctggcctccagtagaggagagcagcttttgccatcagtcactttacaaaccatttcaaggaaggacaacctctctggctcctgacacaagccaggcctcggtgcttttatctgttgtggtggtttttcttctttccctttttaaaagacgcatgaccaagacaacctagggagtttgtcttgcttgcctttgactatttccttaatccaaccatgctctcgagggctgagcagagactagactcaaggcacaggtttctggtgatggagtaaagttacagcggtatctcatgtctacacaagaagaggaacgttctgaaagctccaacaacttcttgagggggatggaccaatacagctttgggctcaggattccctagcctcctctgcccatcgcgtgcactgattggaggagtctggcccaaacactctcatatgaacctcgacatgctggagtggggtctggcaggagctgatgacagtttgagggacttgagtgtccctagcctggcagttggctcccggaagcactagacactgacactcattggtagaccctccctccccgccgttgtgtttggttcttttgcactccatgtactgcagaaggatggaaggacctgggtgctggctgggctgtgtatactgtgtatacaagggagctggctgctgaggtgaccacagccttctcctaataaagctgtaagtattt

SEQ ID NO: 361 - DNA, 2019 bp, Homo sapiens
  source 1..2019: mol_type = genomic DNA
tggcgtgcagcgcgggcctcggcggggcccagcgccccggcccgggaggatgcggcccggggcggcccgggagctgagcagggcccccgcgccggcccctccgggccccggcctccagagccgcagccaccgccccgcccccgagagacatgacttccaagccgcattccgactggattccctacagtgtcttagatgatgagggcagaaacctgaggcagcagaagcttgatcggcagcgggccctgctggagcagaagcagaagaagaagcgccaggagcccctgatggtgcaggccaatgcagatgggcggccccggagccggcgggcccggcagtcagaggaacaagcccccctggtggagtcctacctcagcagcagtggcagcaccagctaccaagttcaagaggccgactcactcgccagtgtgcagctgggagccacgcgcccaacagcaccagcttcagccaagagaaccaaggcggcagctacagcagggggccagggtggcgccgctaggaaggagaagaagggaaagcacaaaggcaccagcgggccagcagcactggcagaagacaagtctgaggcccaaggcccagtgcagattctgactgtgggccagtcagaccacgcccaggacgcaggggagacggcagctggtgggggcgaacggcccagcgggcaggatctccgtgccacgatgcagaggaagggcatctccagcagcatgagctttgacgaggatgaggaggatgaggaggagaatagctccagctcctcccagctaaatagtaacacccgccccagctctgctactagcaggaagtccgtcagggaggcagcctcagcccctagcccaacagctccagagcaaccagtggacgttgaggtccaggatcttgaggagtttgcactgaggccggccccccagggtatcaccatcaaatgccgcatcactcgggacaagaaagggatggaccggggcatgtaccccacctactttctgcacctggaccgtgaggatgggaagaaggtgttcctcctggcgggaaggaagagaaagaagagtaaaacttccaattacctcatctctgtggacccaacagacttgtctcgaggaggggacagctatatcgggaaactgcggtccaacttgatgggcaccaagttcactgtttatgacaatggagtcaaccctcagaaggcctcatcctccactttggaaagtggaaccttacgtcaggagctggcagctgtgtgctacgagacaaacgtcttaggcttcaaggggcctcggaagatgagcgtgattgtcccaggcatgaacatggttcatgagagagtctctatccgcccccgcaacgagcatgagacactgctagcacgctggcagaataagaacacggagagtatcatcgagctgcaaaacaagacacctgtctggaatgatgacacacagtcctatgtactcaacttccatgggcgcgtcacacaggcctccgtgaagaacttccagatcatccatggcaatgacccggactacatcgtgatgcagtttggccgggtagcagaggatgtgttcaccatggattacaactacccgctgtgtgcactgcaggcctttgccattgccctgtccagcttcgacagcaagctggcgtgcgagtagaggcctcttcgtgccctttggggttgcccagcctggagcggagcttgcctgcctgcctgtggagacagccctgcctatcctctgtatataggccttccgccagatgaagctttggccctcagtgggctccctggcccagccagccaggaactggctcctttgcctctgctactgaggcaggggagtagtggagagcgggtgggtgggtgtgaagggatgagaataattctttccatgccacgagatcaacacacactcccacccttggggtagtagtgtgttgtagtcgtacttaccaagctgagcaacctcttcagctgggaaggccgcaagaggcatagagggagag

SEQ ID NO: 362 - DNA, 1971 bp, Homo sapiens
  source 1..1971: mol_type = genomic DNA
acttttataagccagccccaggcatcccagagcaagatgtagctgtgtagtctccttccatagctgctctaagggggctggcaacatggctcagcaggcttgccccagagccatggcaaagaatggacttgtaatttgcatcctggtgatcaccttactcctggaccagaccaccagccacacatccagattaaaagccaggaagcacagcaaacgtcgagtgagagacaaggatggagatctgaagactcaaattgaaaagctctggacagaagtcaatgccttgaaggaaattcaagccctgcagacagtctgtctccgaggcactaaagttcacaagaaatgctaccttgcttcagaaggtttgaagcatttccatgaggccaatgaagactgcatttccaaaggaggaatcctggttatccccaggaactccgacgaaatcaacgccctccaagactatggtaaaaggagcctgccaggtgtcaatgacttttggctgggcatcaatgacatggtcacggaaggcaagtttgttgacgtcaacggaatcgctatctccttcctcaactgggaccgtgcacagcctaacggtggcaagcgagaaaactgtgtcctgttctcccaatcagctcagggcaagtggagtgatgaggcctgtcgcagcagcaagagatacatatgcgagttcaccatccctcaataggtctttctccaatgtgtcctccaagcaagattcatcataacttataggttcatgatctctaagatcaagtaaaaatcataatttttacttattaaaaaattgcaacacaagatcaatgtccatagcaatatgatagcatcagccaattttgctaacacatttctttgggattttgcccttcctggggtataggggatcagaaatattgatccatgtgcacgcagataaaatggcttctgctaaacagactaaaatctttctctctagtctttctcacttgtacaaacccagtttgttttcaaaaaatcacagtagcaatgcaactcatcactctagaaaagcaagcttaggctacctgaaagattttcccttggaagtttagcgtatgtttgactaacaaaaattccctacatcagagactctaggtgctatataatccaaaaacttttcagcctgttgctcattctgtcccatgctggcaataataccttgtcagcccattacccttattttgaattgctccatctcctggtgggacttgtatcttgtctgccatatcagaacacaaacccctgaagaggttctgatttgattttttttttttcttcatgcctaccctttttttggaagtttccagccgcaatttgaaatgaaatgacaaggtgtatatttgatcaattttcattcccaccattgcattacaacctctaacttaaatgggtaaccctaaggcatatcaaagaagcagattgcatgataaacggaaacagaaaaaaagaacctacatttattttgctttagcatccttactctcaccttttatgagattgagagtggacttacatttccttttttacattttcgtatacttattttttttagccatcattatatgtttaagtctattatgggcaaccaatctttggaagctgaaaactgaatttaaagaatgctatcttggaaaattgcatacgtctgtgcaattttttattctgcctagtgctattctgcttgtttaactagattgtacaaaataacttcattgcttaatatcaaattacaaagtttagacttggagggaaatgggctttttagaagcaaacaattttaaatatattttgttcttcaaataaatagtgtttaaacattgaatgtgttttgtgaacaatatcccactttgcaaactttaactacacatgcttggaattaagttttagctgttttcattgctcaataataaagcctgaattctgatcaatagaaaa

SEQ ID NO: 363 - DNA, 3360 bp, Homo sapiens
  source 1..3360: mol_type = genomic DNA
aaaaagaaaaggaagataagcctcttgcctaaacccccaaagcatgacgctcctctcaccattgagtttccaaacttggacaagacttctgcagagtggcttaaggtcaatggtctgaaagccaagaaattaagtctatatcaggtcctggcacccaatgcattctctcctgtggaggaatttgtacctattctccagaaaacagtatcatcgaccatccatgagaaggcaatgatacaatttgaatggcacgacgggacagtgaagaacattcatgtggacccacccttcctctataagtaccagcaacagctcagcagagctatgcggatgtatgagaggcggattgagtggctctccctggccagcagaagaatctggggcacagtctgtgaaaaaagggtggttgtactgctcgatatctctgcgaccaattccatgtacattattcatatccagcactccctgcggctgctgctggaggagcagttatccaacaaggactgtttcaacctcatcgcgtttggaagcacaattgaaagctggaggcctgagatggttcccgtgagtcacaacaatttacaaagtgcctggcggtgggccctgaacctgcggtgtcggggcagcaggaacgttctcagcgccctgcggaaggctgtggaagtagacttcaaggacaaagacaaacaccaatcgcagggaatctacctcttcactgggggcatccccgaccaggacatgcctacactcagtgcctacatggctgaggcctgtggcggctgcgacctccagctgaacgtgtgtctcttctacgtgggcgagccaaagatggacaccacaccccctgcccgctatgccagtcacactgacacagccgccgcctacaaggaggtcacccgggctgcaggtggccgcttccactggtttggagacacaggcatttatgagagcgatgacatcaactccatcatgtctgagatggaaaaggctctcaactactcccaaaagtgtgccttcctcatggcctccctgaagaaccattcaggaaaagtactgggaagttcagccctcccgaaagaaaaaccaaagacacttcagctaagaagtcagcccaagaagctctgccctcccaggcccaccgtccccctgggggccagaatgagcattaaagatgaccctgacagagagaagagccccccgctgaaatctctgaaatggcgtccactcagtagcagagttggcatctcaccagctgcggcccagccaacgaaagaagggatgatggaactgaggaggaagaccaagtcaagggaagcagagacatctcttttactgttctacacagagaaagggaatgacgtgggctcagtgtacaagaagtaccctcaaggaaggggcttgagaaggactagctcttctattgacttacccagaaaggatacagtttgctcaagccaagagtgggtggcaaaatatgggctcaaaaaattgaagctggagatttccagatgcatgggtcccaactgcactcatcaaaagtcaggacagaggtcagcatccgccaaacactgcagcatcttccccagcgttgagatccatggagtggtgagacacatccagtggacgcccagggagatggaggtgtacatcaggcacttggagaaggtgttaaggcgctatgtccagaggctgcagtggctgctgtccgggagccgccgactgtttggcaccgttttggagagcaaagtatgcatattgctggacacgtcagggtccatgggcccctacctgcagcaggtgaagacagagctggttttgctgatttgggaacagctgcggaagtgctgtgacagttttaacctgctcagctttgcagagagctttcagtcatggcaggacacgctggtggagaccacagatgcagcgtgtcatgaggctatgcaatgggtgacccacctgcaagctcagggcagcacctccatcttgcaagcattgctgaaagctttcagtttccatgatctggaaggattgtacctcctgaccgacggaaagccagacacaagctgcagccttgtcctaaatgaagtccaaaaactcagggagaaaagagatgtgaaagtgcacaccatttccttgaactgctcagacagagcggcggttgagttcctgagaaagctggcttccttcaccggcggacgctatcactgccctgtgggtgaggacacactctccaaaattcacagcctgctgaccaaaggcttcatcaatgaaaaggatcccacattgccaccatttgaaggagatgatttaaggatcctggcccaggagatcaccaaggccagaagcttcctctggcaggcccaatccttcagatcccaactccagaagaaaaatgatgcagaaccaaaggtcactctttcctagagaagtgttctcagaaaagtcatcctgcaaaggaccactcactgagcaaatctcagccccgagggcaggatgggatgaaatgctgtgacctgcaggaaacatgattcctggtaccaggactctctggaagctgaggaaggaaagactttgtcttttgtgtgaggggccattcccgggtcttaatctaactctccagccctgtcccgcagcgcactctactctccagccactagattgtccctctctgggaagccctaaaccaaccccctgcctaaatggtggtgcttcttgcaaaccaaccccctgcctgaacggtgcttcttgccccctctgcctggagactcctgctcatccatcaaggcacagctcaaatgacatcagctccctgggacctatctagagcgaggggcctccagtctttctcttgcagcatcctgaccacgcagacctctcgcactcagcactctatgtcacgccaccttgctcgctgatctaactcttctccttgatggtgagctccttcgggatgagactggtgtcccaggatctgcaggtccccagaagctgccacataggagacacatggtgaacagtgagcaggcggctgagctgtgagagcctagctctggaaagcagctgatggggtggtctccaccctggttcataagaggctaatgcagagtcacagtcagcccatcctgggggaagaagaaacaagtgagcctcagcaccaccctccatccctgcccaaccaaactgaagtgaaggctgctcatctgggttcattttctaaaattaaaaacaattaattttattctactaataggatcaacatgactttaactgtttgaagtgatcattggcgtgtgtgtgtgtgcataaatttttagtgacataaaactttattaaaagactcataccataataaagaatttc

SEQ ID NO: 364 - DNA, 1238 bp, Homo sapiens
  source 1..1238: mol_type = genomic DNA
taagatgcggaggagggtgacgcactagctctccagttcgcccgttcctggcctgacccccaccaaggcccataccgcagtaggctcctcgggctgcccctcggttgacaatggtctccaggatggtctctaccatgctatctggcctactgttttggctggcatctggatggactccagcatttgcttacagcccccggacccctgaccgggtctcagaagcagatatccagaggctgcttcatggtgttatggagcaattgggcattgccaggccccgagtggaatatccagctcaccaggccatgaatcttgtgggcccccagagcattgaaggtggagctcatgaaggacttcagcatttgggtccttttggcaacatccccaacatcgtggcagagttgactggagacaacattcctaaggactttagtgaggatcaggggtacccagaccctccaaatccctgtcctgttggaaaaacagcagatgatggatgtctagaaaacacccctgacactgcagagttcagtcgagagttccagttgcaccagcatctctttgatccggaacatgactatccaggcttgggcaagtggaacaagaaactcctttacgagaagatgaagggaggagagagacgaaagcggaggagtgtcaatccatatctacaaggacagagactggataatgttgttgcaaagaagtctgtcccccatttttcagatgaggataaggatccagagtaaagagaagatgctagacgaaaacccacattacctgttaggcctcagcatggcttatgtgcacgtgtaaatggagtccctgtgaatgacagcatgtttcttacatagataattatggatacaaagcagctgtatgtagatagtgtattgtcttcacaccgatgattctgctttttgctaaattagaataagagcttttttgtttcttgggtttttaaaatgtgaatctgcaatgatcataaaaattaaaatgtgaatgtcaacaataaaaagcaagactatgaaaggctcagatttcttgcagtttaaaatggtgtctgaggttgtactattttggccaagtctgtagaaagctgtcatttgattttgattatgtagttcatccagcccttgggcattgttatacaccagtaaagaaggctgtactcaagaggaggagctgacacatttcacttggctgcgtcttaataaacatgaatgcaagcattggca

SEQ ID NO: 365 - DNA, 1980 bp, Homo sapiens
  source 1..1980: mol_type = genomic DNA
atgtgtacaaagacaatcccagtcctctggggatgtttcctcctgtggaatctctatgtctcatcctctcagaccatttaccctggaatcaaggcaaggattactcagagggcacttgactatggtgttcaagctggaatgaagatgattgagcaaatgctaaaagaaaagaaactcccagatttaagcggttctgagtctcttgaatttctaaaagttgattatgtaaactacaatttttcaaatataaaaatcagtgccttttcatttccaaatacctcattggcttttgtgcctggagtgggaatcaaagcgctaaccaaccatggcactgccaacatcagcacagactgggggttcgagtctccacttttccaagacacaggaggggctgatctgtttctctccggagtctactttaccggtatcattatcctaacccgaaatgactttggtcatcctaccctgaagctccaagattgctacgcccaactgagccatgcccacgtctcattttccggagaactcagtgttctgtataactcctttgctgagcccatggagaaacccattttaaagaacttaaatgaaatgctctgtcccattattgcaagtgaagtcaaagcgctaaatgccaacctcagcacactggaggttttaaccaagattgacaactacactctgctggattactccctaatcagttctccagaaattactgagaactaccttgacctgaacttgaagggtgtattctacccactggaaaacctcaccgacccccccttctcaccagttccttttgtgctcccagaacgcagcaactccatgctctacattggaatcgccgagtatttctttaaatctgcgtcctttgctcatttcacagctggggttttcaatgtcactctctccaccgaagagatttccaaccattttgttcaaaactctcaaggccttggcaacgtgctctcccggattgcagagatctacatcttgtcccagcccttcatggtgaggatcatggccacagagcctcccataatcaatctacaaccaggcaatttcaccctggacatccctgcctccatcatgatgctcacccaacccaagaactccacagttgaaaccatcgtttccatggacttcgttgctagtaccagtgttggcctggttattttgggacaaagactggtctgctccttgtctctgaacagattccgccttgctttgccagagtccaatcgcagcaacattgaggtcttgaggtttgaaaatattctatcgtccattcttcactttggagtcctcccactggccaatgcaaaattgcagcaaggatttcctctgtccaatccacacaaattcttattcgtcaattcagatattgaagttcttgagggtttccttttgatttccaccgacctgaagtatgaaacatcctcaaagcagcagccaagtttccacgtatgggaaggtctgaacctgataagcagacagtggagggggaagtcagccccttgattgccggtttgcaattcaccccaggaagtaaatggtccttaatcctacaactactgtaaacccagaagggaaagacagtacacactggaattgtaaagcccttgtgaattgcttaggcagaaagttttctttcttaagccttcaggaacccagaataaggcagactctgttaaagggataaatagaggtgtctgaatgtgagtgtatgcatgctgcgtgtgtctgtgtttatgtttgtttgtttgtttggggcaagaaagattctaggacaagagctaggcatgtacttctgaccaggtgggtaagcaactctaagtctgtatttgtattggtcattctcagtggaaatcccttaggccctctagtggttttcccctacctgcatattggttttcatgttttatattcactgttactatcttctgtgtttaattaaaattgttttctatcaacttc

SEQ ID NO: 366 - DNA, 1197 bp, Homo sapiens
  source 1..1197: mol_type = genomic DNA
actaccctgtggtccctgaggagcattacactgagaagttttctcctattttgtctttcattctccacatcctcttttgttctagtgcatggcatgggaagccctctctaggaggatgctgtggccacacaagtgctggacgaaccgctggagtaggtgacttccaaggtgtcctgatgtagtagctattagacaagctcctgcatttggccagtaattagcatgctgctgcacattgccactaggtggtgctgctgctccattcccaagtaacccacatgcatccctggctggggtcagccttggggtttcccaagtgtagaggaatccatctctgtgcctgtggtaatggctggacaccaggtgagaccctgtctcaaaacaaaacagaaataacaaaaaataaggtgacttgctggaggccacatggctgtgagccaaatacaggtctgggttatcagggctcacatacttctaagtacaccctactgccttggaatctgctgaagaccaagcccctgcccccaagccatggcaaagaaggagggaaggaagcaaaggtgcccagcggggacaactcggggaggggcgaggtgcccagggcccaggaaggccaagcagcatgtggcagggcagcatcaggtgactcccaagaaggaatgaggagaggatatgaggaaagagccacagcacagaggcctgctgttaggtcagcggagaccacggcccatgggacctggatctacccttgatgctaacaatgttctttggggaaaaaatctataatcacaaagtttctgcaactggactgtagtcatggttgcagaactgtatagatttactaggaaccatcaaattgttcacttacaatgggtaaattgtacagtacataggttatccctcagtaaagctgtatgaaatttatagtcatgaaactaatagtgacaaacgagctgggtaagtaggtctcagctgttctgtaggcactttgagaagaggaagagtagcatctcggttttaataaaagaaagcctggcccatggcgtccagcttctgcttgaatactttcagtgcccgggagctcagtatctcaaagcagcccactcctgtttaagagaactctaaaccttagaatgttgaaatacatcattattattctagtactgctgtgaaaaataaatgtctttgttttgccac

SEQ ID NO: 367 - DNA, 213 bp, Homo sapiens
  source 1..213: mol_type = genomic DNA
atgtccaacaacatggccaagattgccgaggcccgcaagacggtggaacagctgaagctggaggtgaacatcgaccgcatgaaggtgtcgcaggcagcagcggaactcctggctttctgcgagacgcatgccaaagatgacccgctggtgacgccagtacccgccgcggagaaccccttccgcgacaagcgcctcttttgtgttctgctctga

SEQ ID NO: 368 - DNA, 961 bp, Homo sapiens
  source 1..961: mol_type = genomic DNA
ggccgttggttggtgcgcggctgaagggtgtggcgcgagcagcgtcgttggttggccggcggcgggccgggacgggcatggccctgctgctgtgcctggtgtgcctgacggcggcgctggcccacggctgtctgcactgccacagcaacttctccaagaagttctccttctaccgccaccatgtgaacttcaagtcctggtgggtgggcgacatccccgtgtcaggggcgctgctcaccgactggagcgacgacacgatgaaggagctgcacctggccatccccgccaagatcacccgggagaagctggaccaagtggcgacagcagtgtaccagatgatggatcagctgtaccaggggaagatgtacttccccgggtatttccccaacgagctgcgaaacatcttccgggagcaggtgcacctcatccagaacgccatcatcgaaagccgcatcgactgtcagcaccgctgtggcatcttccagtacgagaccatctcctgcaacaactgcacagactcgcacgtcgcctgctttggctataactgcgagtcctcggcgcagtggaagtcagctgtccagggcctcctgaactacataaataactggcacaaacaggacacgagcatgagcctggtatcgccagccttaaggtgtctggagcccccacacttggccaacctgaccttggaagatgctgctgagtgtctcaagcagcactgacagcagctgggcctgccccagggcaacgtgggggcggagactcagctggacagcccctgcctgtcactctggagctgggctgctgctgcctcaggaccccctctccgaccccggacagagctgagctggccagggccaggagggcgggagggagggaatgggggtgggctgtgcgcagcatcagcgcctgggcaggtccgcagagctgcgggatgtgattaaagtccctgatgtttctc

SEQ ID NO: 369 - DNA, 699 bp, Homo sapiens
  source 1..699: mol_type = genomic DNA
aacagaacagaaagctctccctcttgtgtgaggcagttgctgtggaaaccccacgggcaggaggcccccggccagcacatcctgtctgcttgtgtctgctgcagagttctgggaccggggccatgtctccacacctcactgctctcctgggcctagtgctctgcctggcccagaccatccacacgcaggagggggcccttcccagaccctccatctcggctgagccaggcactgtgatctccccggggagccatgtgactttcatgtgccggggcccggttggggttcaaacattccgcctggagagggaggatagagccaagtacaaagatagttataatgtgtttcgacttggtccatctgagtcagaggccagattccacattgactcagtaagtgaaggaaatgccgggctttatcgctgcctctattataagccccctggatggtctgagcacagtgacttcctggagctgctggtgaaagaaagctctggaggcccggactccccggacacagagcccggctcctcagctgggactgtgccaggcactgaagcctccggatttgatgcaccatgaatgaggagaaatggcctcccgtcttgtgaacttcaatggggagaaataattagaatgagcaatagaaatgcacagatgcctatacatacatatacaaataaaaagatacgattcgcaa

SEQ ID NO: 370 - DNA, 1365 bp, Homo sapiens
  source 1..1365: mol_type = genomic DNA
atgcagctcagcctgggctacacagccaggtgtcagatgtgtctctgctgatctgagtctgcctgtggcatggacctgcatcttccctgaagcatctccagggctgaaaaatcactgaccatggcaccatggtctcatccatctgcacagctgcagccagtgggaggagacgccgtgagccctgccctcatggttctgctctgcctcgggctgagtctgggccccaggacccacgtgcaggcagggaacctctccaaagccaccctctgggctgagccaggctctgtgatcagccgggggaactctgtgaccatccggtgtcaggggaccctggaggcccaggaataccgtctggttaaagagggaagcccagaaccctgggacacacagaacccactggagcccaagaacaaggccagattctccatcccatccatgacagagcaccatgcagggagataccgctgttactactacagccctgcaggctggtcagagcccagcgaccccctggagctggtggtgacaggattctacaacaaacccaccctctcagccctgcccagtcctgtggtgacctcaggagagaacgtgaccctccagtgtggctcacggctgagattcgacaggttcattctgactgaggaaggagaccacaagctctcctggaccttggactcacagctgacccccagtgggcagttccaggccctgttccctgtgggccctgtgacccccagccacaggtggatgctcagatgctatggctctcgcaggcatatcctgcaggtatggtcagaacccagtgacctcctggagattccggtctcaggagcagctgataacctcagtccgtcacaaaacaagtctgactctgggactgcctcacaccttcaggattacgcagtagagaatctcatccgcatgggcatggccggcttgatcctggtggtccttgggattctgatatttcaggattggcacagccagagaagcccccaagctgcagctggaaggtgaacagaagagagaacaatgcaccattgaatgctggagccttggaagcgaatctgatggtcctaggaggttcgggaagaccatctgaggcctatgccatctggactgtctgctggcaatttctttttttctttcttttcttttctttcttttttttttttttttttttttttttgagatggagtcttgctctgtcaccaggctggaatgcagtggcgcaatctgggctcactgcaacctccgcctctcgggttcaagtgattctcctgcctcagcctctggcaatttctagagggaggaatgggtgtttgagtgcagagacactggtctggggtgatccatggagga

SEQ ID NO: 371 - DNA, 1456 bp, Homo sapiens
  source 1..1456: mol_type = genomic DNA
cctgctgggaggcgaagaccaggcgggcactgttgcccggcgacgctccggcgctgggtccccgaggcccggcccctccccgggaggaggtgggcttcgagtcacgtgacccgtgccctacgggagggggtgcggtcggggacccggcaggaggcggccgagaagagaggaccgtgggggcgttcgcgtggctcccagcccgggaccccacccccgctggacagtgggggaaactgaggcctgagcgggcccacacaggaccatgaaggtgcttctcctcacagggctgggggccctgttcttcgcctattattgggatgacaacttcgacccaggcgggctggactacctcgtgctgaaccacatcggcggcgccccggccggcacgcgagcccgcagcccccaggcaactcgctggctcatgcaggtaaactttgtgagctacgtgcaactgacgtcgcgggcgctgcccagcctgacggacagcaagggctccctggtggtggtgtcctcgctgctcggccgcgtgcccacgtcgttctccactccctactcggcggccaagtttgcgctggacggcttcttcggctccctgcggcgggagctggacgtgcaggacgtgaacgtggccatcaccatgtgcgtcctgggcctccgagatcgcgcctccgccgccgaggcagtcaggggagtcacgagggtcaaggcggccccggggcccaaggcagccctggccgtgatccgcggcggcgccacgcgcgcggccggcgtcttctacccgtggcgtttccgcctgctgtgcttgctccggcgctggctaccgcgcccgcgggcctggtttatccgccaggagctcaacgtcacggccgcggcagcctgagcaccggggggtgcccctccagtcccagacggcaatgttcctccctccaactgtccctggagccagaacactcacagagacacccctgagagggtggccacagcccaagatgaagtcatcaagacagaaaagcaaaaccgagaaaaacgacgggcacctggaaccagtcacggcttgggaggtgcaggtgccccgtgttaggcgcctttgtcggggacttgcaaggcctcacctgtttggccatgattgatgacgtgactgcttccattttgcagatgaggaaactaaggctcagagaggccacgccacccttgagccacccatggacccctctccatctcctgcctgcgcctttaagtccctgatttattctttccattcattccatctgggaggaacccccccaactcctgccagcttcccctagctggggtctctggtactcttcacacctgcaggggcgtctacactgttcgtctacctggtggcagggtctgagcgggaggaggagggaaagagtgtgttctgagctggacccagcctcttgttcgagaataaaaactcttcttctcttgc

SEQ ID NO: 372 - DNA, 1996 bp, Homo sapiens
  source 1..1996: mol_type = genomic DNA
atctacgtcattccgtagcctccgctgccgccatctttgttggggctgacaacctgcaagccaagaagtacgagaagggccaggcgcggtggctcacgcctgtaatcccagcactttgggaggccgagacgggtggatcacctgaggtcaggagttcgagaccagcctgaccaacgtggtgaaaccctgtctctactaaatacaaaatattagccggacgtgggggcgcgtgcctgtaatcccagctacttgggaggctgaggcaggagaatcgcttgaacccgggaggcggaggttgcagtgagccgagattccgccagtgcactccagcctggacaacaagagctaaaactctgtctcagaaaaaaaaaaaaaaagtacctggaaaaagtcgcagacagcgagcttttcgccagtgccaggaatacagataaaacgagagagactaagggagggagcgcgagcactagcgcgcgagagagagagcgagagcgcgcgcgccgatgacgtcacgctcggcgtctcggccatcttagctgtagatagaggcggcaacctcggaagtgcggagcgggtgggcctatatagatgttgaggtgcggaggccgtgggcttttgttgggcctggctgtagccgcagcagcggtaatggcagcacggcttatgggctggtggggtccccgcgctggctttcgccttttcataccggaggagctgtctcgctaccgcggcggcccaggggacccgggcctgtacttggcgttgctcggccgtgtctacgatgtgtcctccggccggaggcactacgagcctgggtcccactatagcggcttcgcaggccgagacgcatccagagctttcgtgaccggggactgttctgaagcaggcctcgtggatgacgtatccgacctgtcagccgctgagatgctgacacttcacaattggctttcattctatgagaagaattatgtgtgtgttgggagggtgacaggacggttctacggagaggatgggctgcccaccccggcactgacccaggtagaagctgcgatcaccagaggcttggaggccaacaaactacagctgcaagagaagcagacattcccgccgtgcaacgcggagtggagctcagccaggggcagccggctctggtgctcccagaagagtggaggtgtgagcagagactggattggcgtccccaggaagctgtataagccaggtgctaaggagccccgctgcgtgtgtgtgagaaccaccggcccccctagtggccagatgccggacaaccctccacacagaaatcgtggggacctggaccacccaaacttggcagagtacacaggctgcccaccgctagccatcacatgctcctttccactctaagccgtagcctcttctgttaataacacacagagagctctgccaagcacctgagtaggcccttgacacttgtgtgccctgggatgcctcctggcgcgaatcaggagggtctggaaggactctggctatattctgcaaatgtggctcatgccccttaccgtggctcggcgttgtggtgcctgagggacagccggccacctgcccagtactggtcagcttttcaacactattccctttgacctactggccatcttcctcacagccctcagatatcaacgggcacaaataagaccaactcaatttccacttgaatttacaaccaaaagcctgctgagttgattacagctgggccaatacagtacgaggcaataacaaattagtgtgggttgattctggaattggaaaagcttttgcttgtatggatacagcaaatccagatgtctctgaacaaagcaacaatttaaagcaacgacattttctgtcctttaagcacttaaaatcaggtgtggtgtgttttcaaaggcagaagtctgcattttgagcaaaaggtggcttcccagctctaacaaggtaactggttagcatgacattaaagcttgggcaaggcttcaaactt

SEQ ID NO: 373 - DNA, 614 bp, Homo sapiens
  source 1..614: mol_type = genomic DNA
gtccaacacccctcactccctgtctcactcccccacggagactcaatttactttccatgtccacattcccagtgcttgcggaagatatcccgctaagagagagacatgtcaaagaggctgctgctgttgctgctgctgagcatgggcgggacatgggcatccaaggagccgcttcggccacggtgccgccccatcaatgccaccctggctgtggagaaggagggctgccccgtgtgcatcaccgtcaacaccaccatctgtgccggctactgccccaccatgacccgcgtgctgcagggggtcctgccggccctgcctcaggtggtgtgcaactaccgcgatgtgcgcttcgagtccatccggctccctggctgcccgcgcggcgtgaaccccgtggtctcctacgccgtggctctcagctgtcaatgtgcactctgccgccgcagcaccactgactgcgggggtcccaaggaccaccccttgacctgtgatgacccccgcttccaggactcctcttcctcaaaggcccctccccccagccttccaagtccatcccgtctcccggggccctaggacaccccgatcctcccacaataaaggcttctcaatccgca

SEQ ID NO: 374 - DNA, 917 bp, Homo sapiens
  source 1..917: mol_type = genomic DNA
tgcaggaaagcctcaagtagaggagggttgaggcttcaatccagcactttgctcgggtcacggcctcctcctggctcccaggaccccaccataggcagaggcaggccttcctacaccctactccctgtgcctccaggctcgactagtccctagcactcgacgactgagtctctgagatcacttcaccgtggtctccgcctcacccttggcgctggaccagtgagaggagagggctggggcgctccgctgagccactcctgcgcccccctggccttgtctacctcttgccccccgaagggttagtgtcgagctcaccccagcatcctacaacctcctggtggccttgccgcccccacaaccccgaggtataaagccaggtacacgaggcaggggacgcaccaaggatggagatgttccaggggctgctgctgttgctgctgctgagcatgggcgggacatgggcatccaaggagccgcttcggccacggtgccgccccatcaatgccaccctggctgtggagaaggagggctgccccgtgtgcatcaccgtcaacaccaccatctgtgccggctactgccccaccatgacccgcgtgctgcagggggtcctgccggccctgcctcaggtggtgtgcaactaccgcgatgtgcgcttcgagtccatccggctccctggctgcccgcgcggcgtgaaccccgtggtctcctacgccgtggctctcagctgtcaatgtgcactctgccgccgcagcaccactgactgcgggggtcccaaggaccaccccttgacctgtgatgacccccgcttccaggactcctcttcctcaaaggcccctccccccagccttccaagtccatcccgactcccggggccctcggacaccccgatcctcccacaataaaggcttctcaatccg

SEQ ID NO: 375 - DNA, 1664 bp, Homo sapiens
  source 1..1664: mol_type = genomic DNA
aggaaggaagctggactgtagagcgctctgggccaccccgcgttagctgctgcctctggcctcagtttccccaactgctcagattaatgatgcctgctctctagacccagaggacgaagctctaaggaggtcacagatgaggaagggtccagtgctcggcgcagactccgtgcggagcccctaggccccgcagctcgcccctccctctcccctactcccctcctctccccctcccgtctctcccccgcctcttcgctctcgctcggctccctctctagctgaccttccctttccctcacgcctccccacgcccggcccctggccccagcaccctgtccgctgccgcctcagagccgggaaaagcagccggagcccccgccgcccctgccgcagcgcgggcggtcagcgcgcagcccggcacccgcagcctgcagcctgcagcccgcagcccgcagcccggagccagatcgcgggctcagaccgaacccgactcgaccgccgcccccagccaggcgccatgctgccgcttctgctgggcctgctgggcccagcggcctgctgggccctgggcccgacccccggcccgggatcctctgagctgcgctcggccttctcggcggcacgcaccacccccctggagggcacgtcggagatggcggtgaccttcgacaaggtgtacgtgaacatcgggggcgacttcgatgtggccaccggccagtttcgctgccgcgtgcccggcgcctacttcttctccttcacggctggcaaggccccgcacaagagcctgtcggtgatgctggtgcgaaaccgcgacgaggtgcaggcgctggccttcgacgagcagcggcggccaggcgcgcggcgcgcagccagccagagcgccatgctgcagctcgactacggcgacacagtgtggctgcggctgcatggcgccccgcagtacgcgctaggcgcgcccggcgccaccttcagcggctacctagtctacgccgacgccgacgctgacgcgcctgcgcgcgggccgcccgcgccccccgagccgcgctcggccttctcggcggcgcgcacgcgcagcttggtgggctcggacgctggccccgggccgcggcaccaaccactcgccttcgacaccgagttcgtcaacattggcggcgacttcgacgcggcggccggcgtgttccgctgccgtctgcccggcgcctacttcttctccttcacgctgggcaagctgccgcgtaagacgctgtcggttaagctgatgaagaaccgcgacgaggtgcaggccatgatttacgacgacggcgcgtcgcggcgccgcgagatgcagagccagagcgtgatgctggccctgcggcgcggcgacgccgtctggctgctcagccacgaccacgacggctacggcgcctacagcaaccacggcaagtacatcaccttctccggcttcctggtgtaccccgacctcgcccccgccgccccgccgggcctcggggcctcggagctactgtgagccccgggccagagaagagcccgggagggccaggggcgtgcatgccaggccgggccggaggctcgaaagtcccgcgcgagcgccacggcctccgggcgcgcctggactctgccaataaagcggaaagcgggcacgcgcagcgcccggcagcccaggc

SEQ ID NO: 376 - DNA, 1130 bp, Homo sapiens
  source 1..1130: mol_type = genomic DNA
ccaacgcttctgccaccgccgaccacggccctgcgccccagccaggcctgaggacatgaggcggccggcggcggtgccgctcctgctgctgctgtgttttgggtctcagagggccaaggcagcaacagcctgtggtcgccccaggatgctgaaccgaatggtgggcgggcaggacacgcaggagggcgagtggccctggcaagtcagcatccagcgcaacggaagccacttctgcgggggcagcctcatcgcggagcagtgggtcctgacggctgcgcactgcttccgcaacacctctgagacgtccctgtaccaggtcctgctgggggcaaggcagctagtgcagccgggaccacacgctatgtatgcccgggtgaggcaggtggagagcaaccccctgtaccagggcacggcctccagcgctgacgtggccctggtggagctggaggcaccagtgcccttcaccaattacatcctccccgtgtgcctgcctgacccctcggtgatctttgagacgggcatgaactgctgggtcactggctggggcagccccagtgaggaagacctcctgcccgaaccgcggatcctgcagaaactcgctgtgcccatcatcgacacacccaagtgcaacctgctctacagcaaagacaccgagtttggctaccaacccaaaaccatcaagaatgacatgctgtgcgccggcttcgaggagggcaagaaggatgcctgcaagggcgactcgggcggccccctggtgtgcctcgtgggtcagtcgtggctgcaggcgggggtgatcagctggggtgagggctgtgcccgccagaaccgcccaggtgtctacatccgtgtcaccgcccaccacaactggatccatcggatcatccccaaactgcagttccagccagcgaggttgggcggccagaagtgagacccccggggccaggagccccttgagcagagctctgcacccagcctgcccgcccacaccatcctgctggtcctcccagcgctgctgttgcacctgtgagccccaccagactcatttgtaaatagcgctccttcctcccctctcaaatacccttattttatttatgtttctcccaataaaaacccagcctgtgtgccagctg

SEQ ID NO: 377 - DNA, 875 bp, Homo sapiens
  source 1..875: mol_type = genomic DNA
acccctgccagcggcaccatggctttcctctggctcctctcctgctgggccctcctgggtaccaccttcggctgcggggtccccgccatccaccctgtgctcagcggcctgtccaggatcgtgaatggggaggacgccgtccccggctcctggccctggcaggtgtccctgcaggacaaaaccggcttccacttctgcgggggctccctcatcagcgaggactgggtggtcaccgctgcccactgcggggtcaggacctccgacgtggtcgtggctggggagtttgaccagggctctgacgaggagaacatccaggtcctgaagatcgccaaggtcttcaagaaccccaagttcagcattctgaccgtgaacaatgacatcaccctgctgaagctggccacacctgcccgcttctcccagacagtgtccgccgtgtgcctgcccagcgccgacgacgacttccccgcggggacactgtgtgccaccacaggctggggcaagaccaagtacaacgccaacaagacccctgacaagctgcagcaggcagccctgcccctcctgtccaatgccgaatgcaagaagtcctggggcaggaggatcaccgacgtgatgatctgtgccggggccagtggcgtctcctcctgcatgggtgactctggaggccccctggtctgccagaaggacggagcctggaccctggtgggcattgtgtcctggggcagccgcacctgctctaccaccacgcccgctgtgtacgcccgtgtcgccaagctcataccctgggtgcagaagatcctggccgccaactgagcccgcagctcctgccacccctgccttaagatttcccattaaatgcatctgtttagaagccctga

SEQ ID NO: 378 - DNA, 885 bp, Homo sapiens
  source 1..885: mol_type = genomic DNA
gaggtgcggccccaaggggaggaggtgcccgctcaccgcagaccgcccgcggcagaggccgccccggtcgcgccgcggcgggagcggccggtggaggctgcgcggccgagggggagggccgggggagcggacgtcgcctctgctggtctcccacctcccgccgccccccgcccgcaggctcccaagccttagtcggcgccgagcatcccgctgccccggaccctcccgcgggcgcgcaccaggctcaactcaggctcaggactgcaggtagacatctccactgcccaggaatcactgagcgtgcagacagcacagcctcctctgaaggccggccataccagagtcctgcctcggcatgggcctcaccattgaggcagctccactgtctgtgctggtctgagggtgctgcctgtcatgggggcagccatctcccagggggccctcatcgccatcgtctgcaacggtctcgtgggcttcttgctgctgctgctctgggtcatcctctgctgggcctgccattctcgctctgccgacgttgactctctctctgaatccagaactcaagagtccgcctgcttggagctggacccagcggcccagagtctagccagcttggctccaataggagctcagtggccctaaggagatgggcctggggtgggggcttatgagttggtgctagagccagggccatctggactatgctccatcccaagggccaagggtcaggggccgggtccactctttccctaggctgagcacctctaggccctctaggctggggaagcaaactggaacccatggcaataataggagggtgtccaggctgggcccctcccctggtcctcccagtgtttgctggataataaatggaactatggctct

SEQ ID NO: 379 - DNA, 1927 bp, Homo sapiens
  source 1..1927: mol_type = genomic DNA
tgccagcccaagtcggaacttggatcacatcagatcctctcgagctccagcaggagaggcccttcctcgcctggcagcccctgagcggctcagcagggcaccatggcaagatcccttctcctgcccctgcagatcttactgctatccttagccttggaaactgcaggagaagaagcccagggtgacaagattattgatggcgccccatgtgcaagaggctcccacccatggcaggtggccctgctcagtggcaatcagctccactgcggaggcgtcctggtcaatgagcgctgggtgctcactgccgcccactgcaagatgaatgagtacaccgtgcacctgggcagtgatacgctgggcgacaggagagctcagaggatcaaggcctcgaagtcattccgccaccccggctactccacacagacccatgttaatgacctcatgctcgtgaagctcaatagccaggccaggctgtcatccatggtgaagaaagtcaggctgccctcccgctgcgaaccccctggaaccacctgtactgtctccggctggggcactaccacgagcccagatgtgacctttccctctgacctcatgtgcgtggatgtcaagctcatctccccccaggactgcacgaaggtttacaaggacttactggaaaattccatgctgtgcgctggcatccccgactccaagaaaaacgcctgcaatggtgactcagggggaccgttggtgtgcagaggtaccctgcaaggtctggtgtcctggggaactttcccttgcggccaacccaatgacccaggagtctacactcaagtgtgcaagttcaccaagtggataaatgacaccatgaaaaagcatcgctaacgccacactgagttaattaactgtgtgcttccaacagaaaatgcacaggagtgaggacgccgatgacctatgaagtcaaatttgactttacctttcctcaaagatatatttaaaccaacctcatgccctgttgataaaccaatcaaattggtaaagacctaaaaccaaaacaaataaagaaacacaaaaccctcagtgctggagaagagtcagtgagaccagcactctcaaacactggaactggacgttcgtacagtctttacggaagacacttggtcaacgtacaccgagacccttattcaccacctttgacccagtaactctaatcttaggaagaacctactgaaacaaaaaaaatccaaaatgtagaacaagacttgaatttaccatgatattatttatcacagaaatgaagtgaaaccatcaaacatgttccaaaagtaccagatggcttaaataatagtctggcttggcacaacgatgttttttttctttgagacagagtctctgttgcttgggctgcaatgcagtgatgcaatcttggctcactgcaacctccgcctcctgggttcaagtgattctcgtgcttcagcctcccaagtacctgggactacaggtgtgcaccaccacaccaggctaattttttgtgtatttttactagagacagggtttcaccatgttggccagcatggtcttgaacgcctgacctcagatgatccacccaccttggcctcccaaagtgctgggattacaggcatgagccaccacggccagcccacaatgatattacaaacctattaaaaatgatacttagacagaattgtcagtattattcaagaacatttaggctataggatgttaaatgacaaaaggaaggacaaaaatatatatgtatgtgaccctacccataaaaaatgaaatattcacagaatcagatctgaaaacacatgtcccagactgcatactggggtcgtcatgaggtgtctccttccttctgtgtacttttccttgaatgtgcacttttataacatgaaaaataaaggtggggaaaaaagtctgaaga

SEQ ID NO: 380 - DNA, 595 bp, Homo sapiens
  source 1..595: mol_type = genomic DNA
aagtcacctgggagggcttacaggtgccataatgaaggcctggggcactgtggtagtgaccttggccacgctgatggttgtcactgtggatgccaagatctatgaacgctgcgagctggcggcaagactggagagagcagggctgaacggctacaagggctacggcgttggagactggctgtgcatggctcattatgagagtggctttgacaccgccttcgtggaccacaatcctgatggcagcagtgaatatggcattttccaactgaattctgcctggtggtgtgacaatggcattacacccaccaagaacctctgccacatggattgtcatgacctgctcaatcgccatattctggatgacatcaggtgtgccaagcagattgtgtcctcacagaatgggctttctgcctggacttcttggaggctacactgttctggccatgatttatctgaatggctcaaggggtgtgatatgcatgtgaaaattgatccaaaaattcatccatgactcagattcgaagagacagattttatcttcctttcatttctttctcttgtgcatttaataaaggatggtatctataaacaatgc

SEQ ID NO: 381 - DNA, 767 bp, Homo sapiens
  source 1..767: mol_type = genomic DNA
aagccacctcaagtggacaaggcacttaccaacagagattgctgatttgctccttaagcaagagattcactgccgctaagcatggctcagaccaactcgttcttcatgctgatctcctccctgatgttcctgtctctgagccaaggccaggagtcccagacagagctgcctaatccccgaatcagctgcccagaaggcaccaatgcctatcgctcctactgctactactttaatgaagaccctgagacctgggttgatgcagatctctattgccagaacatgaattcaggcaacctggtgtctgtgctcacccaggcggagggtgccttcgtggcctcactgattaaggagagtagcactgatgacagcaatgtctggattggcctccatgacccaaaaaagaaccgccgctggcactggagtagtgggtccctggtctcctacaagtcctgggacactggatccccgagcagtgctaatgctggctactgtgcaagcctgacttcatgctcaggattcaagaaatggaaggatgaatcttgtgagaagaagttctcctttgtttgcaagttcaaaaactagaggaagctgaaaaatggatgtctagaactggtcctgcaattactatgaagtcaaaaattaaactagactatgtctccaactcagttcagaccatctcctccctaatgagtttgcatcgctgatcttcagtaccttcacctgtctcagtctctagagccctgaaaaataaaaacaaacttattttt

SEQ ID NO: 382 - DNA, 718 bp, Homo sapiens
  source 1..718: mol_type = genomic DNA
cataccatatcccaccagagagtgactcctgattgcctcctcaagtcgcagacactatgctgcctcccatggccctgcccagtgtatcttggatgctgctttcctgcctcatgctgctgtctcaggttcaaggtgaagaaccccagagggaactgccctctgcacggatccgctgtcccaaaggctccaaggcctatggctcccactgctatgccttgtttttgtcaccaaaatcctggacagatgcagatctggcctgccagaagcggccctctggaaacctggtgtctgtgctcagtggggctgagggatccttcgtgtcctccctggtgaagagcattggtaacagctactcatacgtctggattgggctccatgaccccacacagggcaccgagcccaatggagaaggttgggagtggagtagcagtgatgtgatgaattactttgcatgggagagaaatccctccaccatctcaagccccggccactgtgcgagcctgtcgagaagcacagcatttctgaggtggaaagattataactgtaatgtgaggttaccctatgtctgcaagttcactgactagtgcaggagggaagtcagcagcctgtgtttggtgtgcaactcatcatgggcatgagaccagtgtgaggactcaccctggaagagaatattcgcttaattcccccaacctgaccacctcattcttatctttcttct

SEQ ID NO: 383 - DNA, 6420 bp, Homo sapiens
  source 1..6420: mol_type = genomic DNA
cttgaggattcagtctggtcctgaagggtttggggggagactgcgaccagaagatgtttccatgtcctaattaatgggtgatggtggttgttagtctgactgttgccacggtgatgaagggagacatccaagtgctggtttcagtactgaggcgaatacagggaatttcaacaggctccaggtcttactatgcagcctgaagtgggaccatcccttaaacccactccatcctgtggccacgatgggggccaggacacctttgccttctttctgggtttctttctttgccgagacagggattttgttcccaggaggcactccctggcccatgggatctcagcattcaaagcagcacaggaaacctgggcccctgaaacggggccaccgaagagatcggagaacaaccaggaggaagtactggaaggaaggaagggagatcgctcgtgtcttagatgatgagggcagaaacctgaggcagcagaagcttgatcggcagcgggccctgctggagcagaagcagaagaagaagcgccaggagcccctgatggtgcaggccaatgcagatgggcggccccggagccggcgggcccggcagtcagaggaacaagcccccctggtggagtcctacctcagcagcagtggcagcaccagctaccaagttcaagaggccgactcactcgccagtgtgcagctgggagccacgcgcccaacagcaccagcttcagccaagagaaccaaggcggcagctacagcagggggccagggtggcgccgctaggaaggagaagaagggaaagcacaaaggcaccagcgggccagcagcactggcagaagacaagtctgaggcccaaggcccagtgcagattctgactgtgggccagtcagaccacgcccaggacgcaggggagacggcagctggtgggggcgaacggcccagcgggcaggatctccgtgccacgatgcagaggaagggcatctccagcagcatgagctttgacgaggatgaggaggatgaggaggagaatagctccagctcctcccagctaaatagtaacacccgccccagctctgctactagcaggaagtccgtcagggaggcagcctcagcccctagcccaacagctccagagcaaccagtggacgttgaggtccaggatcttgaggagtttgcactgaggccggccccccagggtatcaccatcaaatgccgcatcactcgggacaagaaagggatggaccggggcatgtaccccacctactttctgcacctggaccgtgaggatgggaagaaggtgttcctcctggcgggaaggaagagaaagaagagtaaaacttccaattacctcatctctgtggacccaacagacttgtctcgaggaggggacagctatatcgggaaactgcggtccaacttgatgggcaccaagttcactgtttatgacaatggagtcaaccctcagaaggcctcatcctccactttggaaagtggaaccttacgtcaggagctggcagctgtgtgctacgagacaaacgtcttaggcttcaaggggcctcggaagatgagcgtgattgtcccaggcatgaacatggttcatgagagagtctctatccgcccccgcaacgagcatgagacactgctagcacgctggcagaataagaacacggagagtatcatcgagctgcaaaacaagacacctgtctggaatgatgacacacagtcctatgtactcaacttccatgggcgcgtcacacaggcctccgtgaagaacttccagatcatccatggcaatgacccggactacatcgtgatgcagtttggccgggtagcagaggatgtgttcaccatggattacaactacccgctgtgtgcactgcaggcctttgccattgccctgtccagcttcgacagcaagctggcgtgcgagtagaggcctcttcgtgccctttggggttgcccagcctggagcggagcttgcctgcctgcctgtggagacagccctgcctatcctctgtatataggccttccgccagatgaagctttggccctcagtgggctccctggcccagccagccaggaactggctcctttgcctctgctactgaggcaggggagtagtggagagcgggtgggtgggtgtgaagggatgagaataattctttccatgccacgagatcaacacacactcccacccttggggtagtagtgtgttgtagtcgtacttaccaagctgagcaacctcttcagctgggaaggccgcaagaggcatagagggagaggaagcacactgcagggctgctgtggcccagtcgtccgctcagccaaggagtcagatggcaatgggtactccagcaggtaggggcacagtgaatgtgtgtatgtatgaaggccacatcaactttatgtagcaaagggcttggtggccaagcctggcccttaaacaactgcagaaagcccttcaacttcagaaggcctcactcaagcctgagagaagttgggagggtggtggggacaggtaagtggcaggaccctgtcaggattgcaggtgcctggcttgctgtggctatgggaatcagctggtggctaggtttctagcgcatttgatttctccaggtttgctgtgtctcacagaggcagtaggaacccagctctcagggctgtcttggtggatgggccctgcaagacacaggctcagcatgcagaagtgcatgaacagggtccctggatcagggttgttctgggagtcctgtcagcttccccaggagctctctgctgagcagcccagcacaacccccaggaaacacaaatggggtccaggtcaccagcctgactgcacacagctaggcatgcctgggaatcctgctgccagagaaccattcccaagccatggcatgctccttgaagaatctctcctctctctctctctctggaaagacccaactttctcactgctgtcagccaagtcatggttggtaaccatgtaggttcttgggagggaatgggacagggtgaataaagcagggaatattttagaaccacaagagatcagcagtggcaggacccttaggaatctagtacaaccttgttgctttaggtgagtcacactcagaaaatggggcttgccctgggtcacctagctggttaatggcagcattcagaacttcaagttctcttgatttctttgttcccactgtcccccaagaaactagtatctctggcctcctgggggcccattctgcatgccctccccacttcccccgattcagagacttagaagcatcagagttgataaattagattgaaaccattccagtaggaaatcaggcagttccctgttgaaagttgtctggctttttgcacgtgagtatgatccaggattggcctgtgtctggcccctccgcgagggctactcagcagtaagcaggccttagtacggctgctgcacacttctcggtctaggtgggagagagtgcataaaggttctggggctgggcctgagcctaactccctccactaccgctatttctccttggatggcaccatccaccctgcaggcttgggaactgtaagctcaagcttttgctcatttgtcatttaccctggtggaggcttcttgcccagatagagatctgaaattggtgggaagcaagcaggggtcgtaccttgctttagagtagatgtttggaaaagctaagtagaaattttttaaaatagaagttgtattttaaacgtgttaggctttataggtgaaggacttgttttgacttaagtagaagtaatatgctctcatttctttgtaatctagattttcctatgttgaatgcttaaagcaaggcatacctgtcctagcaggatctgcccacacctcggccgtacatctctgtgagagaccccctccaacgattagcttttgcaacatggtccagtttctagagggcactagaactttgtgccagcgctggcgagataccatggtgccatcctcctttctatagttccagtttagcccttccctgcctttaaggagaagagatcttcatggtgacatttgagatgatggaaactagatcgtctctaatgttaggtcaagctatttctctggatctatgattttaagatagaacaggctggttctgagttctggtgagacggagaccccggtggcagtggaaaaatcagaagcacaaaggaaaactcttggcctctgctttctcctgtagcacaaagagggagttggctggatcttttggtggagtcaggaaagacaggctgagctttctagcctaagtgtggagaaggatagcctcagccacaaaactctgtcaggcattgaatgacaagcatcagtagctgagtgcactcctggtgatcctggttttccttgaccactggccctggggccatgggtgcatggactcgtaaagctgctagggcccctagaaaccacctgggttcagcctctcccacaataagagttcttgcccttcataccctctacctggatggatggtctttgggcagggaattaatgacagaatgagcagtccctaatggtattgggcagttgggagtgagtttaggcagcttctctgtaaccgcttctggggccacaccccaaaactctacaccctctgccccagaacaattctgcagagtggtgaagttcacttccccaactcttctccaagtctagctttcctttccttctggctccaaggtgctctgtgtccgtctgtgtatgtgtgtgtctgtgcgtctgtgtgtttatttggggaaaagggcaatcagcaatcaactgaggtttcttaattgtgattatattcctgagaatgaatgagtaggaaaggaataaggatgttgttatgatcgcctgtggattttgtccattcatctcatgctctctgaacagaaggtatacctgggaagataccagctttttctctcagggttctgagtcagaggacaccatccaagaatgttgttagcttttcagttcccgctctgcattgcctgaaaaaactggtatgttgcacgtatgcttttggttgaaattgaacatactctagtgaatgtgccttaaaaatcaagacactagttcagaggaagcacataatgtccagatctatggcgaacacaggtgttggaagccaggactgtgataatcagaagctataagagaactttcggagcctgcctccttcagtgacaagtagggcacaaaattctagaagcagaaggttgtttttttttttttttctccattctgaaaatagcaggacatttacctcttaaataaacttagcatttagaggtaattctaaatttaacaagtgacagggttggtttcaaagaaaaaggtccatgctttgcttacaatggagtctgcagtgaggggagatgctgggatagccatttccatggctctgttatgcaagcacaaatttcatctcctagatggacttcctggttttctcttactgcagtaacactggccttcccttctctaattccttaccccagctgcggcatccctgtgttaactcaggatgccaagtggccctcagattacacttctccagatagctgaatgagtctgctttcactgtgactgggacctgaatgacctgcagtcagggcccagagttgggactctatactaccctgggctctggtctgtaggtttgtagtagccaccggtaataagccaagggctaggctcttgtttgagtttatggccacctggaattttcagtcatctcatgatacaggcgggaggggcagaacagatagattacgacaggtttggtttttaaattttccaaccaagtggaaaggcaagttggtcttatagaaagcactactgcacttagtagctatgtgattttgagcaaaccacataatctctctaggtccattttcctaaccacaagataaagatgttacattgtcaaagcttgccgtaggatttggggtgaatgaaaattattccttgctttcatcactacctttatagctctcatcactacctttatagctcatcactgtgcctttttttctttcctaagaaagacatcacatccctctcctctcctcctctgtgctcctgtccctccctccccctagcaaggtccaggcaaagctggagatgaggctgagatccagagtttcctagaacgcaacttaggatggctaggaaagggaagcctgactgctcggtcaggagggtgcagtatctcttgctgggaacacagccagttttcacaatgcctagactgtgtatgtctatttgcacaagattgtcttttcctattttggagtggtcagacattttatttttgttcaagattatctggcgttttagacaaatttgcaaaactgtgcttttattgactttttgaataaactttggtattctggagcaaa

SEQ ID NO: 384 - DNA, 2136 bp, Homo sapiens
  source 1..2136: mol_type = genomic DNA
agctggattcacacacttggatgtagacctcgaccttcacaggactcttcattgctggttggcaatgatgtatcggccagatgtggtgagggctaggaaaagagtttgttgggaaccctgggttatcggcctcgtcatcttcatatccctgattgtcctggcagtgtgcattggactcactgttcattatgtgagatataatcaaaagaagacctacaattactatagcacattgtcatttacaactgacaaactatatgctgagtttggcagagaggcttctaacaattttacagaaatgagccagagacttgaatcaatggtgaaaaatgcattttataaatctccattaagggaagaatttgtcaagtctcaggttatcaagttcagtcaacagaagcatggagtgttggctcatatgctgttgatttgtagatttcactctactgaggatcctgaaactgtagataaaattgttcaacttgttttacatgaaaagctgcaagatgctgtaggaccccctaaagtagatcctcactcagttaaaattaaaaaaatcaacaagacagaaacagacagctatctaaaccattgctgcggaacacgaagaagtaaaactctaggtcagagtctcaggatcgttggtgggacagaagtagaagagggtgaatggccctggcaggctagcctgcagtgggatgggagtcatcgctgtggagcaaccttaattaatgccacatggcttgtgagtgctgctcactgttttacaacatataagaaccctgccagatggactgcttcctttggagtaacaataaaaccttcgaaaatgaaacggggtctccggagaataattgtccatgaaaaatacaaacacccatcacatgactatgatatttctcttgcagagctttctagccctgttccctacacaaatgcagtacatagagtttgtctccctgatgcatcctatgagtttcaaccaggtgatgtgatgtttgtgacaggatttggagcactgaaaaatgatggttacagtcaaaatcatcttcgacaagcacaggtgactctcatagacgctacaacttgcaatgaacctcaagcttacaatgacgccataactcctagaatgttatgtgctggctccttagaaggaaaaacagatgcatgccagggtgactctggaggaccactggttagttcagatgctagagatatctggtaccttgctggaatagtgagctggggagatgaatgtgcgaaacccaacaagcctggtgtttatactagagttacggccttgcgggactggattacttcaaaaactggtatctaagagagaaaagcctcatggaacagataacatttttttttgttttttgggtgtggaggccatttttagagatacagaattggagaagacttgcaaaacagctagatttgactgatctcaataaactgtttgcttgatgcatgtattttcttcccagctctgttccgcacataagcatcctgcttctgccagatcaactctgtcatctgtgagcaatagttgaaactttatgtacatagagaaatagataatacaatattacattacagcctgtattcatttgttctctagaagttttgtcagaattttgacttgttgacataaatttgtaatgcatatatacaatttgaagcactccttttcttcagttcctcagctcctctcatttcagcaaatatccattttcaaggtgcagaacaaggagtgaaagaaaatataagaagaaaaaaatcccctacattttattggcacagaaaagtattaggtgtttttcttagtggaatattagaaatgatcatattcattatgaaaggtcaagcaaagacagcagaataccaatcacttcatcatttaggaagtatgggaactaagttaaggaaatccagaaagaagccaagatatatccttattttcatttccaaacaactactatgataaatgtgaagaagattctgtttttttgtgacctataataattatacaaacttcatgcaatgtacttgttctaagcaaattaaagcaaatatttatttaacattgttactgaggatgtcaacatataacaataaaatataaatcaccca

SEQ ID NO: 385 - DNA, 1372 bp, Homo sapiens
  source 1..1372: mol_type = genomic DNA
cacactgggcctccactttgccctctttccttctcttctcctcacagcagtgcctggtcaaacccagcaacccttggccagaacttactcacccatcccactgacaccatgaagcctgtgctgcctctccagttcctggtggtgttctgcctagcactgcagctggtgcctgggagtcccaagcagcgtgttctgaagtatatcttggaacctccaccctgcatatcagcacctgaaaactgtactcacctgtgtacaatgcaggaagattgcgagaaaggatttcagtgctgttcctccttctgtgggatagtctgttcatcagaaacatttcaaaagcgcaacagaatcaaacacaagggctcagaagtcatcatgcctgccaactgaggcatatttcctagatcattttgcctctacgatgttttttcttggtccacctttaggaaggtattgagaagcaagaaactggaggcccaatatctaacctgcaaatcgtttttgagtttggcaataaaggctaatctaccataaaactcttgaagcttaagctttaggtcaacacttgcaagagccccttccaaagctcagcacagtttcctcctgggatgaggagaggaatcagaaaccccactttggcatagagacaagcagcactgttccagtccagggatgctgtgtgtgccctggtggtggtcttaaggacctaccacatcaacatctggacaaccctcactgattacctgcccttggttgcactcatcaggctaattgatcccatatttaacctcaaggagaaatatcaaccagacactgcatggcaacctccttggggccagccttcaaggcttcatggccatatcatgaacccaggacaggcacagtgggggtggtgaggacctgatagagttggatcagtgactaagaggctgcaataaggtgccatgaaatcaaaatcaaagggctagaactctccaaggtcttgcccccggcatgtagcaccacctgagccagaaactgcagaggacatgacagtgtggcattactgataagttatggaaatggaaataatctttcctaaactaccaataataactttaaatttttgatcaaccatgctagagcaaagattgaattatccttctgttctctctacagaaatgatataaaaactatagtcataagaagagacaatcaaaaataatcagccataaaatattaaaaaggtattataaaggtatttaaaataataataataaagtgttattttcctgggattcatgatatttgatatattcgtaagcttttgttaagtttgtaatttgttgcaatttctttttcatttcaaataaatattcacttacgtgtctaa

SEQ ID NO: 386 - DNA, 3003 bp, Homo sapiens
  source 1..3003: mol_type = genomic DNA
gggagggggctccgggcgccgcgcagcagacctgctccggccgcgcgcctcgccgctgtcctccgggagcggcagcagtagcccgggcggcgagggctgggggttcctcgagactctcagaggggcgcctcccatcggcgcccaccaccccaacctgttcctcgcgcgccactgcgctgcgccccaggacccgctgcccaacatggattttctcctggcgctggtgctggtatcctcgctctacctgcaggcggccgccgagttcgacgggaggtggcccaggcaaatagtgtcatcgattggcctatgtcgttatggtgggaggattgactgctgctggggctgggctcgccagtcttggggacagtgtcagcctgtgtgccaaccacgatgcaaacatggtgaatgtatcgggccaaacaagtgcaagtgtcatcctggttatgctggaaaaacctgtaatcaagatctaaatgagtgtggcctgaagccccggccctgtaagcacaggtgcatgaacacttacggcagctacaagtgctactgtctcaacggatatatgctcatgccggatggttcctgctcaagtgccctgacctgctccatggcaaactgtcagtatggctgtgatgttgttaaaggacaaatacggtgccagtgcccatcccctggcctgcagctggctcctgatgggaggacctgtgtagatgttgatgaatgtgctacaggaagagcctcctgccctagatttaggcaatgtgtcaacacttttgggagctacatctgcaagtgtcataaaggcttcgatctcatgtatattggaggcaaatatcaatgtcatgacatagacgaatgctcacttggtcagtatcagtgcagcagctttgctcgatgttataacatacgtgggtcctacaagtgcaaatgtaaagaaggataccagggtgatggactgacttgtgtgtatatcccaaaagttatgattgaaccttcaggtccaattcatgtaccaaagggaaatggtaccattttaaagggtgacacaggaaataataattggattcctgatgttggaagtacttggtggcctccgaagacaccatatattcctcctatcattaccaacaggcctacttctaagccaacaacaagacctacaccaaagccaacaccaattcctactccaccaccaccaccacccctgccaacagagctcagaacacctctaccacctacaaccccagaaaggccaaccaccggactgacaactatagcaccagctgccagtacacctccaggagggattacagttgacaacagggtacagacagaccctcagaaacccagaggagatgtgttcagtgttctggtacacagttgtaattttgaccatggactttgtggatggatcagggagaaagacaatgacttgcactgggaaccaatcagggacccagcaggtggacaatatctgacagtgtcggcagccaaagccccagggggaaaagctgcacgcttggtgctacctctcggccgcctcatgcattcaggggacctgtgcctgtcattcaggcacaaggtgacggggctgcactctggcacactccaggtgtttgtgagaaaacacggtgcccacggagcagccctgtggggaagaaatggtggccatggctggaggcaaacacagatcaccttgcgaggggctgacatcaagagcgaatcacaaagatgattaaagggttggaaaaaaagatctatgatggaaaattaaaggaactgggattattgagcctggagaagagaagactgaggggcaaaccattgatggttttcaagtatatgaagggttggcacagagagggtggcgaccagctgttctccatatgcactaagaatagaacaagaggaaactggcttagactagagtataagggagcatttcttggcaggggccattgttagaatacttcataaaaaaagaagtgtgaaaatctcagtatctctctctctttctaaaaaattagataaaaatttgtctatttaagatggttaaagatgttcttacccaaggaaaagtaacaaattatagaatttcccaaaagatgttttgatcctactagtagtatgcagtgaaaatctttagaactaaataatttggacaaggcttaatttaggcatttccctcttgacctcctaatggagagggattgaaaggggaagagcccaccaaatgctgagctcactgaaatatctctcccttatggcaatcctagcagtattaaagaaaaaaggaaactatttattccaaatgagagtatgatggacagatattttagtatctcagtaatgtcctagtgtggcggtggttttcaatgtttcttcatgttaaaggtataagcctttcatttgttcaatggatgatgtttcagatttttttttttttaagagatccttcaaggaacacagttcagagagattttcatcgggtgcattctctctgcttcgtgtgtgacaagttatcttggctgctgagaaagagtgccctgccccacaccggcagacctttccttcacctcatcagtatgattcagtttctcttatcaattggactctcccaggttccacagaacagtaatattttttgaacaataggtacaatagaaggtcttctgtcatttaacctggtaaaggcagggctggagggggaaaataaatcattaagcctttgagtaacggcagaatatatggctgtagatccatttttaatggttcatttcctttatggtcatataactgcacagctgaagatgaaaggggaaaataaatgaaaattttacttttcgatgccaatgatacattgcactaaactgatggaagaagttatccaaagtactgtataacatcttgtttattatttaatgttttctaaaataaaaaatgttagtggttttccaaatggcctaataaaaacaattatttgtaaataaaaacactgttagtaat

SEQ ID NO: 387 - DNA, 1508 bp, Homo sapiens
  source 1..1508: mol_type = genomic DNA
cctctttccaaaatggacaagtccctcttgctggaactccccatcctgctctgctgctttagggcattatctggatcactttcaatgagaaatgatgcagtcaatgaaatagttgctgtgaaaaacaattttcctgtgatagaaattgttcagtgtaggatgtgccacctccagttcccaggagaaaagtgctccagaggaagaggaatatgcacagcaacaacagaagaggcctgcatggttggaaggatgttcaaaagggatggtaatccctggttaaccttcatgggctgcctaaagaactgtgctgatgtgaaaggcataaggtggagtgtctatttggtgaacttcaggtgctgcaggagccatgacctgtgcaatgaagacctttagaagttaatggttcttctgtgactccaatttctgggtgaggttgttgcctcagcctcttcacaatgactttctaaaaaaaatcacacacacacacacacacactacagaagaggattgcaaacacatggctccatcttctgcacacgaaaggaaagtccctctccttttctacagtctctgtcacgccccttaaaataagtaaataaataaccttgagagaaagaacaagatcaatatatcctgcaggttgctacaaacccttgtgctttcactgtatagccagttcattcagaaaaggaggaaagggtagtttaatttcaaaaaagaatcccttcctctttcctctgctgctttccttccttctgtggcagggtattttaatatatttttcaaatttttttcctttctgtgttatccttcttatcccactccaaagaaagcacataactgtggcctgaagggatggggagtagcaacataaaaagaagtggctcaagtcttcttggagtttgttcatgaatgctgatcccagggtgaggagaagattgggacatagaaaggaaactgcatcagaaacatgaacagagaaagattgtctgccttctagaatcagatctgtttggggctgggggttggagaataaaagcaggagaagtctatgggattctagaaatagtacctgcatccagcttccctgccaaactcacaaggagacatcaacctctagacagggaacagcttcaggatacttccaggagacagagccaccagcagcaaaacaaatattcccatgcctggagcatggcatagaggaagctgagaaatgtggggtctgaggaagccatttgagtctggccactagacatctcatcagccacttgtgtgaagagatgccccatgaccccagatgcctctcccacccttacctccatctcacacacttgagcttgccactctgtataattctaacatcctggagaaaaatggcagtttgaccgaacctgttcacaagggtagaggctgatttctaacgaaacttgtagaatgaagcctggaaagagtgatgaattatattatattatataaaaataataataaaaatataaagaaagcta

SEQ ID NO: 388 - DNA, 1575 bp, Homo sapiens
  source 1..1575: mol_type = genomic DNA
catttgctaataaggccctgccaggctgggagggaattgtccctgcctgcttctggagaaagaagatattgacaccatctacgggcaccatggaactgcttcaagtgaccattctttttcttctgcccagtatttgcagcagtaacagcacaggtgttttagaggcagctaataattcacttgttgttactacaacaaaaccatctataacaacaccaaacacagaatcattacagaaaaatgttgtcacaccaacaactggaacaactcctaaaggaacaatcaccaatgaattacttaaaatgtctctgatgtcaacagctacttttttaacaagtaaagatgaaggattgaaagccacaaccactgatgtcaggaagaatgactccatcatttcaaacgtaacagtaacaagtgttacacttccaaatgctgtttcaacattacaaagttccaaacccaagactgaaactcagagttcaattaaaacaacagaaataccaggcacaccagaaaatggaaatgatcaacctcagtctgataaagagagcgtgaagcttcttaccgttaagacaatttctcatgagtctggtgagcactctgcacaaggaaaaaccaagaactgacagcttgaggaattctctccacacctaggcaataattacgcttaatcttcagcttctatgcaccaagcgtggaaaaggagaaagtcctgcagaatcaatcccgacttccatacctgctgctggactgtaccagacgtctgtcccagtaaagtgatgtccagctgacatgcaataatttgatggaatcaaaaagaaccccggggctctcctgttctctcacatttaaaaattccattactccatttacaggagcgttcctaggaaaaggaattttaggaggagaatttgtgagcagtgaatctgacagcccaggaggtgggctcgctgataggcatgactttccttaatgtttaaagttttccgggccaagaatttttatccatgaagactttcctacttttctcagtgttcttatattacctactgttagtatttattgtttaccactatgttaatgcagggaaaagttgcacgtgtattattaaatattaggtagaaatcataccatgctactttgtacatataagtattttattcctgctttcgtgttacttttaataaataactactgtactcaatactctaaaaatactataacatgactgtgaaaatggcaatgttattgtcttcctataattatgaatatttttggatggattattagaatacatgaactcactaatgaaaggcatttgtaataagtcagaaagggacatacgattcacatatcagactgttagggggagagtaatttatcagttctttggtctttctatttgtcattcatactatgtgatgaagatgtaagtgcaagggcatttataacactatactgcattcattaagataataggatcatgatttttcattaactcatttgattgatattatctccatgcattttttatttcttttagaaatgtaattatttgctctagcaatcattgct

SEQ ID NO: 389 - DNA, 4831 bp, Homo sapiens
  source 1..4831: mol_type = genomic DNA
tgcctagggaggaggagcgagaatcagcctggttcagtgactgagacaaactggaggtgaaaggagctggtactgtccactgtgctgtcggtgctgaacctgagacgcgagcggaccagttgctccagcacctgaaggcaacgccctcttgcaccctctgtgccctgtgggacccgcttcaccaacaggacccatatcaacttgacaaaggagtgtggtatcggacgtgggagagagtcctctgtttgccacctgggcgctcattcaggcgtgactttggagatttctatagttttagaccaaactatttttttttccccagctaagacgatcttttgagagttttttttttttattgtgatttatatttccacagcgtttaggaatctttctgggggacttttgtgactgttaaaataaggtgaaaagcaataaggatgtttaagtgctggtcagttgtcttggttctcggattcatttttctggagtcggaaggaaggccaaccaaagaaggaggatatggccttaaatcctatcagcctctaatgagattgcgacataagcaggaaaaaaatcaagaaagttcaagagtcaaaggatttatgattcaggatggcccttttggatcttgtgaaaataagtactgtggtttgggaagacactgtgttaccagcagagagacagggcaagcagaatgtgcctgtatggacctttgcaaacgtcactacaaacctgtgtgtggatctgacggagaattctatgaaaaccactgtgaagtgcacagagctgcttgcctgaaaaaacaaaagattaccattgttcacaatgaagactgcttctttaaaggagataagtgcaagactactgaatacagcaagatgaaaaatatgctattagatttacaaaatcaaaaatatattatgcaagaaaatgaaaatcctaatggcgacgacatatctcggaagaagctattggtggatcaaatgtttaaatattttgatgcagacagtaatggacttgtagatattaatgaactaactcaggtgataaaacaggaagaacttggcaaggatctctttgattgtactttgtatgttctattgaaatatgatgattttaatgctgacaagcacctggctcttgaagaattttatagagcattccaagtgatccagttgagtctgccagaagatcagaaactaagcatcactgcagcaactgtgggacaaagtgctgttctgagctgtgccattcaaggaaccctgagacctcccattatctggaaaaggaacaatattattctaaataatttagatttggaagacatcaatgactttggagatgatgggtccttgtatattactaaggttaccacaactcacgttggcaattacacctgctatgcagatggctatgaacaagtctatcagactcacatcttccaagtgaatgttcctccagtcatccgggtgtatccagagagtcaggctagagagcctggggtaactgccagtcttaggtgccatgcagagggcataccaaagcctcagcttggctggttgaagaatggaattgatattacaccaaagctttccaaacaactcacgcttcaagcaaatggcagtgaggttcacataagcaatgtgcgctatgaagatactggagcatacacttgtatcgcaaagaatgaagcaggagtggatgaagacatctcttctctttttgtggaagactctgctagaaagaccctagctaacatattatggagagaagaaggtctgggaattgggaacatgttctatgttttttatgaagatggaatcaaagtgatacaacccatagaatgtgaatttcagaggcacattaagcctagtgaaaagctccttggatttcaggatgaagtctgtcccaaagctgagggagatgaagttcagaggtgtgtgtgggcatcagctgttaatgtcaaagacaagttcatttatgttgcacagccaactttggacagagtccttattgttgatgtgcagtcccaaaaagttgttcaggcagtgagcacagaccctgtcccagttaaattacactatgacaaatcacatgatcaggtctgggtgctaagctggggtaccttggagaagacatcaccaacactacaggtaattaccctggccagtgggaatgtgcctcaccacacgatccacacccaaccagtgggaaagcaatttgacagagtggatgattttttcattcccaccacaacactcattatcacccatatgaggtttggatttattcttcataaagatgaagctgcactacaaaaaattgatcttgaaaccatgtcatacatcaagacaattaacttgaaggactataagtgcgttcctcagtcattggcatatacacacttgggaggctactacttcattggctgcaaacctgacagcaccggagcagtttccccacaggtcatggtggacggtgtaactgactcagtcattgggttcaatagtgatgtgacgggcactccatatgtctctccagatggccactaccttgtcagcattaatgatgtgaaaggtcttgtaagggttcagtacattaccatcagaggagaaatacaggaggcttttgatatttacacaaatctgcacatatctgatctggcatttcaaccatcctttactgaagcccaccaatataacatctacggtagttcaagcacacaaactgatgtgctctttgtggagctctcttctgggaaggtcaagatgataaagagtctcaaggaaccactcaaggcagaagaatggccttggaaccggaaaaacaggcaaatccaggacagtggcttgtttggtcaatacctgatgacaccttccaaggactctctcttcatcctagatggacgactcaataaattaaactgtgagatcactgaagttgaaaaaggaaatacagtcatttgggttggagatgcctaaaaaccctacgatacaattattgaatgaagcgttttacaatacattgcacttaatccattgtttaaatttacaacttaactttccaagtttatatcctagtcaaacaaaatttacttggttggtccaaataaaataaattgtttttgactaagtgactaagacatacacaattaattatattggttaattagaaatactcagcacaatatttaatgagaaatcacatcagtcacaagaatcaaatatgtaaattatgctttaaacaataaagtaggatttaaatcatttaaaaaactaaactgcagggaatttcagatgacataaagcattatttcattttgagggtagtttattttttttctctgtccttttggtatgattaaacaagaaataaaaggtgttgtggaaacttaaaattcttaattcaaaatattcggtcctgtccactgtttataatattttgtgccttgaagggaatgtcacaggaggaaaaggaagactaaagcctgcatactaaatgctctcataactataaatctcttgttgttaaaaaacatctcttgcaccaaatcctgtcttcagtcttttgtttaaccctcaatgaactaccaattgaaggcataagttggtcttaggttgtatacaggtgtcaaactccacttgacatttactgtataatctgcagcatgctatagaaagtggggaggaagggaggaaaaataattacagtcaaaatatttgcaatctatctactcattttgctttcaatcactagagtgcattatgtttttaatgcaagtttgtctgggatgtcaactgcctacagatgtttattactagcagaatagattatttattaatagattgtttcttttcatatagtccaatgtttcatcatcaggaactttcggttttaaaaaagaaacattacttttgtctgctaaagtaaaccatatatagggaaattaacacctaggaaaagaaaactggcaagagaattgatgaggtattagtggcttagaagaattagtaatataagttgggaataaaggggtagcccgacagtggtaagtaaaaatgtagtactccattgtttttgctatttaaatataatgtatcaaaaacctttattctaaaatttccacaaatgattccttttatccatcttcttgtaatcctaaaagcatcttctcactatgtgctgtagtttgaaacctaacgaatcctcctacttgagacactgtagaaaagtaaaaattgttgcttctgttttgttttaagaggaaatgagaaggccagcagaagtagattaaaactagagagctggtttattaaaataagcagataattatccaggcttaaagtaatagcttacatgttttgaaaatccttgtacttatttttgtttttattgttgcaaaaaaatgttaatgggctgttgaaatgacctccatttacttaaggtaatccaataaggtcttttttaaatatacaaattttactcaagtttaaattgtataaaactgcttagaaacctgaaattttatagtgtgtaatatcttatgtgtatatagcatcctgagctgtgtgatacagtagatttcttcttagcagaaacatgcgaggtagatttaataaacaacaaaaatcagcttatgtttctacttattgaatctgctttactttttagcaattttcttccttgtgaacatgaaccatataaagtgtctgtgacttaatgatttcatgtaagtctgtcgcatacatccttcttttgtagcttacaccatgtggatgctctgtctgtagacactgcttgataaaaggagaataaacctcttacattttaa

SEQ ID NO: 390 - DNA, 453 bp, Homo sapiens
  source 1..453: mol_type = genomic DNA
aggctcccggggctgagtctaaatcactcatcattggttaaagccgagctcacagcagaataagccaccatgaggctgtcggtgtgtctcctgctgctcacgctggccctttgctgctaccgggcaaatgcagtggtctgccaagctcttggttctgaaatcacaggcttcttattagctggaaaacctgtgttcaagttccaacttgccaaatttaaggcacctctggaagctgttgcagccaagatggaagtgaagaaatgcgtggatacgatggcctatgagaaaagagtgctaattacaaaaacattgggaaaaatagcagagaaatgtgatcgctgagatgtaaaaagtttttaatgctagtttccaccatctttcaatgataccctgatcttcactgcagaatgtaaaggtttcaacgtcttgctctaataaatcacttgccctgaa

SEQ ID NO: 391 - DNA, 1780 bp, Homo sapiens
  source 1..1780: mol_type = genomic DNA
gcagagctaccatgtcctcttggagcagacagcgaccaaaaagcccagggggcattcaaccccatgtttctagaactctgttcctgctgctgctgttggcagcctcagcctggggggtcaccctgagccccaaagactgccaggtgttccgctcagaccatggcagctccatctcctgtcaaccacctgccgaaatccccggctacctgccagccgacaccgtgcacctggccgtggaattcttcaacctgacccacctgccagccaacctcctccagggcgcctctaagctccaagaattgcacctctccagcaatgggctggaaagcctctcgcccgaattcctgcggccagtgccgcagctgagggtgctggatctaacccgaaacgccctgaccgggctgcccccgggcctcttccaggcctcagccaccctggacaccctggtattgaaagaaaaccagctggaggtcctggaggtctcgtggctacacggcctgaaagctctggggcatctggacctgtctgggaaccgcctccggaaactgccccccgggctgctggccaacttcaccctcctgcgcacccttgaccttggggagaaccagttggagaccttgccacctgacctcctgaggggtccgctgcaattagaacggctacatctagaaggcaacaaattgcaagtactgggaaaagatctcctcttgccgcagccggacctgcgctacctcttcctgaacggcaacaagctggccagggtggcagccggtgccttccagggcctgcggcagctggacatgctggacctctccaataactcactggccagcgtgcccgaggggctctgggcatccctagggcagccaaactgggacatgcgggatggcttcgacatctccggcaacccctggatctgtgaccagaacctgagcgacctctatcgttggcttcaggcccaaaaagacaagatgttttcccagaatgacacgcgctgtgctgggcctgaagccgtgaagggccagacgctcctggcagtggccaagtcccagtgagaccaggggcttgggttgagggtggggggtctggtagaacactgcaacccgcttaacaaataatcctgcctttggccgggtgcgggggctcacgcctgtaatcccagcactttgggaggcccaggtgggcggatcacgaggtcaggagatcgagaccatcttggctaacatggtgaaaccctgtctctactaaaaatataaaaaattagccaggcgtggtggtgggcacctgtagtcccagcaactcgggaggctgaggcaggagaatggcgtgaacttgggaggcggagcttgcggtgagccaagatcgtgccactgcactctagcctgggcgacagagcaagactgtctcaaaaaaattaaaattaaaattaaaaacaaataatcctgccttttacaggtgaaactcggggctgtccatagcggctgggaccccgtttcatccatccatgcttcctagaacacacgatgggctttccttacccatgcccaaggtgtgccctccgtctggaatgccgttccctgtttcccagatctcttgaactctgggttctcccagccccttgtccttccttccagctgagccctggccacactggggctgcctttctctgactctgtcttccccaagtcagggggctctctgagtgcagggtctgatgctgagtcccacttagcttggggtcagaaccaaggggtttaataaataacccttgaaaactgga

SEQ ID NO: 392 - DNA, 3353 bp, Homo sapiens
  source 1..3353: mol_type = genomic DNA
agctcgccgagtagacggccccgccgcccgctgcccgccggggctctccagcttcgccatgccgccgtggggcgccgccctcgcgctcatcttggccgtgctcgcccttctcggcctgctcggcccgcggctccggggaccctgggggcgcgccgtcggagagaggaccctgccgggggcccaagaccgagacgacggggaggaggcggacggcggaggcccggcggaccagttcagcgacgggcgcgagccactgccgggagggtgcagccttgtttgcaagccgtcggccctggcccagtgcctgctgcgcgccctgcggcgctcagaggcgctggaggccggcccgcgctcctggttctccgggccccacctgcagaccctctgccacttcgtcctgcccgtagcgcctgggcctgagctggcccgggagtacctgcagttggcggacgatgggctagtggccctggactgggtggtaggaccttgtgttcggggccgccggatcaccagcgccgggggccttcctgcggtgcttctggtgatccccaatgcgtggggtcgcctcacccgcaacgtgctcggcctttgcttgctcgccctggagcgcggctactacccggtcatcttccatcgccgcggccaccacggttgcccactggtcagcccccggctgcagcctttcggggacccgtccgacctcaaggaggcggtcacatacatccgcttccgacacccggcggcgccgctgttcgcggtgagcgaaggctcgggctcggcgctgctcctgtcctacctgggcgagtgcggctcctccagctacgtgacaggcgccgcctgcatctcgcccgtgctgcgctgccgagagtggttcgaggccggcctgccctggccctacgagcggggctttctgctccaccagaagatcgccctcagcaggtatgccacagccctggaggacactgtggacaccagcagactgttcaggagccgttcccttcgagagtttgaggaggctctcttctgccacaccaaaagcttccccatcagctgggatacctactgggaccgcaacgacccgctccgggatgtcgatgaggcagccgtgcctgtgctgtgtatctgcagtgctgacgaccccgtgtgtggacccccagaccacactctgacaactgaactcttccacagcaacccctacttcttcctcctgctcagtcgccacggaggccactgtggcttcctgcgccaggagcccttgccagcctggagccatgaggtcatcttggagtccttccgggccttgactgagttcttccgaacggaggagaggattaaagggctgagcaggcacagagcttccttccttgggggccgtcgtcgtgggggagccttgcagaggcgggaagtctcttcctcttccaacctggaggagatctttaactggaagcgatcatacacaaggtgaaagacctggcctgagaacccccaagtcctgcaaagaaaaacagagctgggcaagggggagtcctggaaagatggggcggactgaacagagggagctccagctctgtgctcctcattcagtccctctctcttaaattggtgccttgaaagagaaggaacgtcctgcgagcctgcactcacttcatcctcagcagaactcctgcctggcctctgctcaacatatccctactcatccggtcagcagcggcgcgttccagtcactgtcacctgtcactgacatcacaagccaaaggatagcactttttcaatccatggactcaggagaaaatgccctcttactggcagtggctagagggatgagacgtttgtgtatgtcactgggcagtgaccccgattctcaagctggagccatttgatgtcatgaggacaggatgtttgtgtctcggccccacttccctcatttgctctgtggttgtggcgccctgctttgaccgaatgctctggcaactgcggcagcaggcttgtgtgtgtgagaagggcggcagaggcagtggggctggctcgctgagggctgagcaggtagagaatgtgaatgtccatctcaaggaatgcgaagttccaatctctcagaggagctctgcaagtctcagctaggaatggggctgatctggcccccaagcctcactggagagatcccaagggtattttacaaataggaagcgctctcatgcaggatctgagggctttgctagaccatggttcaaggagtcagaatcttggctaccctacatgctccctctggcaccatttcaggggattactccagagagctgcagccagaactgtttatctcctgagatatggactttctctaagtcaggaaaagcacaaacctcataacttaggtgttttctggttggttgctcccttttctgatcctactactggcctctccctttccagagccaggagacacatctgggaccagaggaaacaaaagcaccaagaggttgactagagctgaccagtgatttacaaatatttcatattccaatgcttcgtctgctcaattattcaaaaggccatccctgtaaaggcagaaaagcttcctcttagatctggccactcagcaaataagtgggtatttggttttatgaagaataatgctgaggactagagatatagtatatcagagataatatatagtatacaggttgatctaaatattctggtttggattaggcaattaaaatttttttggcaacaggacatatgtttccatgtgttgctaagattcaaaaactttgccctgaagttttattttaatcgtcattgagaaagagggctcctgttctgacctcaaaaacagcaaagctgttgtaaagaagagagctgcttatacgaaaacccacattccaagacttggtataaggtattcctgaggccttgatttcaggtttggataatcttgccccagattctagatcttgttcttctagatcaaatcagaagaaactttgaaataactccaagaatctgcactgaaatgtagacagcactcgataatctaagggacattatcttgttgtgaaaaattatctccctcctggctgggagcggtggcacacacctataatctcagcactttgggaggccgaggtgggtggatcacgaggtcaggagatcgagaccatcctggctaacacagtgaaacctcatctctactaaaaatacaaaaaattagccgggcgtggtagcgggtgcctgtaatcccagttactcaggaggctgaggcaggagaatggcgtgaacccgggaggcggagcttgcagtgagctgagatcgcaccactgcactccagcctgggcgacagagtaagactgtgtttc

SEQ ID NO: 393 - DNA, 2473 bp, Homo sapiens
  source 1..2473: mol_type = genomic DNA
agggaggcggagcggaagccgagtgcgagggacgagcggagtaaaatctccacaagctgggaacaaacctcgtcccaactcccacccaccggcgtttctccagctcgatctggaggctgcttcgccagtgtgggacgcagctgacgcccgcttattagctctcgctgcgtcgccccggctcagaagctccgtggcggcggcgaccgtgacgagaagcccacggccagctcagttctcttctactttgggagagagagaaagtcagatgccccttttaaactccctcttcaaaactcatctcctgggtgactgagttaatagagtggatacaaccttgctgaagatgaagaatatacaatattgaggatatttttttcttttttttttcaagtcttgatttgtggcttacctcaagttaccatttttcagtcaagtctgtttgtttgcttcttcagaaatgttttttacaatctcaagaaaaaatatgtcccagaaattgagtttactgttgcttgtatttggactcatttggggattgatgttactgcactatacttttcaacaaccaagacatcaaagcagtgtcaagttacgtgagcaaatactagacttaagcaaaagatatgttaaagctctagcagaggaaaataagaacacagtggatgtcgagaacggtgcttctatggcaggatatgcggatctgaaaagaacaattgctgtccttctggatgacattttgcaacgattggtgaagctggagaacaaagttgactatattgttgtgaatggctcagcagccaacaccaccaatggtactagtgggaatttggtgccagtaaccacaaataaaagaacgaatgtctcgggcagtatcagatagcagttgaaaatcaccttgtgctgctccatccactgtggattatatcctatggcagaaaagctttataattgctggcttaggacagagcaatactttacaataaaagctctacacattttcaaggagtatgctggattcatggaactctaattctgtacataaaaattttaaagttatttgtttgctttcaggcaagtctgttcaatgctgtactatgtccttaaagagaatttggtaatttggttgatgtggtaagcagataggtgagttttgtataaatcttttgtgtttgagatcaagctgaaatgaaaacactgaaaaacatggattcatttctataacacatttatttaagtatataacacgttttttggacaagtgaagaatgtttaatcattctgtcatttgttctcaatagatgtaactgttagactacggctatttgaaaaaatgtgcttattgtactatattttgttattccaattatgagcagagaaaggaaatataatgttgaaaataatgttttgaaatcatgacccaaagaatgtattgatttgcactatccttcagaataactgaaggttaattattgtatatttttaaaaattacacttataagagtataatcttgaaatgggtagcagccactgtccattacctatcgtaaacattggggcaatttaataacagcattaaaatagttgtaaactctaatcttatacttattgaagaataaaagatatttttatgatgagagtaacaataaagtattcatgatttttcacatacatgaatgttcatttaaaagtttaatcctttgagtgtctatgctatcaggaaagcacattatttccatatttgggttaattttgcttttattatattggtctaggaggaagggactttggagaatggaactcttgaggactttagccaggtgtatataataaaggtacttttgtgctgcattaaattgcttggaaaatgttaacattatattatataagagtatcctttatgaaattttgaatttgtataacagatgcattagatattcattttatataatggccacttaaaataagaacatttaaaatataaactatgaagattgactatcttttcaggaaaaaagctgtatatagcacagggaaccctaatcttgggtaattctagtataaaacaaattatacttttatttaaatttcccttgtagcaaatctaattgccacatggtgccctatatttcatagtatttattctctatagtaactgcttaagtgcagctagcttctagatttagactatatagaatttagatattgtattgttcgtcattataatatgctaccacatgtagcaataattacaatattttattaaaataaatatgtgaaatattgtttcatgaaagacagatttccaaatctctcttctcttctctgtactgtctacctttatgtgaagaaattaattatatgccattgccaggtagaagtttggaataattgtttagtctctcctattagatgtggacatttttgtttttgtttttgttttcagggatgaaataaaatatattatttctaccta

SEQ ID NO: 394 - DNA, 1695 bp, Homo sapiens
  source 1..1695: mol_type = genomic DNA
ccggagggggcggccgcggagcactggttggagcgccgcgaagcgcccgagcctcttgccttcgcgggcggcgccctggccgccggcagccttgtggccggtgccccgatccgccgcgctccggacccgggcaggcggggcgcgcccgctgcgcgcgggatgtggcagcccagacggccctggccccgcgtgccctggcgctgggcgctggcgctgctggccctggttggcgcggggctgtgccacgccggcccgcagcccgggtatcccgcgcggcccagcgccaggaacaagaactggtgcgcctacatcgtgaacaagaatgtgagctgcagcccgagcccgccccgccgaggcccagcggccccgcaaccgcagaggaccctgggcgacggcccgtcctgccccagcggccccccgaggagaggccgccccagccgccaggctccaccggggtcatcgcggagacgggccaggccgggccccccgcaggcgcaggcgtgtctggatacccgaagtcacctcctgtagcttccccaggagctccggtgccttctctggtgtctttttctgcggggctcacccagaagcctttccccagtgatgggggcgttgtcctctttaacaaagtgctggtgaacgacggggatgtttacaaccccagcaccggggtcttcacggctccttatgatgggcgctacctgatcacggccaccctcacccccgagagagacgcctacgtggaagcagtgctgtcggtctccaacgccagcgtggcccagctgcataccgctgggtacaggagagagttcctggaataccaccgccctccaggagctttgcatacctgcgggggcccgggggcattccacctcatcgtgcacctgaaggcgggagatgcagtcaacgtcgtggtgactgggggcaagctggctcacacagactttgatgaaatgtactccacatttagtggggttttcttatatcctttcctttcccacctctaaggtggctggggagatgtcaggggaaagatagatagttgtaaaaactctaaagctttaatatattcggtttgtatgtaatggaagcacggggctagagtttccacataggccccaacataaaggccttccctcgctgttgaggccaccatgccttactgcatccagccaggctgcagggagtgaggcacacggtgaacatggccactgacttttctgccactctaactggacaactggaagacttggaaaggcctccacctgtatctacactctgagggccctggactgggcctgagcttgccacagaggctccgtctgactgtgggctgggaggagggaggcaggggagagccggtcacggtggctggtctttactgcagggcagcactgtggccagctgtctgtctttacactgcatgcagaagtttaaacactgaagtgccgaagtggcccgtgccgccgcacagagaccccgactttagtttgggctgttccacgcttggctcaccattgccgcctgggacttaacctgctcaggcgggccttcgcccagctgcaaatagggatgcgttagagactgttcccaaagcttgttgggctccttaaatggcatgtacaatttaagtgcaaagacagggagtgtcaataaagatggaaagccatttccagttaacttttgttaatttaa

SEQ ID NO: 395 - DNA, 990 bp, Homo sapiens
  source 1..990: mol_type = genomic DNA
ataatttatgagatgtcataaatctctccaaaataggatgagatgaacacttttaacaagagaacaggactctatataaatcgctgtgggctcaccacctctaaggaggagcactgactgaagacagaaaaattgatgaactgaagaagacatggtccattatgccttacaaacttacacagtgctttgggaattccaaagtactcagtggagagaggtgtttcaggagccgtagagccagatcgtcatcatgtctgcattgtggctgctgctgggcctccttgccctgatggacttgtctgaaagcagcaactggggatgctatggaaacatccaaagcctggacacccctggagcatcttgtgggattggaagacgtcacggcctgaactactgtggagttcgtgcttctgaaaggctggctgaaatagacatgccatacctcctgaaatatcaacccatgatgcaaaccattggccaaaagtactgcatggatcctgccgtgatcgctggtgtcttgtccaggaagtctcccggtgacaaaattctggtcaacatgggcgataggactagcatggtgcaggaccctggctctcaagctcccacatcctggattagtgagtctcaggtttcccagacaactgaagttctgactactagaatcaaagaaatccagaggaggtttccaacctggacccctgaccagtacctgagaggtggactctgtgcctacagtgggggtgctggctatgtccgaagcagccaggacctgagctgtgacttctgcaatgatgtccttgcacgagccaagtacctcaagagacatggcttctaacatctcagatgaaacccaagaccatgatcacatatgcagcctcaaatgttacacagataaaactagccaagggcacctgtaactgggaatctgagtttgacctaaaagtcattaaaataacatgaatcacattaaaggaagaattttgacctgca

SEQ ID NO: 396 - DNA, 470 bp, Homo sapiens
  source 1..470: mol_type = genomic DNA
ctttgaagcatttttgtctgtgctccctgatcttcaggtcaccaccatgaagttcttagcagtcctggtactcttgggagtttccatctttctggtctctgcccagaatccgacaacagctgctccagctgacacgtatccagctactggtcctgctgatgatgaagcccctgatgctgaaaccactgctgctgcaaccactgcaaccactgctgctcctaccactgcaaccaccgctgcttctaccactgctcgtaaagacattccagttttacccaaatgggttggggatctcccgaatggtagagtgtgtccctgagatggaatcagcttgagtcttctgcaattggtcacaactattcatgcttcctgtgatttcatccaactacttaccttgcctacgatatcccctttatctctaatcagtttattttctttcaaataaaaaataactatgagcaacataaaaa

SEQ ID NO: 397 - DNA, 1946 bp, Homo sapiens
  source 1..1946: mol_type = genomic DNA
atgtccaggatgttaccgttcctgctgctgctctggtttctgcccatcactgaggggtcccagcgggctgaacccatgttcactgcagtcaccaactcagttctgcctcctgactatgacagtaatcccacccagctcaactatggtgtggcagttactgatgtggaccatgatggggactttgagatcgtcgtggcggggtacaatggacccaacctggttctgaagtatgaccgggcccagaagcggctggtgaacatcgcggtcgatgagcgcagctcaccctactacgcgctgcgggaccggcaggggaacgccatcggggtcacagcctgcgacatcgacggggacggccgggaggagatctacttcctcaacaccaataatgccttctcgggggtggccacgtacaccgacaagttgttcaagttccgcaataaccggtgggaagacatcctgagcgatgaggtcaacgtggcccgtggtgtggccagcctctttgccggacgctctgtggcctgtgtggacagaaagggctctggacgctactctatctacattgccaattacgcctacggtaatgtgggccctgatgccctcattgaaatggaccctgaggccagtgacctctcccggggcattctggcgctcagagatgtggctgctgaggctggggtcagcaaatatacagggggccgaggcgtcagcgtgggccccatcctcagcagcagtgcctcggatatcttctgcgacaatgagaatgggcctaacttccttttccacaaccggggcgatggcacctttgtggacgctgcggccagtgctggtgtggacgacccccaccagcatgggcgaggtgtcgccctggctgacttcaaccgtgatggcaaagtggacatcgtctatggcaactggaatggcccccaccgcctctatctgcaaatgagcacccatgggaaggtccgcttccgggacatcgcctcacccaagttctccatgccctcccctgtccgcacggtcatcaccgccgactttgacaatgaccaggagctggagatcttcttcaacaacattgcctaccgcagctcctcagccaaccgcctcttccgcgtcatccgtagagagcacggagaccccctcatcgaggagctcaatcccggcgacgccttggagcctgagggccggggcacagggggtgtggtgaccgacttcgacggagacgggatgctggacctcatcttgtcccatggagagtccatggctcagccgctgtccgtcttccggggcaatcagggcttcaacaacaactggctgcgagtggtgccacgcacccggtttggggcctttgccaggggagctaaggtcgtgctctacaccaagaagagtggggcccacctgaggatcatcgacgggggctcaggctacctgtgtgagatggagcccgtggcacactttggcctggggaaggatgaagccagcagtgtggaggtgacgtggccagatggcaagatggtgagccggaacgtggccagcggggagatgaactcagtgctggagatcctctacccccgggatgaggacacacttcaggacccagccccactggagtgtggccaaggattctcccagcaggaaaatggccattgcatggacaccaatgaatgcatccagttcccattcgtgtgccctcgagacaagcccgtatgtgtcaacacctatggaagctacaggtgccggaccaacaagaagtgcagtcggggctacgagcccaacgaggatggcacagcctgcgtggctcaagtggcctttttaggtgggtattcttcagccgcctctagaatctctgagcctctctctcgggcctcatatctttctctaggccttggactttgccttcagttatatgcactttaaatcccatcaataaaggaaaaaacaaaacaaaa

SEQ ID NO: 398 - DNA, 698 bp, Homo sapiens
  source 1..698: mol_type = genomic DNA
cgcagcggagggcgctccgctttgacgtcacttcctgtgagcccggcggtgacaacggcaacatggccctgaacggagctgaagtcgacgacttctcctgggagcccccgactgaggcggagacgaaggtgctgcaggcgcgacgggagcggcaagatcgcatctcccggctcatgggcgactatctgctgcgcggttaccgcatgctgggcgagacgtgtgcggactgcgggacgatcctcctccaagacaaacagcggaaaatctactgcgtggcttgtcaggaactcgactcagacgtggataaagataatcccgctctgaatgcccaggctgccctctcccaagctcgggagcaccagctggcctcagcctcagagctccccctgggctctcgacctgcgccccagcccccagtacctcgtccggagcactgtgagggagctgcagcaggactcaaggcagcccaggggccacctgctcctgctgtgcctccaaatacagatgtcatggcctgcacacagacagccctcttgcagaagctgacctgggcctctgctgaactgggctctagcacctccctggagactagcatccagctgtgtggccttatccgcgcatgtgcggaggccctgcgcagcctgcagcagctacagcactaagagaagcccctgagaaaaaccctctagaaaaacagc

SEQ ID NO: 399 - DNA, 901 bp, Homo sapiens
  source 1..901: mol_type = genomic DNA
atgaagctgggctgtgtcctcatggcctgggccctctacctttcccttggtgtgctctgggtggcccagatgctactggctgccagttttgagacgctgcagtgtgagggacctgtctgcactgaggagagcagctgccacacggaggatgacttgactgatgcaagggaagctggcttccaggtcaaggcctacactttcagtgaacccttccacctgattgtgtcctatgaactgtttccagcgccaattctcagagctgtaccctcagctgaaccccaagcaggaagccccatgaccctgagttgtcagacaaagttgcccctgcagaggtcagctgcccgcctcctcttctccttctacaaggatggaaggatagtgcaaagcagggggctctcctcagaattccagatccccacagcttcagaagatcactccgggtcatactggtgtgaggcagccactgaggacaaccaagtttggaaacagagcccccagctagagatcagagtgcagggtgcttccagctctgctgcacctcccacattgaatccagctcctcagaaatcagctgctccaggaactgctcctgaggaggcccctgggcctctgcctccgccgccaaccccatcttctgaggatccaggcttttcttctcctctggggatgccagatcctcatctgtatcaccagatgggccttcttctcaaacacatgcaggatgtgagagtcctcctcggtcacctgctcatggagttgagggaattatctggccaccggaagcctgggaccacaaaggctactgctgaatagaagtaaacagttcatccatgatctcacttaaccaccccaataaatctgattctttattttctcttcctgtcctgcacatatgcataag

SEQ ID NO: 400 - DNA, 5372 bp, Homo sapiens
  source 1..5372: mol_type = genomic DNA
ccgccaagcatattgctaggcacagagcaggtgtgcaacaaaagttatttctcaggctttccctcctctgagcgccgtcctccagagggtccggagtgtagctgggggttggagcagcagcctcctaggcgatgggacagagcccacagggtccggtatgccacggtttcttcgtcagaccctgggaatccaacgtcgcaaaataaacacggccgcgccgctaatcgccagttcggaggaaacaaaacagcgctgcgctgggggatctgggcaaaatcagccctccctcctcccgctccttcgccgcggccctcccctcctcgcgctgctctcgttcgcttggctcagctcagctcagctcagcgcagctccgcggccgccaagccgaggcgggcacggtctccgagtcgcggacgccagctccgagctccctctctccgccgcgcctccgccaggtcgcgccttcgtcgggaccacttcgggcaggagtcgcgtggcgaaggcctgcggccgcggcacaaagttgggggccgcgaagatgaggctgtccccggcgcccctgaagctgagccggactccggcactgctggccctggcgctgcccctggccgcggcgctggccttctccgacgagaccctggacaaagtgcccaagtcagagggctactgcagccgtatcctgcgcgcccagggcacgcggcgcgagggctacaccgagttcagcctccgcgtggagggcgaccccgacttctacaagccgggaaccagctaccgcgtaacactttcagctgctcctccctcctacttcagaggattcacattaattgccctcagagagaacagagagggtgataaggaagaagaccatgctgggaccttccagatcatagacgaagaagaaactcagtttatgagcaattgccctgttgcagtcactgaaagcactccacggaggaggacccggatccaggtgttttggatagcaccaccagcgggaacaggctgcgtgattctgaaggccagcatcgtacaaaaacgcattatttattttcaagatgagggctctctgaccaagaaactttgtgaacaagattccacatttgatggggtgactgacaaacccatcttagactgctgttgcggaactgccaagtacagactcacattttatgggaattggtccgagaagacacacccaaaggattaccctcgtcgggccaaccactggtctgcgatcatcggaggatcccactccaagaattatgtactgtgggaatatggaggatatgccagcgaaggcgtcaaacaagttgcagaattgggctcacccgtgaaaatggaggaagaaattcgacaacagagtgatgaggtcctcaccgtcatcaaagccaaagcccaatggccagcctggcagcctctcaacgtgagagcagcaccttcagctgaattttccgtggacagaacgcgccatttaatgtccttcctgaccatgatgggccctagtcccgactggaacgtaggcttatctgcagaagatctgtgcaccaaggaatgtggctgggtccagaaggtggtgcaagacctgattccctgggacgctggcaccgacagcggggtgacctatgagtcacccaacaaacccaccattccccaggagaaaatccggcccctgaccagcctggaccatcctcagagtcctttctatgacccagagggtgggtccatcactcaagtagccagagttgtcatcgagagaatcgcacggaagggtgaacaatgcaatattgtacctgacaatgtcgatgatattgtagctgacctggctccagaagagaaagatgaagatgacacccctgaaacctgcatctactccaactggtccccatggtccgcctgcagctcctccacctgtgacaaaggcaagaggatgcgacagcgcatgctgaaagcacagctggacctcagcgtcccctgccctgacacccaggacttccagccctgcatgggccctggctgcagtgacgaagacggctccacctgcaccatgtccgagtggatcacctggtcgccctgcagcatctcctgcggcatgggcatgaggtcccgggagaggtatgtgaagcagttcccggaggacggctccgtgtgcacgctgcccactgaggaaacggagaagtgcacggtcaacgaggagtgctctcccagcagctgcctgatgaccgagtggggcgagtgggacgagtgcagcgccacctgcggcatgggcatgaagaagcggcaccgcatgatcaagatgaaccccgcagatggctccatgtgcaaagccgagacatcacaggcagagaagtgcatgatgccagagtgccacaccatcccatgcttgctgtccccatggtccgagtggagtgactgcagcgtgacctgcgggaagggcatgcgaacccgacagcggatgctcaagtctctggcagaacttggagactgcaatgaggatctggagcaggtggagaagtgcatgctccctgaatgccccattgactgtgagctcaccgagtggtcccagtggtcggaatgtaacaagtcatgtgggaaaggccacgtgattcgaacccggatgatccaaatggagcctcagtttggaggtgcaccctgcccagagactgtgcagcgaaaaaagtgccgcatccgaaaatgccttcgaaatccatccatccaaaagctacgctggagggaggcccgagagagccggcggagtgagcagctgaaggaagagtctgaaggggagcagttcccaggttgtaggatgcgcccatggacggcctggtcagaatgcaccaaactgtgcggaggtggaattcaggaacgttacatgactgtaaagaagagattcaaaagctcccagtttaccagctgcaaagacaagaaggagatcagagcatgcaatgttcatccttgttagcaagggtacgagttccccagggctgcactctagattccagagtcaccaatggctggattatttgcttgtttaagacaatttaaattgtgtacgctagttttcatttttgcagtgtggttcgcccagtagtcttgtggatgccagagacatcctttctgaatacttcttgatgggtacaggctgagtggggcgccctcacctccagccagcctcttcctgcagaggagtagtgtcagccaccttgtactaagctgaaacatgtccctctggagcttccacctggccagggaggacggagactttgacctactccacatggagaggcaaccatgtctggaagtgactatgcctgagtcccagggtgcggcaggtaggaaacattcacagatgaagacagcagattccccacattctcatctttggcctgttcaatgaaaccattgtttgcccatctcttcttagtggaactttaggtctcttttcaagtctcctcagtcatcaatagttcctggggaaaaacagagctggtagacttgaagaggagcattgatgttgggtggcttttgttctttcactgagaaattcggaatacatttgtctcacccctgatattggttcctgatgcccccccaacaaaaataaataaataaattatggctgctttatttaaatataaggtagctagtttttacacctgagataaataataagcttagagtgtatttttcccttgcttttgggggttcagaggagtatgtacaattcttctgggaagccagccttctgaactttttggtactaaatccttattggaaccaagacaaaggaagcaaaattggtctctttagagaccaatttgcctaaattttaaaatcttcctacacacatctagacgttcaagtttgcaaatcagtttttagcaagaaaacatttttgctatacaaacattttgctaagtctgcccaaagcccccccaatgcattccttcaacaaaatacaatctctgtactttaaagttattttagtcatgaaattttatatgcagagagaaaaagttaccgagacagaaaacaaatctaagggaaaggaatattatgggattaagctgagcaagcaattctggtggaaagtcaaacctgtcagtgctccacaccagggctgtggtcctcccagacatgcataggaatggccacaggtttacactgccttcccagcaattataagcacaccagattcagggagactgaccaccaagggatagtgtaaaaggacattttctcagttgggtccatcagcagtttttcttcctgcatttattgttgaaaactattgtttcatttcttcttttataggccttattactgcttaatccaaatgtgtaccattggtgagacacatacaatgctctgaatacactacgaatttgtattaaacacatcagaatatttccaaatacaacatagtatagtcctgaatatgtacttttaacacaagagagactattcaataaaaactcactgggtctttcatgtctttaagctaagtaagtgttcagaaggttcttttttatattgtcctccacctccatcattttcaataaaagatagggcttttgctcccttgttcttggagggaccattattacatctctgaactacctttgtatccaacatgttttaaatccttaaatgaattgctttctcccaaaaaaagcacaatataaagaaacacaagatttaattatttttctacttggggggaaaaaagtcctcatgtagaagcacccacttttgcaatgttgttctaagctatctatctaactctcagcccatgataaagttccttaagctggtgattcctaatcaaggacaagccaccctagtgtctcatgtttgtatttggtcccagttgggtacattttaaaatcctgattttggagacttaaaaccaggttaatggctaagaatgggtaacatgactcttgttggattgttattttttgtttgcaatggggaatttataagaagcatcaagtctctttcttaccaaagtcttgttaggtggtttatagttcttttggctaacaaatcattttggaaataaagattttttactacaaaaatgaaatttgtttggacttccacttgagacagtaaagagagtattagacacccagtaaaaactgccatataaagaagttgtaattgtttgttgtgtatgtatttttttcaatgccaaaccagctgtgatccaatttacatccacattttaggtccaacagcaagaagttcagagagagatttcccaaccagacattgggtcactcactggtcaccttgccagtgcattttattagaagggaatctgttgtagcaaatgggaataaacctgggtttctatagacccagaactg

SEQ ID NO: 401 - DNA, 8174 bp, Homo sapiens
  source 1..8174: mol_type = genomic DNA
atgcggcacggcgtcgcctgggcgctgctggtggccgcggccctggggcttggggcgcgcggggtgcgcggcgcggtggcccttgccgacttctacccgttcggcgccgagcgcggcgacgccgtcacccccaagcaggacgacggcggctcggggctgcggccgctctcggtgcccttcccgttcttcggtgccgagcactccggactctacgtgaacaacaacgggatcatctccttcctgaaggaggtttctcagttcaccccagtggccttccccattgccaaggaccgctgcgtggtggcagccttctgggcagatgtggacaaccggcgtgcaggcgacgtgtactaccgggaggccaccgacccagccatgctgcgccgagccacggaggacgtcaggcactacttccccgagctcctggacttcaatgccacctgggtttttgttgccacctggtaccgagtgaccttctttggaggcagttcctcatcccctgtcaacacattccagactgtgctcatcacagacggcaagctctccttcaccatcttcaactatgagtccatcgtgtggaccacaggcacacacgccagcagcgggggcaacgccactggcctcgggggcatcgcagcccaggctggcttcaacgcaggcgatgggcagcgttacttcagtatccccggctcgcgcacagcagacatggccgaggtggagaccaccaccaacgtgggtgtgcccgggcgctgggcgttcagaatcgatgatgcccaggtgcgcgtggggggctgcggccatacaacgtccgtgtgcctggccctgcgcccctgcctcaacggcggcaagtgcatcgacgactgcgtcacgggcaacccctcctacacctgctcctgcctctcgggcttcacggggcggaggtgccacctggacgtgaacgaatgtgcctcccagccctgtcagaatggtgggacctgtactcacggcatcaacagtttccgctgccagtgcccggctggctttgggggacccacctgtgagacagcccaatccccctgtgacaccaaagagtgtcaacatggtggccagtgccaggtggagaatggctctgcggtgtgtgtgtgccaggccggatacaccggagcagcctgcgagatggatgtggacgactgcagccctgacccctgcctgaatggaggctcttgtgttgacctagtggggaattacacctgcttgtgtgccgagcccttcaagggacttcgctgtgagacaggagaccatccagtgccagacgcctgcctctcggccccttgccacaatgggggcacctgtgtggatgcggaccagggctacgtgtgcgagtgccccgaaggcttcatgggcctggactgcagggagagagtccccgatgactgtgagtgccgcaacggaggcagatgcctgggcgccaacaccaccctctgccagtgccccctgggattctttgggcttctctgtgaatttgaaatcacagccatgccctgcaacatgaacacacagtgcccagatgggggctactgcatggagcacggcgggagctacctctgcgtctgccacaccgaccacaatgccagccactccctgccatcaccctgcgactcggacccctgcttcaacggaggctcctgcgatgcccatgacgactcctacacctgcgagtgcccgcgcgggttccacggcaagcactgcgagaaagcccggccacacctgtgcagctcagggccctgccggaacgggggcacgtgcaaggaggcgggcggcgagtaccactgcagctgcccctaccgcttcactgggaggcactgtgagatcgggaagccagactcgtgtgcctctggcccctgtcacaacggcggcacctgcttccactacattggcaaatacaagtgtgactgtcccccaggcttctccgggcggcactgcgagatagccccctccccctgcttccggagcccgtgtgtgaatgggggcacctgcgaggaccgggacacggatttcttctgccactgccaagcagggtacatgggacgccggtgccaggcagaggtggactgcggccccccggaggaggtgaagcacgccacactgcgcttcaacggcacgcggctgggcgcggtggccctgtatgcatgtgaccgtggctacagcctgagcgcccccagccgcatccgggtctgccagccacacggtgtctggagtgagcctccccagtgccttgaaatcgatgagtgccggtctcagccgtgcctgcatgggggctcttgtcaggaccgcgttgctgggtacctgtgcctctgcagcacaggctatgagggcgcccactgtgagctggagagggatgagtgccgagctcacccgtgcagaaatggagggtcctgcaggaacctcccaggggcctatgtctgccggtgccctgcaggcttcgttggagtccactgtgagacagaggtggacgcctgcgactccagcccctgccagcatggaggccggtgtgagagcggcggcggggcctacctgtgcgtctgcccagagagcttcttcggctaccactgcgagacagtgagtgacccctgcttctccagcccctgtgggggccgtggctattgcctggccagcaacggctcccacagctgcacctgcaaagtgggctacacgggcgaggactgcgccaaagagctcttcccaccgacggccctcaagatggagagagtggaggagagtggggtctctatctcctggaacccgcccaatggtccagccgccaggcagatgcttgatggctacgcggtcacctacgtctcctccgacggctcctaccgccgcacagactttgtggacaggacccgctcctcgcaccagctccaggccctggcggccggcagggcctacaacatctccgtcttctcagtgaagcgaaacagtaacaacaagaatgacatcagcaggcctgccgtgctgctggcccgcacgcgaccccgccctgtggaaggcttcgaggtcaccaatgtgacggctagcaccatctcagtgcagtgggccctgcacaggatccgccatgccaccgtcagtggggtccgtgtgtccatccgccaccctgaggccctcagggaccaggccaccgatgtggacaggagtgtggacaggttcacctttagggccctgctgcctgggaagaggtacaccatccagctgaccaccctcagtgggctcaggggagaggagcaccccacagagagcctggccaccgcgccgacgcacgtgtggacccggcccctgcctccagcaaacctgaccgccgcccgagtcactgccacctctgcccacgtggtctgggatgccccgactccaggcagcttgctggaggcttatgtcatcaatgtgaccaccagccagagcaccaagagccgctatgtccccaacgggaagctggcgtcctacacggtgcgcgacctgctgccgggacggcggtaccagctctctgtgatagcagtgcagagcacggagctcgggccgcagcacagcgagcccgcccacctctacatcatcacctcccccagggatggcgctgacagacgctggcaccagggaggacaccaccctcgggtgctcaagaacagaccgcccccggcgcgcctgccggagctgcgcctgctcaatgaccacagcgcccccgagacccccacccagccccccaggttctcggagcttgtggacggcagaggaagagtgagcgccaggttcggtggctcacccagcaaagcagccaccgtgagatcacaacccacagcctcggcgcagctcgagaacatggaggaagcccccaagcgggtcagcctggccctccagctccctgaacacggcagcaaggacatcggaaacgtccctggcaactgttcagaaaacccctgtcagaacggaggcacttgtgtgccgggcgcagacgcccacagctgtgactgcgggccagggttcaaaggcagacgctgcgagctcgcctgtataaaggtgtcccgcccctgcacaaggctgttctccgagacaaaggcctttccagtctgggagggaggcgtctgtcaccacgtgtataaaagagtctaccgagttcaccaagacatctgcttcaaagagagctgtgaaagcacaagcctcaagaagaccccaaacaggaaacaaagtaagagtcagacactggagaaatcttaaggatttaagacgttcttgttacactccaccaacctcacgagtttctaacacccaggaagatgaggtctaaaaactggatgaaaaaggacaccctgagaaaaggtcctagctggagtcagtcccctctgtgacctctctcctcaggcctctagaggacagatggccaggcctgtgcacacaccagcccaccctgagagacccctctgggaccaaccacctgtgagtcctgcgatgcgtttaagcagcctgtgccctcacccaagctgcagttcctgaaggtgtagtctgtgtctctgcggatgagatgacagctcgccattccccggaatcagtgaggctgtcagtcagccacgcttctgcagtatgcagaaacctgttcttagactccaaagccagagaaagaattctcccttcgaggcccaacaaattgagaaggaactgtgatggaccacttccaaaacagagacgggggcaggggctgaagggcagagaccaggtgatgtcagaaggaaagccgggttgcagacacagccgcccctgctctggtcctccagcgtgtttatgacgctcgtgcaggtcgacgagccatcctatggactagttaacactaaggtggagttcagacttttttagacaacggcgcgactggcagcctttctctatcaagggtcagacggtaaacgttttcagctttgcagaccagaggtccctgtggctacagtagcgcagacacagccacaggcatgtcattgaatggctgcggctatgttccaataaaaacttatttacaataacaggtggtggccaaattggcccatgggccttatttggtgaaccctgttctatgagatcacctaggcttcagccttaaacagtggaagccatcccctgaatgacaagtcacaagggtatcaaagaaagacccctgaattttcatggaaaaagctattcagacccctgcttggaaagctaaggcacactgccacgaagcagcaaggacgccttacaagtctcagtgcaacagagatggacacctgggctgggctggacaatgtttaaggttccttttagtccatgactcaagtgatactgttttaggctatcaggtagtaaacacgatcttagacatccccatctttgtaagcagaacagtacggcacttcaccacatctgcttcccaccatgcttctaagcagctgtcttccccctgctaatgttacaaccaaagcagccaccccacctcctctcgtgttgagcctcacgaccgctgacccagctggaaagccagcgccctgccgcgtcaccctgactctgctcagagccagcattccagccacaaagagggcctccttcctttcctctttcataaaaatgttttttgaagagttagagtatattttaggctttttatctttattaaaatttcatgtgcatgtgtctgtgtattctgcaatttgtcattttcagaaagaaggaacaggcaattcgcgaagtttcacctgtactcccgagctgttccccaggctccagacccacttgagagcagaaggtggagctcaatgaagggtctcgagctcagcgaagggtcactgggtgaactgagagaaaccacgttcacaaacgcgtactgcggacttcctgccgccctgggacctgtcactgtttgtccatgtaagctacagcattactagcagatgctaagatcgagtgatatcactggaaaagtaggtgaatcctactaggaaactttctactccctactaggacctcaagcccctcagccacacagcaaatgctaatatgctccagtgttagcttagaagccttgtgtcaacaagaactggctcctgagtcccaagcttggtgccacacagcaaatgctaatatgctccagtgttagcttagaagccttgtgtcaacaagaactggctcctgagtcccaagcttggtgccacacagcaaatgctaatatgctccagtgttagcttagaagccttgtgtcaacaagaactggctcctgagtcccaagtgctgtcacaggacttgcccattgggatgttttccacattaaatatcaagtaaaaagacttcctggtgctcaggaattacagttcgttcttgaaacattccaaagaggccaccacagcttttcccatgtggcttcttttaaaaactcaaatggcttccttgaaaatactcaaagtccacccaaggaaattagtaataatagaatcagaaaactgtcaggagcataaagatttctgtatcaaaatgaaagaagcaatcctgagttgctgaattacccatctgctaatgaaaccgggatggactgatcatctaaccaagtgcagactgaggattctacttagtcctccgactgggtacaacaacagcctaggttctagggagggtggcagtgaccgggatgccacaatggaagagaaaatgaaaacactggcacagtgaaatgtctcatttccaaacagttttgcctatggccaagcaaggcaataaagacaaactctcccttttccccattgcgtgtgggctgccaggtacaagtaagggaatctttgctgtgcccactgtcctccagtagagaacccaacaggcaagggccccactcaggtatcagctcacctcctgcacctccccttagcaggaactccttccactggcaaaggactgccactgccatctgactcaactgtggcgatgtggacggagtcaccgagctgcttttcttttgcaaaacaaaagtctttttctttgcagtcacgctgtaagacgaggctgctggagaaaacaaaagcacctagatttcagtgctgaatccccacaattgcatgcagctcacacctaccaggggtattccagtgcataggggaaaggaacccggctgaaaaaccagctccttatttttcttttaaataaaataatacgatcctaagtccatttaccatctgaagttgtcacgagtgaacagtcacattactgttgtggaccaggccttagatgagtttctcaggctcagcactgacattctgggccggatcatcctctcttgtgggaccatcctgtgcactgcaggatgtttcacagcacccctggcctctacccactagaatcctacaatctaccagatcctaggatctagttgatcctagaatgctaccaaggagacttgaattttggtcccatcatcaaaaatgccttctgcatcaatcctatgccagtttcccctaaaagagggctaactggaatgttctaggatgtaccaatcctccaggaccctcttagagctcatgccatcagagacaggcctctatctcagggatcaccccggctgacatcaaattcctcttctcttttcccaacatttcaaattgttcttcggactcattgagttccctaaggtgacacgcccccccccccccccacacccaccttggggggtcacggattgctccctgtggccctggcttcagcccacctgctccatgaccctatgctcttctcctctggttctcgaagctgtctgtaaccagggcaggggagataactgtatgggaccattccctggcctccacctgccccagcactctccaggccagcacagtctggcactacagactacagggccggagacaccaggcttggaagtgaccactggccaagagctgacataaaagccaacttccccaaacaggaagggcctgttcttcacaaagataaagaaaactgccagcattttgctggccttaagaagccatgcaaaattaaccagtacatcatgaattaacttcttttactctgctgtgcactgaataccattatgaagcaatatacttttggattaaaaataagcatttttgtggaaaatctgctacatgttttcataaaataaagtgctatgatgtactaaaacctca

SEQ ID NO: 402 - DNA, 3677 bp, Homo sapiens
  source 1..3677: mol_type = genomic DNA
gaacgtgccaccatgcccagctaatttttgtatttttagtagagacggggtttcaccatgttggccaggctggtcttgaactcgtgacctcatgatccgctcacctcggcctcccaaagtgctgggattacaggcatgagccactgacgcctggccagcctatgcatttttaagaaattattctgtattaggtgctgtgctaaacattgggcactacagtgaccaaaacagactgaattccccaagagccaaagaccagtgagggagaccaacaagaaacaggaaatgcaaaagagaccattattactcactatgactaagggccacaaatggggtacgttgatggagagtgatttgttaagagactacagagggaggacagactaccaagaggggggccaggaaagctcctctgacgaggtggtatttcagcccaaactggaagaatgagaaagagctagccagccatcagaatagtccagaagagatggggagcactacactcactacactttggcctgagaaaatagcatgggattggaggaggctgggggaacaccacttctgccgacctgggcaggaggcattgagggcttgagaaagggcaatggcagtagcagtagaaaggacagggtaggagcagggactttgcaggtggaatcattaggtcttatcaacagatatgggcaagcaaagccaggggagaattgatggtaatgctgaggtttggagccaggctagatgggacagtggtgggtgatgcaaaggaaagaggtcaggaagcagggccagacgtggggagaaggtgtgggggtttggtttccatcttgccgagtctgccggaatgtggatgggaagaccaagaggaggagcaaggggcagaggggaagggaatcttaaagaagtcctggatgccacactcttcttccttcctcctcttccctctcctcagaggtctcactcgtggttcttcatttcctgccctgcctccatctcctctgggtgctgggaaagtggaggattagctgaagttttgcttctcggggcctgtctgaatctccattgctttctgggaggacataattcacctgtcctagcttcttatcatcttacatttccctgtagccactgggacatatgtggtgttccttcctagctcctgtctcctcctcatgcctttgctgggtatgggcatgttagggggaaggtcattgctgtcagaggggcactgactttctaatggtgttacccaaggtgaatgttggagacacagtcgcgatgctgcccaagtcccggcgagccctaactatccaggagatcgctgcgctggccaggtcctccctgcatggtatgcagcccctcccatgtttctggccactttgtcctttctcctcccgtttgcacatccctttggaactgtttcctgtgagtacatgctggggtctcccctttcttcccttgctcaggtgaatctcagccccttctcccacccaaaggttcacatggatcctaactactgccacccttccacctccctgcacctgtgctccctggcctggtcctttaccaggcttctccaccctcccctatctccaggtatttcccaggtggtgaaggaccacgtgaccaagcctaccgccatggcccagggccgagtggctcacctcattgagtggaagggctggagcaagccgagtgactcacctgctgccctggaatcagccttttcctcctattcagacctcagcgagggcgaacaagaggctcgctttgcagcaggagtggctgagcagtttgccatcgcggaagccaagctccgagcatggtcttcggtggatggcgaggactccactgatgactcctatgatgaggactttgctgggggaatggacacagacatggctgggcagctgcccctggggccgcacctccaggacctgttcaccggccaccggttctcccggcctgtgcgccagggctccgtggagcctgagagcgactgctcacagaccgtgtccccagacaccctgtgctctagtctgtgcagcctggaggatgggttgttgggctccccggcccggctggcctcccagctgctgggcgatgagctgcttctcgccaaactgccccccagccgggaaagtgccttccgcagcctgggcccactggaggcccaggactcactctacaactcgcccctcacagagtcctgcctttcccccgcggaggaggagccagccccctgcaaggactgccagccactctgcccaccactaacgggcagctgggaacggcagcggcaagcctctgacctggcctcttctggggtggtgtccttagatgaggatgaggcagagccagaggaacagtgacccacatcatgcctggcagtggcatgcatcccccggctgctgccaggggcagagcctctgtgcccaagtgtgggctcaaggctcccagcagagctccacagcctagagggctcctgggagcgctcgcttctccgttgtgtgttttgcatgaaagtgtttggagaggaggcaggggctgggctgggggcgcatgtcctgcccccactcccggggcttgccgggggttgcccggggcctctggggcatggctacagctgtggcagacagtgatgttcatgttcttaaaatgccacacacacatttcctcctcggataatgtgaaccactaagggggttgtgactgggctgtgtgagggtggggtgggagggggcccagcaaccccccaccctccccatgcctctctcttctctgcttttcttctcacttccgagtccatgtgcagtgcttgatagaatcacccccacctggaggggctggctcctgccctcccggagcctatgggttgagccgtccctcaagggcccctgcccagctgggctcgtgctgtgcttcattcacctctccatcgtctctaaatcttcctcttttttcctaaagacagaaggtttttggtctgttttttcagtcggatcttctcttctctgggaggctttggaatgatgaaagcatgtaccctccacccttttcctggccccctaatggggcctgggccctttcccaacccctcctaggatgtgcgggcagtgtgctggcgcctcacagccagccgggctgcccattcacgcagagctctctgagcgggaggtggaagaaaggatggctctggttgccacagagctgggacttcatgttcttctagagagggccacaagagggccacaggggtggccgggagttgtcagctgatgcctgctgagaggcaggaattgtgccagtgagtgacagtcatgagggagtgtctcttcttggggaggaaagaaggtagagcctttctgtctgaatgaaaggccaaggctacagtacagggccccaccccagccagggtgttaatgcccacgtagtggaggcctctggcagatcctgcattccaaggtcactggactgtacgtttttatggttgtgggaagggtgggtggctttagaattaagggccttgtaggctttggcaggtaagagggcccaaggtaagaacgagagccaacgggcacaagcattctatatataagtggctcattaggtgtttattttgttctatttaagaatttgttttattaaattaatataaaaatctttgtaaatctcta

SEQ ID NO: 403 - DNA, 2378 bp, Homo sapiens
  source 1..2378: mol_type = genomic DNA
gagttgcttggaggagcttggagaaaccagaagtgagatccaggagaagtaaggccctggagtgccaggagcccttctcccaaagatggagaaataaatgaagaaatacaggaaaataagcattgggtgttttgcaatggctacacaaactagtcatgtcttccatggtcaagaaaatatgtttctggaaaaccattgcattaggagaaacactggcagagattcaaagaagccactaaagcagaagaatatgaatggacttgggcaaaattcggacaatggattattggttacacatgttaaccagacacaggacttactgaggctgcaggggagtgagacccagtcttcagattgggaggactctgaagactggctttcggctcacagtttaaaatgtcagaaactcaccttggctgacctgataagccagggcacagaagtgctgtaagtctgaagctgttccccgcaccccccacagctgcagtgacacatgcaaccccctggcccgagagatcccctcataaggctttgcttcttcagggaggagggcaccaatgtcgtgcagaaaatatgtttctccacccagatcatccgccattttgagtcaaagctttctgacactattgaagtctatcaagagagaattcagtggctcacagaaaacagcaagaaggcatttggcctcatcaaaggggccagagtcagcatcctcatagatgtgtcagccatcagcagtggccctcagaaagaagagttccaaaaggacctcatgagcctcatcgatgagcagctgagccacaaggagaagctgtttgtcctgtcctttggcaccaatgccgggtccctctggccagaccccatggaagtcagcgcctccaccctccaggaacttaagctctgggtaaagacgctgcagcctgatggaggcagcaacctgctacaagctctgaagaagatcttcactctcaagggactggattccctggtggccatcatgagaagctgcccagatcagccttctgaaatcctgtctgactacatccagcagtccaccatgggaagagacctcatcatccacttcatcacctacagatgcgatgatcagatgccccctgctgtcctgaagaaccttgcagaagctgttaggggctactaccactgctacagcccaaagatggagcactacaccagccgggacatggatgagctcctggcagaaattcagaaggcccagagcctcctcagccacgtgcaagccctgcagcacagcagcccctgtgaggcgctcacctgcaccatggaggagccaagaaattaagtctatatcaggtcctggcacccaatgcattctctcctgtggaggaatttgtacctattctccagaaaacagtatcatcgaccatccatgagaaggcaatgatacaatttgaatggcacgacgggacagtgaagaacattcatgtggacccacccttcctctataagtaccagcaacagctcagcagagctatgcggatgtatgagaggcggattgagtggctctccctggccagcagaagaatctggggcacagtctgtgaaaaaagggtggttgtactgctcgatatctctgcgaccaattccatgtacattattcatatccagcactccctgcggctgctgctggaggagcagttatccaacaaggactgtttcaacctcatcgcgtttggaagcacaattgaaagctggaggcctgagatggttcccgtgagtcacaacaatttacaaagtgcctggcggtgggccctgaacctgcggtgtcggggcagcaggaacgttctcagcgccctgcggaaggctgtggaagtagacttcaaggacaaagacaaacaccaatcgcagggaatctacctcttcactgggggcatccccgaccaggacatggactggaccaggcacagagaaggccctggagaaacatggccaggctgggctgcccagagccccacagcttcaaggccctcagctgctggcccctcctaccttctcttccccaccagcctacactcagtgcctacatggctgaggcctgtggcggctgcgacctccagctgaacgtgtgtctcttctacgtgggcgagccaaagatggacaccacaccccctgcccgctatgccagtcacactgacacagccgccgcctacaaggaggtcacccgggctgcaggtggccgcttccactggtttggagacacaggcatttatgagagcgatgacatcaactccatcatgtctgagatggaaaaggctctcaactactcccaaaagtgtgccttcctcatggcctccctgaagaaccattcaggaaaagtactgggaagttcagccctcccg

SEQ ID NO: 404 - DNA, 3624 bp, Homo sapiens
  source 1..3624: mol_type = genomic DNA
cccacgcctaaggtccaggtcccagggctttcccttgcaccttcatccctggccctgcagaggcctgcttctcgcttccggggtcgccagagcgcccctcccgccaccccgccatctcttggccggatcgtgcgagagaaggggaggaggtctggggtttccagagtccgcggttttgctaagaagccgcagtgatgttgacgcggctggtcctcagtgcacacctgagtagcacgacctctccgccctggacgcacgctgccatcagctgggagctggacaacgtgctgatgcctagtcccagaatctggccccaggtgactccaacaggcaggtctgcctctgtcaggagtgagggtaacacctcctcactctggaatttctcagctgggcaggatgtgcatgccatagtaaccagaacctgtgagtctgtgctgagctctgccgtctacacccacggctgtggctgtgtgaggtctgccacaaacattacctgtcagtcctcaggacaacaaaggcaggcggcccggcaggaagaggagaactcaatctgcaaggcccatgatagtagagagggccgcctgggctaccccctcagtgcccatcagcctggttccggtggtcctaactagccctgtctccttgccaatagccctgtgctccccagccccctcccccatgcagacggctgctatgacatccctgttccttaaagtgcggggttcctcgctgccttctcctccctaactggcaccctgtgcaaacctgctgcagagaacagtgtcttgggcagtgcgatagtcctccagttcaccaacagtaaaaatggtctcaatggggagagatgtctgactgcaagcgctgagtccttccagaggagggctggagggacaggagggcggatcaggtggcctcctgagctggttcctggcgccgatgtaatggatgctgattaccagcggtgagggcatcgtggaagggactgcagaggtgtgcgagatgagtggaatgaggccccaggtgctgatttttatgcccaggatgctcctggctgtcatgggctcccaggggctccaggcatgcacagctcttccgcctcttctcgaagcagaatgccccagaaagggcacctttactatccagggtggctagagtcgccggtggctgtgcgtgggggctgagggctagaatcagggcaaggggctttcagtgaaacgcagagccaggcagggacagcgcggatctcagaacagtctttgtcagatgggacacttcatccccgcggagctgtccgtgcacacagcgttctctgattgccaagctgttaagcactctgcggaagggagctgctgggaaggcggacgaggcatctcaggtgggtgaggggctccgctgcatcagcgttgctcagacccaccatccctggggagctgtcactgacgcccaggtttccccttctcagtacatcctgtgcctcctttctgggctgcctcagtccctcaaaggggagctccccacatgggtgggattattgttgagaacagtcagggtgttgacgaggatgcaggactgaggttgctcccagagtcactcagtgtccctcgttttgctcggagacatcctgacctgggcaagctctttagggagcatctttcctgtctgtgccgcattctccatggcctttgcactctttttgcttttgttttaaacacgtcatcaattcattgcctgcagcagcttgtactgccttttggtttttctttgcagaacagctctggaagtgaagtgtgtgtgtgtgtgtttgcgtgcactactctggactgggtgccttacacgtgttaacacacttgatcagctcagcaacactgtggaataagtgtaatgtgtccattattcagatcaggagactgagattcagagcagggagggaacttgccagagaccacatggcttgcaagcagcagaacctgggtttgaactgacagcggcctgacttcagaacccacgctttcccaccctcctacttcacacccatttgagtccagccatcttggttctgaatcataaccctgactctcctggccacatcctatgctccacattacatgttactctacaggttaccaccctgggtctctttcctatataagaaatagaaatatttgtggaaatcctaatgttcatgacatctctgccattttatcaggaaaaattctatcctaccaaatactggtataatgtacttggcccccctggattggattggtataggttaagagcagatataaggtctgaaataatcccggtattcctagtatgtggaattattatcatggaatcataatggcagtttgcacctctgttgggctctttcaactcctgtgttggctcaggagaatcctatcacattagtccccttttgtagttggatagttgggcttgccagaaggcacacaaatttgggttaactcatttccaggattctggcattgtagacacagaaacaccgactgtgaagttttatgtaatacaaacactgggagatttagcaataggcctgccaggcggccctggcttctggctgcacaacaaaggggggtggctggtgctgaatggggcaacagaaggtgagtttggggcctgcagagcctcgggtagcccagaggagcgagagagtattggctgttcattttaactccatccttggaggattccccaccacaagcctaaggaagtaataaaacctcatgcattattttttgatatctggagagaaacacgtaccctagaaatgctgtggactaattccatggttactttgtcattaaagaaaccaaaatactgagaggtcaccataaacacaaaaaggcagagagagaaggattaaatggtgtttcatgtaaggatctttaaagggagacagaattctagtctgaaaggagcgcaggcagatctggcattttgcttggggagttcaattctttggagaaaatacagagacaaaaagaccattttgatggtatttaaaatatccctctgcccagtgtatctaagtgagtctaaatatattcagcaattttttaaagggcagatattaggcccgattcaaggtatggaatatagattcgaaagggttagtgataggtgagtgcctttcaggtagctttgcatcacagaccaagcccattattgaggactgtacgtatggagcaggcccgtgagcttgtgactgagtttcccaacctgccaggctcccatttgcttaggatgaatatttttctgccctccctggtgagccactgtgggccactcgccactccttacaccccttccctttaatacctcgcttggcttacttgcaaaatccacatgcatcctcctggatctcacagaagatgtatgaaaagtcatggccatgaaaagggcacggaaatcaaattaattaattttgctttttccccacgtttgtttctgtctgtctggtacttttcctttttaagcctgccatctctttgaaagtgagccgcacagtgataatccattttcttcattgtaaccccacagtgtatgtattccacattaaataataaaagggattaataattaaatcaaaatgaaaaacca

SEQ ID NO: 405 - DNA, 2545 bp, Homo sapiens
  source 1..2545: mol_type = genomic DNA
cacagggagccggctaaaacagactactcccccgtgcagtcgttccctctaccctaataaggctttggcgcctctcccagaactcggtcctggggaatgctctttgcctggtccagccccgacaaacgtggtctgagaacagcggagcgcggaaaccgcggagcatgactcctccgaagctgcgagcgtcgctgtcgccgtcgctgctgctgctgctgagtggttgcctcctcgcggctgctcggagggagaaaggggcggctagcaacgtggcggagccggtccccgggcccactggcggctcctcgggtcgcttcctcagccccgagcagcacgcgtgcagctggcagctcctgctgcccgccccggaggccgcagcgggcagcgagctggcgctgcgctgccagagcccggacggggcgcgccaccagtgcgcctaccgcgggcatccggagcgctgcgcagcctacgccgctcgccgcgcgcacttctggaagcaggtgctgggagggctgcgcaagaagcggaggccctgtcacgaccccgcgccgctccaggcccgcttgtgcgcgggcaagaagggccacggcgccgagctgcggctagtgccccgcgcgtccccgcccgcacgccccaccgtcgcgggattcgcgggggagtccaagccccgggcccggaaccgggggcggacccgggagcgtgcgtccggcccagccgctgggaccccgcctccccaaagcgcaccgcccaaagaaaacccctcagagaggaagaccaacgagggcaagaggaaggcggccttggtccccaacgaggagcgacccatggggaccgggcccgaccccgacgggctggacgggaacgcggagctcacggagacctactgcgctgagaagtggcactccctctgcaacttctttgtcaatttctggaacggctgagactgcctgccggcttagggagggttgatgggggaggcgtggggaagggaaagctaagggcgtcttagaccggggggtactgtgatagagattggggagaagtccaggttctcgaatgggggtgggggcaagggtaagggtgagatgcttgggatgagagtgtaaggggtatggagaatctctgggatagcagagaagttaaaaattttgaaaagtctcagtcctgattaagagcaggaaaaataatggaaacagaaataggcgtactttaaatgtgcaaaaactggagactggggagagaaatcgatgcagagggaggctgagaataagggggagatagagtgactaaagtgatgtgagtcccatgtggggagggggatgcaatgtttattgtttaacatttctattaaatgcagccatgagcaattgccaacctgagccaggttgaatcaatgtcttctcacttaatcagctaacaagactgcagactttttttccgtttctgaattggtataaacttggatgcggcgtggtgggtgtcatagataacctctatagggacagaagcctcacaggtcaaaactggctccaaggaaagttttgcagaatgatttcctttccattcttttagaagagctacctttttttttttttttccctgacagggtctggcttgcccaggctggagtgcggtggctagtcacaggtgtaataataggcactgcagtctccaactcctggcctcaagggatcctcacatcttagcctccagaatagctaggagtaggagtagctgggactacaagcatgcacagctgcacttggcttagaagtgctactttatttttatttttgagacagggtcttgtgtcatccagactggagcagtggtgcaattatggctcactgcggcctcgacattccagtctcaagtgatcctctgcctcagcctccggagtagccaggactacaggggtgtgccactagaagtgctactttttaacgaaatggtgactaatgttctggaactttcccattaaccttctgcatttagaaggaattatagatgttgagtgctccagtaaacagtgattctctttatatctgatttttttttttaaacagctaaaatgtaagtatgtatctcagagtcattttgaccattatggaagttgtatctctctgtttcatgtaactaattattaatatatttcatttttagtgtgatgtaatgagagactgtgtgtgtatgttaggtgctcaataaaaactgtatggttagatttaaagaagtggcaaggcaatggaaattctacctgcatttgatctacttccaagtacaccttgaattaagttcttaaacacatcttgaattgctgggaaaagacagaaactaagaagttgacataaagcaagagtcacaaactggcagccacctggccttatcattgttctatttgatttgcaccctggttctctttctttttcccttcctccccaccttcctcccatccattgttgaatctgtggatgcagagcccacggatgtggaggggcaactatatatatgtttttccattatatatataaatgtgtgtgtgtgt

SEQ ID NO: 406 - DNA, 1874 bp, Homo sapiens
  source 1..1874: mol_type = genomic DNA
atcaggttcaacgcagtgactgctcagtagaagccatggctcgcagacactgcttctcctactggttactggtatgctggttggtggtaactgtggcagaaggacaagaagaggtatttacgcctcctggagattcacaaaataatgcggacgctaccgactgccagatctttacactcacccctccacctgccccgaggagtccggtcacaagggcccagcccatcacaaagacacccaggtgtcccttccatttttttccacgaaggcccagaatccattttaggtttccaaacagacctttcgtcccttcaaggtgtaaccaccgttttccattccagccattttattggccacaccgttaccttacttataggtatttccccagaagaagactccagagaggaagctcatctgaggaaagctgagagggaagagaaacccaaacatactgaagcaaaaaaaagcctatccttcagaaaaaagcaacaaaaagatttctgttttatctttcgaaactaaaactattggatttgaagattaagtatcctaaacatcactgactagaaactgttctctttgtcagcagtgaagatattggatcataggttattgatggttgcaaaattggacaataaccacgttatttttatcctcaacctcttatggtcacaggatatttatgcaaataaaatctttaaatgggtggctctagtaattcctatccatactaagatgctgagagaatccatctcctcctctaaattaaacaggatttaaataaattgagatcattataaaccacacgaagaaactgatgacaccgtttttatactcattggaaaacatacagagcaaggtgcattgacaaagtaaactttaaaagaaattataaagcttaaagcaattaaaaagttatgaggagtctgactgtagctaatactttaaagatataaactgacttgtctaacccaaataataataattattattattttcttggagacagaatttcactcttgttacccaggctggagtttagtggtgctgtctcggctcactgcaacctctgcctcccgggttcaagcaattctcttgcctcagcctcccaagtagctgggattataggtgctcgctaccaagcctggccaattttttgtatttttagtagagatggggtttcaccatgttggccaggctggtctcgaactcctgacctcaggtgatccacccacctcggcctcccagagtgctgggattacaggcatgagtcactgcgcccagccccaaataattacttttaaactatagtatctaaatttactttaatgttgacttcaactgatgcaaattaatttgataattttctcactgtttcccgttatcattacatagatgctggctaaaataatatacttcctctcaaacttttaacgtaattccaggttcaaaatgcctgattaaactgctacaagaatattctggtacctctagaactccacagagataagttcactcaactcttggaaccttgtattctcagggtgcaatatgagaaacaaatcccacagattgcattgattggttatttgttttggccactctgtaaaacacatcttcctgtttatgccacttatcttgcctgtaacataagaactttagttctgcatatgtggtcagtggtttgcactttttcctcccaagatctacatgcaaaagttgctgttgctgctgctgctacaaaaacagaaaaaaaaaaatcaggatgaagacatgaaaggactttgggaatggttgccctaaaaaaggaaagagagataaaatcatcatgctatgtttctttgctttattaaaatgatcaaaaaagaaaaaaa

SEQ ID NO: 407 - DNA, 2716 bp, Homo sapiens
  source 1..2716: mol_type = genomic DNA
acatctggctgggcttcgctccttgcgcgtctgtcccactttctccctctcttcctttactttcgagaaaccgcgcttccgcttctggtcgcagagacctcggagaccgcgccggggagacggaggtgctgtgggtgggggggacctgtggctgctcgtaccgccccccaccctcctcttctgcactgccgtcctccggaagaccttttcccctgctctgtttccttcaccgagtctgtgcatcgccccggacctggccgggaggaggcttggccggcgggagatgctctacgggcggcgcgggaggagcggccggcgggacggagggctgaagaacaacatgaaaaatacaggcccagtcaggaccaggggctccctgcttcccggtgcttgcgctgctgtgaccccggtacctccatgtacccggcgaccgccgtgccccagatcaacatcactatcttgaaaggggagaagggtgaccgcggagatcgaggcctccaagggaaatatggcaaaacaggctcagcaggggccaggggccacactggacccaaagggcagaagggctccatgggggcccctggggagcggtgcaagagccactacgccgccttttcggtgggccggaagaagcccatgcacagcaaccactactaccagacggtgatcttcgacacggagttcgtgaacctctacgaccacttcaacatgttcaccggcaagttctactgctacgtgcccggcctctacttcttcagcctcaacgtgcacacctggaaccagaaggagacctacctgcacatcatgaagaacgaggaggaggtggtgatcttgttcgcgcaggtgggcgaccgcagcatcatgcaaagccagagcctgatgctggagctgcgagagcaggaccaggtgtgggtacgcctctacaagggcgaacgtgagaacgccatcttcagcgaggagctggacacctacatcaccttcagtggctacctggtcaagcacgccaccgagccctagctggccggccacctcctttcctctcgccaccttccacccctgcgctgtgctgaccccaccgcctcttccccgatccctggactccgactccctggctttggcattcagtgagacgccctgcacacacagaaagccaaagcgatcggtgctcccagatcccgcagcctctggagagagctgacggcagatgaaatcaccagggcggggcacccgcgagaaccctctgggaccttccgcggccctctctgcacacatcctcaagtgaccccgcacggcgagacgcgggtggcggcagggcgtcccagggtgcggcaccgcggctccagtccttggaaataattaggcaaattctaaaggtctcaaaaggagcaaagtaaaccgtggaggacaaagaaaagggttgttatttttgtctttccagccagcctgctggctcccaagagagaggccttttcagttgagactctgcttaagagaagatccaaagttaaagctctggggtcaggggaggggccgggggcaggaaactacctctggcttaattcttttaagccacgtaggaactttcttgagggataggtggaccctgacatccctgtggccttgcccaagggctctgctggtctttctgagtcacagctgcgaggtgatgggggctggggccccaggcgtcagcctcccagagggacagctgagccccctgccttggctccaggttggtagaagcagccgaagggctcctgacagtggccagggacccctgggtcccccaggcctgcagatgtttctatgaggggcagagctcctggtacatccatgtgtggctctgctccacccctgtgccaccccagagccctggggggtggtctccatgcctgccaccctggcatcggctttctgtgccgcctcccacacaaatcagccccagaaggccccggggccttggcttctgttttttataaaacacctcaagcagcactgcagtctcccatctcctcgtgggctaagcatcaccgcttccacgtgtgttgtgttggttggcagcaaggctgatccagaccccttctgcccccactgccctcatccaggcctctgaccagtagcctgagaggggctttttctaggcttcagagcaggggagagctggaaggggctagaaagctcccgcttgtctgtttctcaggctcctgtgagcctcagtcctgagaccagagtcaagaggaagtacacgtcccaatcacccgtgtcaggattcactctcaggagctgggtggcaggagaggcaatagcccctgtggcaattgcaggaccagctggagcagggttgcggtgtctccacggtgctctcgccctgcccatggccaccccagactctgatctccaggaaccccatagcccctctccacctcaccccatgttgatgcccagggtcactcttgctacccgctgggcccccaaacccccgctgcctctcttccttccccccatcccccacctggttttgactaatcctgcttccctctctgggcctggctgccgggatctggggtccctaagtccctctctttaaagaacttctgcgggtcagactctgaagccgagttgctgtgggcgtgcccggaagcagagcgccacactcgctgcttaagctcccccagctctttccagaaaacattaaactcagaattgtgttttcagc

SEQ ID NO: 408 - DNA, 1132 bp, Homo sapiens
  source 1..1132: mol_type = genomic DNA
ctggtccgcgcagtcagggcatcctccgcatcctccacatccttccatggctctgaagaataaattcagttgtttatggatcttgggtctgtgtttggtagccactacatcttccaaaatcccatccatcactgacccacactttatagacaactgcatagaagcccacaacgaatggcgtggcaaagtcaaccctcccgcggccgacatgaaatacatgatttgggataaaggtttagcaaagatggctaaagcatgggcaaaccagtgcaaatttgaacataatgactgtttggataaatcatataaatgctatgcagcttttgaatatgttggagaaaatatctggttaggtggaataaagtcattcacaccaagacatgccattacggcttggtataatgaaacccaattttatgattttgatagtctatcatgctccagagtctgtggccattatacacagttagtttgggccaattcattttatgtcggttgtgcagttgcaatgtgtcctaaccttgggggagcttcaactgcaatatttgtatgcaactacggacctgcaggaaattttgcaaatatgcctccttacgtaagaggagaatcttgctctctctgctcaaaagaagagaaatgtgtaaagaacctctgcaaaaatccatttctgaagccaacggggagagcacctcagcagacagcctttaatccattcagcttaggttttcttcttctgagaatcttttaatgtcatttatatacaaaagaaattctcaaatgttaaaataaaggaatagtttattgcttaatataacttatcatcactttgcttctttactgaatcttctacactcttgcctgatacctaaatttaatgtttgtttttaactcaaaaaatgtactgtagtatggaaaatggatagcagtagaataaagtcttaagattattttttaattacaaatccatatgtgtatcaaaagtgttccactctttaattttctaatgagaatggattatcattttagttatagtacatttagagaactaaagacttttcacatatcaaatagtttccttagataccaatagtttcctttatgaataccatcaacatcattcagaaacaaaatg

SEQ ID NO: 409 - DNA, 4610 bp, Homo sapiens
  source 1..4610: mol_type = genomic DNA
aagcagctctgggatttcgacagagctgggctcagaagccagttgttggcgctgtccgtggtgctgaggaattcccggctgccggcagaatgagctccaaatcagcaatctgcaaactgctcttactgatgcagaaacccagctaaagttgctcctttccttcacatccacagttagtattttccggtgtgtaagaggggattcaagcaacacactgtggacgatggtgatggtattgccagcggagtgggctttaagctacagcatgctgttgctgtttgtgatcctcagagcctagccaaatcacctctactgccgtagcaaacactgtgtaagtgaactcatgtgtggaggaggcgtaatcagccgggaaatttcatagaaggatctaagaaaatgctaaaaataagttcaacatgattctgctactggggtctggatttctacaggaccagctttgcttcttgctttgaattctgaagacaggtccaaagcaaatttcttatatgtgtctgctgtgtttctttctggaagggcgggagactgcttctttactgtgttttgaaatgggaggtagagagaatggattgcctttaattcatgcctaaaaaatgtattctttgggtaattaaagaggaactgctttcttaaaacatacctgaccttttagttcattttgggctgtgacccctaccaccaccattaacctccagagtgattagcctacccctcttgtattcccatggaaggagctgagtatatttaatattaggagcacatccagaagtctttgaagagggggatggctcttcatattcatgaagcttgcatacttctgttggtcatccctggattggtcacctctgctgctatcagtcatgaagactatcctgctgatgaaggtgaccagatctccagtaatgacaatctgatctttgatgactatcgagggaaagggtgtgtcgatgacagcggctttgtatacaagttgggagaacgatttttccctgggcattccaactgtccatgtgtctgtgctctagatggacctgtttgcgaccaaccagaatgccctaaaattcacccaaagtgtactaaagtggaacacaatggatgctgtcctgagtgcaaagaagtaaaaaacttctgtgaatatcacgggaaaaattacaaaatcttggaggaatttaagccctctccatgtgaatggtgtcgctgtgagcccagcaatgaagttcactgtgttgtagcagactgcgcagttcctgagtgtgtcaacccagtctatgaaccagaacaatgttgtcctgtctgcaaaaatggtccaaactgctttgcaggaacgacgataattccagctggcattgaagtgaaagtggacgaatgtaacatctgtcattgtcacaacggggactggtggaagcctgctcagtgttcgaaacgtgaatgccaaggcaagcagactgtgtaggacaaacttccacccaatgatgagttcttaggaaaggatgctatggcttcaacactgcacatgtttaacacaaaacaaaacaaacaaactcctgccagctacaacagggtcaccagcaaaactttctagggttgacaaaagtgaatattttcctaagaggaaatttctttctctcttgctatataaaatatatatagtatatagctatctaaatcgcttttgtatttaccaatgcttgatggtgacttgacgactggattgctggaacaaaaagaaagaaatagccttgcacaggctccttccctggtaatgcctctgacctaccagctcactgtcccctggtttacttcatttttactcttctgtacattgtacatggcattgttctcctgtaatatttgttttttcacttttagagtctaaggggctaaatttgactgcacagtaaagttttgagttgtgtaaaaaaaaaagtttggtaaaggaatgtcaggggaaatatctttcccgagctgggaaacacaagagcatccagtcaattgctcccctagggtgaatcatgccctgtagactaaggaaagaggggtgggcacatagacgggcctattgctggacagggttgggaacaagtactttgtccattacgtgggggctcacaatttaattcttacaaaccacacatttcatatggaaaacctcgaaactgccaatcaaaatctattacgtaaagaacaccataagctcaactaaagaatccaaagagagacagatctttaaaattgtagcattaatcatcagactttttcatgatgtgaaatttgagtttggtttgtagctaaacacactctaaactcactgtcatcaggcaatataaataccagaaccagggtgagaaaacccactgtgaatccaaatccttatgaacatctctggcttttgagttcagatttggctaaaagtcagtagtacacactggcagtttttgtggttcgggactgtgtttgccatgttgtagtaacaaccactcagccctatgtctgaaacacagattcaggacaccctttccacctcaagtgctgatttaaattaaagattagggtagagtgagtcttgcacaatacaattccatttgttgaacattttttaaaatgtatatattagatactgaaaaattaaagtgaacctttgaagagtctctaggttgccctggtaatgctgctagtatagtaacagaaaaaacaaaacacacagggtatctgatgccacctcgattcaagtgcaaaattaacaattctgaaaccacatggcatagttagtcgcttattccatgctcctgccctaaaaaccctggcacagatctgatagggtccttgaagagactttacagttgtctttattatcaatgttctttctttttctgctcccccaacctgggctttgccatagctcctgtggagagccatattctagagcaaggtgtctcaatcttagtaggattgacatttggggccagatcattattcgttggtgggggctgtcctgtgtgcttttaggatgtttagcaccatcactggcctctatccactagcaacatcccagcaactggtgacaaccaaatttctccagacattgcctaatgtccctaaggagtgggagtgaggggcctaatttcacctcgttgagaaccagtggtctagaataatcagtatagagtggtttctggcaggggacacagtaggcaagctctagcagcacctgtggcttttgtgagcttctgatccctatgggacatacacagtcagcatttccaaggggtcagtcttctccatagagagtgaggcttctaatgctataggcccaccctcaggaaacatatttttttgagtcttgtcaactggtttttcatttaaaattgtcagcctctcctccctggaagcatctgctgtcatcaagaaagagttgtcatttccaaaattaacgtgctgacgagtcagacctgacattcttatgcacactgtgcttgcgttatgatacaaatagccatgccggcaccatcccgaggaagagcatcaagccaccttcccttagaacaccaatttgcagcaaggttggtgcctttcatttgccaccatggatacatcatatagacagtcatgaatcattcatgagcaatgctgcatgatttatgtctgcactcaaaagtaaaggaattccacactttagcttatgtctagacagagatgtattatagagctttctttgccccgaggttgcctgttgccaacttcaaaaatccacactcttggaaagaaataataataataaatgacaggaataaggtttgaaactcagaaaatatcattaatagagccatgcagcatagtaccttatctattattaaggagttactatgtccttttttagaaaacagaaagagagtacaactgggaagctgaagtgcagaaattttgcatcaaagcattggcacagcgagagtcacagcaagaatttactagaattgaatgggacatccattaaggatctctcttcagagagtttgcagaaagcaggctgttctgtggcctctgataaccagctagagagagggatttttatggttggttttgttgttgttggattttctttttctcaaagtttcactgcaggctgtttcctttaagattttgtagcactgacatttttccccctttagggagagatgaacctatactgtgacaatttctcataaactgataaacattttacaacttccttctacccaggtcattgagaaattctttccagactctgaacaacagagctctggtctcatctgttgtttgtttcttgtgaagtctttgtttgcagccacactgtcatctctgtactcctatttctcctccgcctttggttctcggctttaacaacagctatgttaaaataagggatcaacatcttgtttgtcagctgatgcctattaaaaacgattcagtttctaaaatctttgaaaaatggcgtgcctgaaaactagtgagaaaaaaaaaaaacctaaacactaaactgtaaaaaggggattctagcaacaatatttgatgtgtaaaagaatatattattaaaaaattattttgttaaatataaa

SEQ ID NO: 410 - DNA, 1610 bp, Homo sapiens
  source 1..1610: mol_type = genomic DNA
gcggcggctggcactggctccggactctgcccggccagggcggcggctccagccgggagggcgacgtggagcggccacgtggagcggcccgggggaggctggcggcgggaggcgaggcgcgggcggcgcagcagccaggagcgcccacggagctggacccccagagccgcgcggcgccgcagcagctttactcctgaagccagcgagatcacgaacccactgggagaaacgaacaactccagacgcactaccttaagagctgtaacactcactgcgaaggtccgcagctgcattcctgagccagcgagaccacaaacccaccagaaggaagaaacttcgaacgcatccgaacatcagaaggaacaaactccagacacgccgcctttaggaactgtaacactcaaccgcgagggtccgcggcttcattcttgaagtcagtgagaccaagaacccaccaattccggacacactgggattacagttccaggaaggatgttacctttgacgatgacagtgttaatcctgctgctgctccccacgggtcaggctgccccaaaggatggagtcacaaggccagactctgaagtgcagcatcagctcctgcccaaccccttccagccaggccaggagcagctcggacttctgcagagctacctaaagggactaggaaggacagaagtgcaactggagcatctgagccgggagcaggttctcctctacctctttgccctccatgactatgaccagagtggacagctggatggcctggagctgctgtccatgttgacagctgctctggcccctggagctgccaactctcctaccaccaacccggtgatcttgatagtggacaaagtgctcgagacccaggacctgaatggggatgggctcatgacccctgctgagctcatcaacttcccgggagtagccctcaggcacgtggagcccggagagccccttgctccatctcctcaggagccacaagctgttggaaggcagtccctattagctaaaagcccattaagacaagaaacacaggaagcccctggtcccagagaagaagcaaagggccaggtagaggccagaagggagtctttggatcctgtccaggagcctgggggccaggcagaggctgatggagatgttccagggcccagaggggaagctgagggccaggcagaggctaaaggagatgcccctgggcccagaggggaagctgggggccaggcagaggctgaaggagatgcccccgggcccagaggggaagctgggggccaggcagaggctgaaggagatgcccccgggcccagaggggaagctgggggccaggcagaggccagggagaatggagaggaggccaaggaacttccaggggaaacactggagtctaagaacacccaaaatgactttgaggtgcacattgttcaagtggagaatgatgagatctagatcttgaagatacaggtaccccacgaagtctcagtgccagaacataagccctgaagtgggcaggggaaatgtacgctgggacaaggaccatctctgtgccccctgcctggtcccagtaggtatcaggtctttctgtgcagctcagggagaccctaagttaa

SEQ ID NO: 411 - DNA, 446 bp, Homo sapiens
  source 1..446: mol_type = genomic DNA
ggccctcaccagaagctcatcagaagcagatgctggcaccactcttcttatgctgtctgcgtaacttgttcagaaaactcattagcttccaacctcctcaattaggcagaacaaacatgcattactccaaattgccccgcactgcgatagagacagagttcaagcagaatgttggcccaccacccaaggatctgaccgctgaagtttacttcccttcaatcaaatcgagatcacatcttcctgcagttttctataatcagtatttcaagcatccaaaatgtgtaggagaatatggacccaagaacggagcagagagacaaatagaggaacggaaagttttgcctacaaccatgatgttctcaatgttagctgactgtgttctaaaatccactccaattcccattttgggagttgctatgtgatgaaggtctgcccctgtggtgttg

SEQ ID NO: 412 - DNA, 4615 bp, Homo sapiens
  source 1..4615: mol_type = genomic DNA
gattatatataagaggacccaggagttacatcaggactcaggaagagatagacccataatgatgctgcctcaaaactcgtggcatattgattttggaagatgctgctgtcatcagaaccttttctctgctgtggtaacttgcatcctgctcctgaattcctgctttctcatcagcagttttaatggaacagatttggagttgaggctggtcaatggagacggtccctgctctgggacagtggaggtgaaattccagggacagtgggggactgtgtgtgatgatgggtggaacactactgcctcaactgtcgtgtgcaaacagcttggatgtccattttctttcgccatgtttcgttttggacaagccgtgactagacatggaaaaatttggcttgatgatgtttcctgttatggaaatgagtcagctctctgggaatgtcaacaccgggaatggggaagccataactgttatcatggagaagatgttggtgtgaactgttatggtgaagccaatctgggtttgaggctagtggatggaaacaactcctgttcagggagagtggaggtgaaattccaagaaaggtggggaactatatgtgatgatgggtggaacttgaatactgctgccgtggtgtgcaggcaactaggatgtccatcttcttttatttcttctggagttgttaatagccctgctgtattgcgccccatttggctggatgacattttatgccaggggaatgagttggcactctggaattgcagacatcgtggatggggaaatcatgactgcagtcacaatgaggatgtcacattaacttgttatgatagtagtgatcttgaactaaggcttgtaggtggaactaaccgctgtatggggagagtagagctgaaaatccaaggaaggtgggggaccgtatgccaccataagtggaacaatgctgcagctgatgtcgtatgcaagcagttgggatgtggaaccgcacttcacttcgctggcttgcctcatttgcagtcagggtctgatgttgtatggcttgatggtgtctcctgctccggtaatgaatcttttctttgggactgcagacattccggaaccgtcaattttgactgtcttcatcaaaacgatgtgtctgtgatctgctcagatggagcagatttggaactgcgactagcagatggaagtaacaattgttcagggagagtagaggtgagaattcatgaacagtggtggacaatatgtgaccagaactggaagaatgaacaagcccttgtggtttgtaagcagctaggatgtccgttcagcgtctttggcagtcgtcgtgctaaacctagtaatgaagctagagacatttggataaacagcatatcttgcactgggaatgagtcagctctctgggactgcacatatgatggaaaagcaaagcgaacatgcttccgaagatcagatgctggagtaatttgttctgataaggcagatctggacctaaggcttgtcggggctcatagcccctgttatgggagattggaggtgaaataccaaggagagtgggggactgtgtgtcatgacagatggagcacaaggaatgcagctgttgtttgtaaacaattgggatgtggaaagcctttgcatgtgtttggtatgacctattttaaagaagcatcaggacctatttggctggatgacgtttcttgcattggaaatgagtcaaatatctgggactgtgaacacagtggatggggaaagcataattgtgtacacagagaggatgtgattgtaacctgctcaggtgatgcaacatggggcctgaggctggtgggcggcagcaaccgctgctcgggaagactggaggtgtactttcaaggacggtggggcacagtgtgtgatgacggctggaacagtaaagctgcagctgtggtgtgtagccagctggactgcccatcttctatcattggcatgggtctgggaaacgcttctacaggatatggaaaaatttggctcgatgatgtttcctgtgatggagatgagtcagatctctggtcatgcaggaacagtgggtggggaaataatgactgcagtcacagtgaagatgttggagtgatctgttctgatgcatcggatatggagctgaggcttgtgggtggaagcagcaggtgtgctggaaaagttgaggtgaatgtccagggtgccgtgggaattctgtgtgctaatggctggggaatgaacattgctgaagttgtttgcaggcaacttgaatgtgggtctgcaatcagggtctccagagagcctcatttcacagaaagaacattacacatcttaatgtcgaattctggctgcactggaggggaagcctctctctgggattgtatacgatgggagtggaaacagactgcgtgtcatttaaatatggaagcaagtttgatctgctcagcccacaggcagcccaggctggttggagctgatatgccctgctctggacgtgttgaagtgaaacatgcagacacatggcgctctgtctgtgattctgatttctctcttcatgctgccaatgtgctgtgcagagaattaaactgtggagatgccatatctctttctgtgggagatcactttggaaaagggaatggtctaacttgggccgaaaagttccagtgtgaagggagtgaaactcaccttgcattatgccccattgttcaacatccggaagacacttgtatccacagcagagaagttggagttgtctgttcccgatatacagatgtccgacttgtgaatggcaaatcccagtgtgacgggcaagtggagatcaacgtgcttggacactggggctcactgtgtgacacccactgggacccagaagatgcccgtgttctatgcagacagctcagctgtgggactgctctctcaaccacaggaggaaaatatattggagaaagaagtgttcgtgtgtggggacacaggtttcattgcttagggaatgagtcacttctggataactgtcaaatgacagttcttggagcacctccctgtatccatggaaatactgtctctgtgatctgcacaggaagcctgacccagccactgtttccatgcctcgcaaatgtatctgacccatatttgtctgcagttccagagggcagtgctttgatctgcttagaggacaaacggctccgcctagtggatggggacagccgctgtgccgggagagtagagatctatcacgacggcttctggggcaccatctgtgatgacggctgggacctgagcgatgcccacgtggtgtgtcaaaagctgggctgtggagtggccttcaatgccacggtctctgctcactttggggaggggtcagggcccatctggctggatgacctgaactgcacaggaatggagtcccacttgtggcagtgcccttcccgcggctgggggcagcacgactgcaggcacaaggaggacgcaggggtcatctgctcagaattcacagccttgaggctctacagtgaaactgaaacagagagctgtgctgggagattggaagtcttctataacgggacctggggcagcgtcggcaggaggaacatcaccacagccatagcaggcattgtgtgcaggcagctgggctgtggggagaatggagttgtcagcctcgcccctttatctaagacaggctctggtttcatgtgggtggatgacattcagtgtcctaaaacgcatatctccatatggcagtgcctgtctgccccatgggagcgaagaatctccagcccagcagaagagacctggatcacatgtgaagatagaataagagtgcgtggaggagacaccgagtgctctgggagagtggagatctggcacgcaggctcctggggcacagtgtgtgatgactcctgggacctggccgaggcggaagtggtgtgtcagcagctgggctgtggctctgctctggctgccctgagggacgcttcgtttggccagggaactggaaccatctggttggatgacatgcggtgcaaaggaaatgagtcatttctatgggactgtcacgccaaaccctggggacagagtgactgtggacacaaggaagatgctggcgtgaggtgctctggacagtcgctgaaatcactgaatgcctcctcaggtcatttagcacttattttatccagtatctttgggctccttctcctggttctgtttattctatttctcacgtggtgccgagttcagaaacaaaaacatctgcccctcagagtttcaaccagaaggaggggttctctcgaggagaatttattccatgagatggagacctgcctcaagagagaggacccacatgggacaagaacctcagatgacacccccaaccatggttgtgaagatgctagcgacacatcgctgttgggagttcttcctgcctctgaagccacaaaatgactttagacttccagggctcaccagatcaacctctaaatatctttgaaggagacaacaacttttaaatgaataaagaggaagtcaagttgccctatggaaaacttgtccaaataacatttcttgaacaataggagaacagctaaattgataaagactggtgataataaaaattgaattatgtatatcactgttaaa

SEQ ID NO: 413 - DNA, 1684 bp, Homo sapiens
  source 1..1684: mol_type = genomic DNA
aaagtgccacggtggcggtggtggcggccgcgaggccgagtgtctccggccctgccagcctcgcaaccgtaacctgtaatcccgacccgagggacgcccgccggggaggcgccagcccgcctctccctgcggccgctggtcggctccgacctcgaatcacccggctcacccgcgggtcgcagcacctgccggatgtggggaggaagaaggaggccagatgagggaaggcggatgtaggcgcccagtctgtccgcgccttggtggggcagctgggtgggcaagcctgcggtcgctcccgggaaccagccctgggctgcggggagacgaaggtggttggtcctgccctccaggagcgccccgacatcgacgtaaaatgacttggcaccagagctcctgccgcctcccccttatgcagctgccctcgccgacgccagggactgtaaaatcagatgggacagggcctagccgttcagccaacactttgagcttcccagccaaactcctacccccactccccgcctccggtcctcacccccttcctctctcccagcctcggtgtctggttacggctcctctgctcgcattgtgactttgggccaggctgggggaaatgacccgggagggtcccatgcggctacataaaattggcagccttagaactagtgggaaggcgggtgcgcgaagtcgaggggcggagagagggggccggaggagctgctttctgaatccaagttcgtgggctctctcagaagtcctcaggacggagcagaggtggccggcgggcccggctgactgcgcctctgctttctttccataaccttttctttcggactcgaatcacggctgctgcgaagggtctagttccggacactagggtgcccgaacgcgctgatgccccgagtgctcgcagggcttcccgctaaccatgctgccgccgccgcggcccgcagctgccttggcgctgcctgtgctcctgctactgctggtggtgctgacgccgcccccgaccggcgcaaggccatccccaggcccagattacctgcggcgcggctggatgcggctgctagcggagggcgagggctgcgctccctgccggccagaagagtgcgccgcgccgcggggctgcctggcgggcagggtgcgcgacgcgtgcggctgctgctgggaatgcgccaacctcgagggccagctctgcgacctggaccccagtgctcacttctacgggcactgcggcgagcagcttgagtgccggctggacacaggcggcgacctgagccgcggagaggtgccggaacctctgtgtgcctgtcgttcgcagagtccgctctgcgggtccgacggtcacacctactcccagatctgccgcctgcaggaggcggcccgcgctcggcccgatgccaacctcactgtggcacacccggggccctgcgaatcggggccccagatcgtgtcacatccatatgacacttggagagggccaagactgcagaccttggggaccgaggacaccctcaccacgctggtgggggctggggggatggcgcgggcggtggcgtgcggggaagcgcctggggaacacctggctctgcaagttttgtgccttagcggaaagaggcgacatctctggcaagttgggagtacaggaagtagcgaaggagtgccatctggtggatccttctggtag

SEQ ID NO: 414 - DNA, 3007 bp, Homo sapiens
  source 1..3007: mol_type = genomic DNA
gaatttgaaaaggcggccccggagaggcgtgggcgccccccacacatttccagctcgcacccgggctccgaccgctcgccccgctcctctcgctgtgctcccggccggtgccgcgggttcggtccgggcgccggtgcgctcctgccggtcctcgtgcccgggactccgggtccccgcgggctgctgcgcacgatgaagctggccctgctcctgccctgggcgtgttgctgcctctgcgggtcggcgctggccaccggcttcctctatcccttctcggccgcagctctgcagcagcacggctaccccgagcccggcgccggctcccctggcagcggctacgcgagccgccggcactggtgccatcacacagtgacacggacggtgtcctgccaggtgcagaatggctcggagacggtggtccagcgcgtgtaccagagctgccggtggccggggccctgcgccaacctcgtaagttacaggactctgatcagacccacctacagagtgtcctaccgcacggtgacggtgctggagtggagatgctgccctggcttcaccgggagcaactgtgatgaggaatgcatgaactgcacccggctcagtgacatgagtgagcgactgaccacactggaggccaaggtcctcctgctagaagcagcagaacggccctccagcccggacaacgacctgccagcccccgagagcactccgccgacctggaatgaggacttcctccccgacgccatccctcttgctcaccctgtgccacgacagagaaggcccacgggcccagccgggcccccggggcagacaggaccaccagggcctgcaggcccccccgggtctaaaggtgaccgaggccagacaggagagaagggtccagcggggccgcctgggctcctggggcctccagggccccgtgggcttcctggagagatggggcgccccggccccccaggaccacccggcccagcaggcaacccaggcccctcaccaaacagcccccagggcgccctctactccctgcagccgcctacagacaaagacaatggagactcaaggctggcctctgccatcgtggacacagtgctggcaggtgtcccaggaccccggggtccccctggtccaccaggtccccctgggcctcgaggtcccccaggacccccaggaacacctggatcccagggcctggctggagagcgaggcacagtggggccgtccggtgaacctggcgtgaagggggaagaaggagagaaagccgccactgcagagggcgagggggtgcagcagctgagagaggccctgaagatcctggcagagcgagtcctcatcctggagcacatgattgggatccacgatcccctggcctccccagagggttctggccaggatgctgccctgagagccaacctcaagatgaagaggggtggcgcccaacccgatggggtccttgctgccctgcttgggcccgaccctggacagaagagcgtggaccaggccagcagcaggaagtgagagcccactgctccaggacaccctatcctggctagagacccagccccagaggcctgagccgccgctgtttcctaaagatgcccccaggggaactgggctccaggcatggatgattgtgaggacatggggggctttggggacagataatgtctccaggggcagggtctggaggggccaacaccctcatcagagccctcctctggcctgtcccctcccctacccccactcccggctggagacggggtctgggtgggctgggtgctgggaatgagaataatcctaatacccatcatttattgagtccctgctgtaactggccctgtccagggaactttcgttacgttgtctcattatttaacccttaggaggtaagcttattatccccacttcacaaggggaccgaggctcagacggtagaaataaccctctcttggccaccagatcacgggtggcaggggcaggatttgaacccaggaccctcagttcctgaagccatgttctctcgaccctgccagcttcccctcttcgagagaaaactcagacagggagggcgcagggccagaacggctccttaaggcaggcagggctgcggggaggctgggccagccagcctgagggggtaggcagggtcctgcagggcctggggcttcccttcctcatcccccttccccactggctgggggagcagcctggactgcagctctcagaggccagggagaccctgaataaatcactgccagccatacggacttgaggaccttgagagagaagcattgggggtgcaagtgtccaccaaaccagataggcatccctggccactgcctcccagtcttgctgagcccacccgctctctctgggtccatcccatccctgagccaggggaggcagcatttcatgggcatgtctatcagaggtgggacttgcagcctctgccccacgagtttgtctctcagtggactctataggtttgctacttttgcatgacacagcaagcccagtgtcccctttgcaagctgcagagagggaaacagagtcccaggcctgctgggaagagatgctcctgcctcccaccttccagagttgggggcctggcaggctccatggcaggcaccaggtccctagcagcccagaacagctctgactggagccctcaaggcctctggggccagggtctccgtgatcagctcagccctggtgttcctctcttgctgggctgggacctgggacacagccacggcagcaaactcagagaattgaaggtgctggcgccaccctggggcactctgtcttcacagcaggagtgactgtctccagtgctcttggtactcctgtttggctgtggcctggtccctctgggccctgggatcttcttctggcccttgaggcaggtctggagaggcagtctctgtcttcatggaggggtggtcagaggcgggcgggaccaccagcctgtagcgttattattatatgtgacaataaaggtgctctcccc

SEQ ID NO: 415 - DNA, 1968 bp, Homo sapiens
  source 1..1968: mol_type = genomic DNA
tctgcctgctgtcgggggcgggctggccaggccgaggccggagcaggcaggcatcccccggagttgtctcttttcatgccagcgccaacaggaggctgtctggacacactgattactcactcaccagcctccctcttttgtccaccagcccagcctgactcctggagattgtgaatagctccatccagcctgagaaacaagccgggtggctgagccaggctgtgcacggagtgcctgacgggcccaacagacccatgctgcatccagagacctcccctggccgggggcatctcctggctgtgctcctggccctccttggcaccgcctgggcagaggtgtggccaccccagctgcaggagcaggctccgatggccggagccctgaacaggaaggagagtttcttgctcctctccctgcacaaccgcctgcgcagctgggtccagccccctgcggctgacatgcggaggctggactggagtgacagcctggcccaactggctcaagccagggcagccctctgtggaatcccaaccccgagcctggcgtccggcctgtggcgcaccctgcaagtgggctggaacatgcagctgctgcccgcgggcttggcgtcctttgttgaagtggtcagcctatggtttgcagaggggcagcggtacagccacgcggcaggagagtgtgctcgcaacgccacctgcacccactacacgcagctcgtgtgggccacctcaagccagctgggctgtgggcggcacctgtgctctgcaggccaggcagcgatagaagcctttgtctgtgcctactcccccagaggcaactgggaggtcaacgggaagacaatcgtcccctataagaagggtgcctggtgttcgctctgcacagccagtgtctcaggctgcttcaaagcctgggaccatgcaggggggctctgtgaggtccccaggaatccttgtcgcatgagctgccagaaccatggacgtctcaacatcagcacctgccactgccactgtccccctggctacacgggcagatactgccaagtgaggtgcagcctgcagtgtgtgcacggccggttccgggaggaggagtgctcgtgcgtctgtgacatcggctacgggggagcccagtgtgccaccaaggtgcattttcccttccacacctgtgacctgaggatcgacggagactgcttcatggtgtcttcagaggcagacacctattacagagccaggatgaaatgtcagaggaaaggcggggtgctggcccagatcaagagccagaaagtgcaggacatcctcgccttctatctgggccgcctggagaccaccaacgaggtgattgacagtgacttcgagaccaggaacttctggatcgggctcacctacaagaccgccaaggactccttccgctgggccacaggggagcaccaggccttcaccagttttgcctttgggcagcctgacaaccacgggtttggcaactgcgtggagctgcaggcttcagctgccttcaactggaacaaccagcgctgcaaaacccgaaaccgttacatctgccagtttgcccaggagcacatctcccggtggggcccagggtcctgaggcctgaccacatggctccctcgcctgccctgggagcaccggctctgcttacctgtccgcccacctgtctggaacaagggccaggttaagaccacatgcctcatgtccaaagaggtctcagaccttgcacaatgccagaagttgggcagagagaggcagggaggccagtgagggccagggagtgagtgttagaagaagctggggcccttcgcctgcttttgattgggaagatgggcttcaattagatggcaaaggagaggacaccgccagtggtccaaaaaggctgctctcttccacctggcccagaccctgtggggcagcggagcttccctgtggcatgaaccccacagggtattaaattatgaatcagctg

SEQ ID NO: 416 - DNA, 281 bp, Homo sapiens
  source 1..281: mol_type = genomic DNA
gcagccccagcattatgcagagacttgtgctgctattagccatttctcttctactctatcaagatcttccagtgagaagcgaatttgaattggacagaatatgtggttatgggactgcccgttgccggaagaaatgtcgcagccaagaatacagaattggaagatgtcccaacacctatgcatgctgtttgagaaaatgggatgagagcttactgaatcgtacaaaaccctgaaacgcagtagtgctggtccctagagtcgctggaagtaggacctcagta

SEQ ID NO: 417 - DNA, 2345 bp, Homo sapiens
  source 1..2345: mol_type = genomic DNA
ctctggctgctgctgtgggcagccgcgtggcgcctgggtgcctcggcgtgccccgccctctgcacctgcaccggaaccacggtggactgccacggcacggggctgcaggccattcccaagaatatacctcggaacaccgagcgcctggaactcaatggcaacaacatcactcggatccataagaatgactttgcggggctcaagcagctgcgggtgctgcagctgatggagaaccagattggagcagtggaacgtggtgcttttgatgacatgaaggagctggagcggctgcgactgaaccgaaaccagctgcacatgttaccggaactgctgttccagaacaaccaggctttgtcaagactggacttgagtgagaacgccatccaggccatccccaggaaagcttttcggggagctacggaccttaaaaatttacagctggacaagaaccagatcagctgcattgaggaaggggccttccgtgctctgcgggggctggaggtgctgaccctgaacaacaacaatatcaccaccatccccgtgtccagcttcaaccatatgcccaagctacggaccttccgcctgcactccaaccacctgttttgcgactgccacctggcctggctctcgcagtggctgaggcagcggccaaccatcgggctcttcacccagtgctcgggcccagccagcctgcgtggcctcaatgtggcagaggtccagaagagtgagttcagctgctcaggccagggagaagcggggcgcgtgcccacctgcaccctgtcctccggctcctgcccggccatgtgcacctgcagcaatggcatcgtggactgtcgtggaaaaggcctcactgccatcccggccaacctgcccgagaccatgacggagatacgcctggagctgaacggcatcaagtccatccctcctggagccttctcaccctacagaaagctacggaggatatgccccctctccttctgctcaccttgcagagacctgagcaacaatcagatcgctgagattgcacccgacgccttccagggcctccgctccctgaactcgctggtcctctatggaaacaagatcacagacctcccccgtggtgtgtttggaggcctatacaccctacagctcctgctcctgaatgccaacaagatcaactgcatccggcccgatgccttccaggacctgcagaacctctcactgctctccctgtatgacaacaagatccagagcctcgccaagggcactttcacctccctgcgggccatccagactctgcacctggcgcagaaccctttcatttgcgactgtaacctcaagtggctggcagacttcctgcgcaccaatcccatcgagacgagtggtgcccgctgtgccagtccccggcgcctcgccaacaagcgcatcgggcagatcaagagcaagaagttccggtgctcagccaaagagcagtacttcattccaggcacggaggattaccagctgaacagcgagtgcaacagcgacgtggtctgtccccacaagtgccgctgtgaggccaacgtggtggagtgctccagcctgaagctcaccaagatccctgagcgcatcccccagtccacggcagaactgcgattgaataacaatgagatttccatcctggaggccactgggatgtttaaaaaacttacacatctgaagaaaatcaatctgagcaacaacaaggtgtcagaaattgaagatggggccttcgagggcgcagcctctgtgagcgagctgcacctaactgccaaccagctggagtccatccggagcggcatgttccggggtctggatggcttgaggaccctaatgctgcggaacaaccgcatcagctgcatccacaacgacagcttcacgggcctgcgcaacgtccggctcctctcgctctacgacaaccagatcaccaccgtatccccaggagccttcgacaccctccagtccctctccacactgaatctcctggccaaccctttcaactgcaactgccagctggcctggctaggaggctggctacggaagcgcaagatcgtgacggggaacccgcgatgccagaaccctgactttttgcggcagattcccctgcaggacgtggccttccctgacttcaggtgtgaggaaggccaggaggaggggggctgcctgccccgcccacagtgcccacaggagtgcgcctgcctggacaccgtggtccgatgcagcaacaagcacctgcgggccctgcccaagggcattcccaagaatgtcacagaactctatttggacgggaaccagttcacgctggttccgggacagctgtctaccttcaagtacctgcagctcgt

SEQ ID NO: 418 - DNA, 494 bp, Homo sapiens
  source 1..494: mol_type = genomic DNA
acggctgcccaacccggtcccagccatgtccaacgtcccccacaagtcctcactgcccgagggcatccgccctggcacggtgctgagaattcgcggcttggttcctcccaatgccagcaggttccatgtaaacctgctgtgcggggaggagcagggctccgatgccgccctgcatttcaacccccggctggacacgtcggaggtggtcttcaacagcaaggagcaaggctcctggggccgcgaggagcgcgggccgggcgttcctttccagcgcgggcagcccttcgaggtgctcatcatcgcgtcagacgacggcttcaaggccgtggttggggacgcccagtaccaccacttccgccaccgcctgccgctggcgcgcgtgcgcctggtggaggtgggcggggacgtgcagctggactccgtgaggatcttctgagcagaagcccaggcgggcccggggccttggctggcaaataaagcgttagcccgcagcg

SEQ ID NO: 419 - DNA, 2136 bp, Homo sapiens
  source 1..2136: mol_type = genomic DNA
agcgagcgcagagccccggccccgcgcggcccgagtgccacatcactgcgctggccgtccaaggtccgccgccccaccatgccgcccccgctgccgctgctgctccttacagtcctggtcgtcgccgctgcccggccggggtgcgagtttgagcggaaccccgccgccacctgcgtggacctgcagctcaggacctgcagtgatgccgcctacaaccacaccaccttccccaacctgcttcagcaccggtcatgggaggtggtggaggccagctccgagtacatcctgctgagcgttctacaccagctcctggaaggccagtgcaacccggacctgcggctgctgggctgtgctgtgctggccccccggtgtgagggcggctgggtgcgcagaccctgccggcacatctgcgagggcctgcgggaggtctgccagcccgccttcgacgccattgacatggcctggccctacttccttgactgccaccgctacttcacgagagaggacgagggctgctatgacccgctggagaagcttcggggaggcctggaggctgacgaggcactgccctcagggctgccgcccaccttcatccgcttcagccaccactcctacgcccagatggtgcgtgtgctgaggcggacggcctcccgctgcgcccacgtggccaggacctacagcatcgggcgcagcttcgacggcagggagctgctggtcatcgagttctccagccgccccggccagcacgagctgatggagcccgaggtgaagctcatcggcaacattcatggcaacgaggtggcgggccgggagatgctcatctacctagcccagtacctgtgctctgagtacctgcttggtaacccccgcatccagcgcctgctcaacaccacccgcatccacctgctgccctccatgaaccctgacggctatgaggtggcagctgccgagggtgccggctacaacgggtggacgagcgggaggcagaacgcgcagaacctggatctgaaccgaaatttcccggacctgacgtccgagtactaccggctggcggagacccgcggcgcacgcagcgaccacatccccatcccccagcactactggtggggtaaggtggccccggagacaaaggcaatcatgaagtggatgcagaccataccctttgtgctctcagccagccttcatgggggcgacctggtggtgtcctaccccttcgacttctccaagcacccccaggaggagaagatgttttctcccacgcccgacgagaagatgttcaagctgctgtccagagcctacgctgacgtccaccccatgatgatggacaggtcggagaataggtgtggaggcaatttcctgaagagggggagcatcatcaacggggcggactggtacagcttcacgggaggcatgtccgatttcaactacctgcacaccaactgctttgagatcacggtagagctgggctgtgtgaagttcccccccgaggaggccctgtacatactctggcagcacaacaaggagtcactcctgaatttcgtggagacggtgcaccggggcatcaaaggtgtggtgacagataaattcggcaagccagtcaaaaacgcccggatctcagtcaaaggcattcgccacgacatcaccacagccccagatggtgactactggagactgctgcccccaggtatccacattgtcattgcccaagcccctggctacgccaaagtcatcaagaaagtcatcatccccgcccggatgaagagggctggccgtgtggacttcattctgcaacctctggggatgggacccaagaactttattcatgggctgcggaggactgggccccacgacccactgggaggtgccagctctttgggggaggccacggagcccgacccgctccgggcgcgcaggcagccctcggccgacgggagtaagccctggtggtggtcctacttcacatcgctgagcacccacaggccacgctggctgctcaagtactagccccggccccagcacccgccaggatgtggagaccgaggcccatctccgcatcccgggctcctggctcttgattttgtctgccacagacatcccacaaagccgctgccattttattaaagtgttttgatccac

SEQ ID NO: 420 - DNA, 1967 bp, Homo sapiens
  source 1..1967: mol_type = genomic DNA
ccgtcatccccctgcagccacccttcccagagtcctttgcccaggccaccccaggcttcttggcagccctgccgggccacttgtcttcatgtctgccagggggaggtgggaaggaggtgggaggagggcgtgcagaggcagtctgggcttggccagagctcagggtgctgagcgtgtgaccagcagtgagcagaggccggccatggccagcctggggctgctgctcctgctcttactgacagcactgccaccgctgtggtcctcctcactgcctgggctggacactgctgaaagtaaagccaccattgcagacctgatcctgtctgcgctggagagagccaccgtcttcctagaacagaggctgcctgaaatcaacctggatggcatggtgggggtccgagtgctggaagagcagctaaaaagtgtccgggagaagtgggcccaggagcccctgctgcagccgctgagcctgcgcgtggggatgctgggggagaagctggaggctgccatccagagatccctccactacctcaagctgagtgatcccaagtacctaagagagttccagctgaccctccagcccgggttttggaagctcccacatgcctggatccacactgatgcctccttggtgtaccccacgttcgggccccaggactcattctcagaggagagaagtgacgtgtgcctggtgcagctgctgggaaccgggacggacagcagcgagccctgcggcctctcagacctctgcaggagcctcatgaccaagcccggctgctcaggctactgcctgtcccaccaactgctcttcttcctctgggccagaatgagggggtgcacacagggaccactccaacagagccaggactatatcaacctcttctgcgccaacatgatggacttgaaccgcagagctgaggccatcggatacgcctaccctacccgggacatcttcatggaaaacaatgtaactgggcatcctgtattttacctgccactgtgtgacagtttcctgcccccaaaggctgccccagtgacggagctctacacagatggaccagtcatgttctgtggaatgggcggcttctccgacttctacaagctccggtggctggaggccattctcagctggcagaaacagcaggaaggatgcttcggggagcctgatgctgaagatgaagaattatctaaagctattcaatatcagcagcatttttcgaggagagtgaagaggcgagaaaaacaatttccagattctcgctctgttgctcaggctggagtacagtggcgcaatctcggctcactgcaacctttgcctcctgggttcaagcaattctcttgcctcatcctcccgagtagctgggactacaggagcgtgccaccatacctggctaatttttatatttttttagtagagacagggtttcatcatgttgctcatgctggtctcgaactcctgatctcaagagatccgcccacctcaggctcccaaagtgtgggattataggtgtgagccaccgcgtctggctgaaaagcactttcaatgagactgtgttgaataaagggccaaggttcttgccacccagcactcatgggggctctctcccctagatggctgctcctcccacaacacagccacagcagtggcagccctgggtggcttcctatacatcctggcagaataccccccagcaaacagagagccacacccatccacaccgccaccaccaagcagccgctgagacggacggttccatgccagctgcctggaggaggaacagacccctttagtcctcatcccttagatcctggagggcacggatcacatcctgggaagaaggcatctggaggataagcaaagccaccccgacacccaatcttggaagccctgagtaggcaaggccagggtaggtgggggccgggagggacccaggtgtgaacggatgaataaagttcaactgcaactg

SEQ ID NO: 421 - DNA, 762 bp, Homo sapiens
  source 1..762: mol_type = genomic DNA
caggggctggagggcaggggaggggatgatgtcattcctgctcggcgcaatcctgaccctgctctgggcgcccacggctcaggctgaggttctgctgcagcctgacttcaatgctgaaaagttctcaggcctctggtacgtggtctccatggcatctgactgcagggtcttcctgggcaagaaggaccacctgtccatgtccaccagggccatcaggcccacagaggagggcggcctccacgtccacatggagttcccgggggcggacggctgtaaccaggtggatgccgagtacctgaaggtgggctccgagggacacttcagagtcccggccttgggctacctggacgtgcgcatcgtggacacagactacagctccttcgccgtcctttacatctacaaggagctggagggggccctcagcaccatggtgcagctctacagccggacccaggatgtgagtccccaggctctgaagtccttccaggacttctacccgaccctggggctccccaaggacatgatggtcatgctgccccagtcagatgcatgcaaccctgagagcaaggaggcgccctgacacctccggagccccacccccgcccttcccaggtggagccaaagcagcaggcgcctttgcccctggagtcaagacccacagccctcggggaccacctggagtctctccatcctccaccccccgcctgtgggatgccttgtgggacgtctctttctattcaataaacagatgctgcagcctca

SEQ ID NO: 422 - DNA, 281 bp, Homo sapiens; identical to SEQ ID NO: 416
  source 1..281: mol_type = genomic DNA

SEQ ID NO: 423 - DNA, 2922 bp, Homo sapiens
  source 1..2922: mol_type = genomic DNA
gggcgggggctgcttcttaaaggagccgtcagagggtccccagcggccccagggtgggaaggggccagagtggagagatgctgctgcggaagtcctcggtggagtgtgagaaggcagccagtgttggcctggaagacctctagaacctgagaagaggcagcgatcctggggcagagtccagggcagctcaaggctcctccacacacacacccgctgaaccctgagcaccctgagctgctgagatggggcgggccggggctgccgccgtgatcccgggcctggccctgctctgggcagtggggctggggagtgccgccccccccccacgccttcggctctccttccaagagctccaggcctggcatggtctccagactttcagcctggagcgaacctgctgctaccaggccttgctggtggatgaggagcgtggacgcctgtttgtgggtgccgagaaccatgtggcctccctcaacctggacaacatcagcaagcgggccaagaagctggcctggccggcccctgtggaatggcgagaggagtgcaactgggcagggaaggacattggtactgagtgcatgaacttcgtgaagttgctgcatgcctacaaccgcacccatttgctggcctgtggcacgggagccttccacccaacctgtgcctttgtggaagtgggccaccgggcagaggagcccgtcctccggctggacccaggaaggatagaggatggcaaggggaagagtccttatgaccccaggcatcgggctgcctccgtgctggtgggggaggagctatactcaggggtggcagcagacctcatgggacgagactttaccatctttcgcagcctagggcaacgtccaagtctccgaacagagccacacgactcccgctggctcaatgagcccaagtttgtcaaggtattttggatcccggagagcgagaacccagacgacgacaaaatctacttcttctttcgtgagacggcggtagaggcggcgccggcactgggacgcctgtccgtgtcccgcgttggccagatctgccggaacgacgtgggcggccagcgcagcctggtcaacaagtggacgacgttcctgaaggcgcggctggtgtgctcggtgcccggcgtcgagggcgacacccacttcgatcagctccaggatgtgtttctgttgtcctcgcgggaccaccggaccccgctgctctatgccgtcttctccacgtccagcagcatcttccagggctctgcggtgtgcgtgtacagcatgaacgacgtgcgccgggccttcttgggaccctttgcacacaaggaggggcccatgcaccagtgggtgtcataccagggtcgcgtcccctacccgcggccaggcatgtgccccagcaagacctttggcaccttcagttccaccaaggacttcccagacgatgtcatccagtttgcgcggaaccaccccctcatgtacaactctgtcctgcccactggggggcgccctcttttcctacaagttggagccaattacaccttcactcaaattgccgcggaccgggttgcagccgctgacggacactatgacgtcctcttcattggcacagacgttggcacggtgctgaaggtgatctcggtccccaagggcagtaggcccagcgcagaggggctgctcctggaggagctgcacgtgtttgaggactcggccgctgtcaccagcatgcaaatttcttccaagaggcaccagctgtacgtagcctcgcggagcgcggtggcccagatcgcgttgcaccgctgcgctgcccacggccgcgtctgcaccgaatgctgtctggcgcgtgacccctactgcgcctgggacggggtcgcgtgcacgcgcttccagcccagtgccaagaggcggttccggcggcaagacgtaaggaatggcgaccccagcacgttgtgctccggagactcgtctcgtcccgcgctgctggaacacaaggtgttcggcgtggagggcagcagcgcctttctggagtgtgagccccgctcgctgcaggcgcgcgtggagtggactttccagcgcgcaggggtgacagcccacacccaggtgctggcagaggagcgcaccgagcgcaccgcccggggactactgctgcgcaggctgcggcgccgggactcgggcgtgtacttgtgcgccgccgtcgagcagggctttacgcaaccgctgcgtcgcctgtcgctgcacgtgttgagtgctacgcaggccgaacgactggcgcgggccgaggaggctgcgcccgccgcgccgccgggccccaaactctggtaccgggactttctgcagctggtggagccgggcggaggtggcagcgcgaactccctgcgcatgtgccgcccgcagcctgcgctgcagtcactgcccctggagtcgcggagaaagggccgtaaccggaggacccacgcccctgagcctcgcgctgagcgggggccgcgcagcgcaacgcactggtgaccagactgtccccacgccgggaaccaagcaggagacgacaggcgagagaggagccagacagaccctgaaaagaaggacgggttggggccgggcacattgggggtcaccggccgatggagacaccaaccgacaggccctggctgagggcagctgcgcgggcttatttattaacaggataacccttgaatgtagcagccccgggagggcggcacaggtcgggcgcaggattcagccggagggaagggacggggaagccgagctccagagcaacgaccagggccgaggaggtgcctggagtgcccaccctgggagacagaccccacctccttgggtagtgagcagtgagcagaaagctgtgaacaggctgggctgctggaggtggggcgaggcaggccgactgtactaaagtaacgcaataaacgcattatcagcc

SEQ ID NO: 424 - DNA, 3547 bp, Homo sapiens
  source 1..3547: mol_type = genomic DNA
acttgtccttgtgagtttctgacatggtcctcctctgtctcttcctcgccagcttggctgccacccctcgggctggggtcactggggcatggcccaccagcggcctctccattctggcccagctccagccgtcctgtgagctcaggtggactcagctttccaggtcatcttggagggatctggtcatgaccacatcactctggagtctggcttatttccagcatttttcccaggagactacaactcaggagcagctggatgagatggaagagatccccagagagagccagtgtgggaggcaggacttccatgccctctcctgtcccaccgcctccccaagagacagagtcttgctctgttgtccaggctggagagcaatggtgccatcatagctcactgcagccttgaccgcctgggctcaagcgatcctcccacctcagcctcctgagtagctgggactacaggtgtgcacaaccacactcggccaattatttatttattgtccgtctctccagtgaaatggtcctgaaaattaggtatcatgttttgtttaactctttatccttatccttaatgttagacactgttttatttgactcaataaagacttcttgaatgactgaataaaccagtgagggaaaagggggtgtcaggatggggagatcctgacattgagctttagcctgaaccttgaaggtgtttgttcagattggtgcctgggaatagaagtgatgcccaactttctgccagatgtagatcttagactcccacagaggggactgtctgtatcaaggtctccaggtggtccagaggatagcattgcgtataaaaaagcccaatgacaacaactctgtgagcctctgggctttcctgttgggatcaacagaggggaaattgtgacctttttttgttttgacatgttattaggtcatagtatgatgctgtgaaaagagatgagtttaggctcaagcaacaaataaacctcctttgaattctgactcaacaagctaatagcttgtaaaatcaggtgaattatttaacctctctgagcctattttatagggctgttgtgaggattaaatgaataatccatgttaaatgctctgctcagtgtttggtacctagaaagaactgcctaattgttgctgttgttgttgctgttaatattattagttgtcccagctctctaataacaaatgatttgagtaggctgcttcctttagctgtaagattatcatctttttgggacaagatgacctctgcagtctctccagctctaggattcaatgatcaggggactttgagatcacccccatgctggaactctttgaagcatttccatgggaaaggaaagaatcacttctctttgcagccatgctcaaacggattgtcctggaagataagcaaagatgacacatgtaggagaggaaagtccagttcagtctggctcagaccctcctggaatctggtacttttgggtgggacaggagacagatgttccatgacagccaacatcgtgtacttcagactttctgggaatgatggcaggagaggaaccagaagagcaggatgacttgaatttattttcttggaaagactattttgttggcaagacttatccctggcctcataaatggaccagaggctaatggactaggaagaactgctcttgagccgctccctccctgctggtcaggtccaagaacattgcctccaagagcatggaccctcaccccaacccacacttgccttcccctgaggtcgcaggctgcctttctgcccctttggtgatctgccattaatctgatacatgtgtaatttgaatccatttggatgaaattgtagaggaggaaaagaagagaatgcagaaaggaacaatgatgctaagtagcatggacaaagaacagaggcatcttgtgcaatagataggcctctatccaactgaatgacagaaaccctaaattacagtagtttaatcaaagttaagatttattggtatctcacattaaattgtagggaggcagatgagagttgcaattgtgactctgcaatcatttgtgactgcccttgttctataccactcctctgccctcttcaatatttctattttgtggcccaagacagtggctccaatttttgtcattacatctgcattctagccagctagaaaaagaaagaaaggggaggggaagtgcatgtgccttctctttaaggacacttcccagaaattgaacacattgcttcaacttatatcccactggccagtacttagtcacgtggctacatctagctgtagagacactggaaaatatgtctttattccaagtggctgtgtggtcagctaatttttatatagttctattattttttaaaaaggcaagaacaggtatcagaagacaattagcagtctctgcctcccttggaaacaagagtggatattacagattgatgtcataaaaattgccacagtcagccttgggtgtaatctctagatccaggcagcaagggccgattggaattttattccgaccagatgctagctgggcaatgctgggcacattgtttaatctccctgaacttcagctttctcttctgtaaataatagtaataacaaagacttccaagaattgtaaacagaacaaaatgagtgatgtgtgtagagtgcttcgtgccctttttgtatgtagtcatgggccgcagtagatattgaggatcactctatttgttctggatgcacagcctccctgaggatgctcttttcctcgggatgctcttttcctcgggatttctagtatcatcattcttgtgactactatccacacccttcagaaaagccatcattttctcctggattaatctctttcttgaattttgaattcccctaaaagccaaaacctccattctgtcagggcagaacagagccccaatgtttctaaagaaataacttacaaccagaaagtatcagtaaattcccttttccatgttgcttcattctctcaagcatgcatgaaatttagccttaataagtggttattgtccacttactaataactgcttatgaaaaccatgcctggggtctgcggtacaggcatacagccccaagaacagctccaacctccccttcaccttctcctccacctgctacctaacagccaaagtctgtgcttctccaagaggactgtaggaaccgttatcattgcaggaaaggagcctgtctaggctgcttcttccaactccatcccagtaatgaacttgaccctaagatgcaaggcgtctaatcccttgaacccgcttgaacccgcttgaacatatctgctggactgatgtcttctgcaggttgcagatcctgaccatgggctgcatgtgctgccggatggaggcagggccatgccctgagtgttttcttcacatggcaccagtagcgttgtgtgtgatttctgataaaattgtagaatagctaatgacatttgacatttgttcagagttttgcagttcacaaaacattttcatatgtcagtaaaaatagcgaggataatactaaccatgt

SEQ ID NO: 425 - DNA, 1732 bp, Homo sapiens
  source 1..1732: mol_type = genomic DNA
agtccggacagacagacaggcagacagacgcacggacaagcagatgctccttggccagctatccactcttctgtgcctgcttagcggggccctgcctacaggctcagggaggcctgaaccccagtctcctcgacctcagtcctgggctgcagccaatcagacctgggctctgggcccaggggccctgcccccactggtgccagcttctgcccttgggagctggaaggccttcttgggcctgcagaaagccaggcagctggggatgggcaggctgcagcgtgggcaagacgaggtggctgctgtgactctgccgctgaaccctcaggaagtgatccaggggatgtgtaaggctgtgcccttcgttcaggtgttctcccggcccggctgctcagccatacgcctccgaaatcatctgtgctttggtcattgctcctctctctacatccctggctcggaccccaccccactagtcctgtgcaacagctgtatgcctgctcgcaagcgttgggcacccgtggtcctgtggtgtctcactggcagctcagcctcccgtcgacgggtgaagatatccaccatgctgatcgaggggtgtcactgcagcccaaaagcatgaactgagcatcgtggatgggtgcacggagacacgcaccttggagaaatgaggggagatggaccaagaaagacgtggacctggatgatgtactctgggtcaagagaccagggatgcagggttaggcagacaggtccccagagtcctcaccctgctccccagacagtagacacagtgcccgtcctggagttgcaccactgatagtcacagcacacaatgattgacaactcactttttttttttttttttgagatggagtctcgctctgtcgcccaggctggagtgcagtggcgcaatctcagctcactgcaagctccacctcccgggtttatgccattctcctgtctcagcctcccgagtagctgggactacaggcacccgccaacacgcccggctaattttttgtatttttagtaaagacagggtttcaccgtgttagccaggatggtctctatctcctgacctcgtgatctgcctgccttggccttattattttttttttttaaggacagagtctctctctgtcacccaggctggagtgcaatggcgcgatcttggctcactgtaacttccacttgccaggctcaagcagttctcctgcctcagcctcctgagtagctgggactacaggcacccgccaccatgcccagctaatttttgtatttttagtagagacagagtttcaccatattagcctggctggtctcaaactcctggcctcaggtgatctgcccacctcggcctcccaaagtgctgggatcaaatccactgttaatcattaggctgaactgtctcttatagaatgaggtcaaagacactcccagttgcagggagggtagatggccccacccagaccgagagacacagtgatgacctcagcctagggacaccaaaaaagaaaaaaaaaaaaacccaaaccaaaaacgcaaaccaaagcaggcaggcagacagctgctgggggaaatcctggggtccttgagacagaggcaggaccctcgtgttcccagctgcctcttgccttgatagtggtgctgtgtccctctcagaccccccacctgagtctccacagagccccacgcctggcatggcattccacagaaaccataaaggttggctgagtcc

SEQ ID NO: 426 - DNA, 4728 bp, Homo sapiens
  source 1..4728: mol_type = genomic DNA
gctcaggaacccaaacctgtcgggcaggttttgagagctgtggagagagggacagaggctggagaaggatgtatggcctgccctgggcttgtctgttccctcctgagcctgagccccttaccttcctgaccccatgaagcacacactggctctgctggctcccctgctgggcctgggcctggggctggccctgagtcagctggctgcaggggccacagactgcaagttccttggcccggcagagcacctgacattcaccccagcagccagggcccggtggctggcccctcgagttcgtgcgccaggactcctggactccctctatggcaccgtgcgccgcttcctctcggtggtgcagctcaatcctttcccttcagagttggtaaaggccctactgaatgagctggcctccgtgaaggtgaatgaggtggtgcggtacgaggcgggctacgtggtatgcgctgtgatcgcgggcctctacctgctgctggtgcccactgccgggctttgcttctgctgctgccgctgccaccggcgctgcgggggacgagtgaagacagagcacaaggcgctggcctgtgagcgcgcggccctcatggtcttcctgctgctgaccaccctcttgctgctgattggtgtggtctgtgcctttgtcaccaaccagcgcacgcatgaacagatgggccccagcatcgaggccatgcctgagaccctgctcagcctctggggcctggtctctgatgtcccccaagagctgcaggccgtggcacagcaattctccctgccccaggagcaagtctcagaggagctggatggtgttggtgtgagcattgggagcgcgatccacactcagctcaggagctccgtgtaccccttgctggcggccgtgggcagtttgggccaggtcctgcaggtctccgtgcaccacctgcaaaccttgaatgctacagtggtagagctgcaggccgggcagcaggacctggagccagccatccgggaacaccgggaccgcctccttgagctgctgcaggaggccaggtgccagggagattgtgcaggggccctgagctgggcccgcaccctggagctgggtgctgacttcagccaggtgccctctgtggaccatgtcctgcaccagctaaaaggtgtccccgaggccaacttctccagcatggtccaggaggagaacagcaccttcaacgcccttccagccctggctgccatgcagacatccagcgtggtgcaagagctgaagaaggcagtggcccagcagccggaaggggtgaggacactggctgaagggttcccgggcttggaggcagcttcccgctgggcccaggcactgcaggaggtggaggagagcagccgcccctacctgcaggaggtgcagagatacgagacctacaggtggatcgtgggctgcgtgctgtgctccgtggtcctattcgtggtgctctgcaacctgctgggcctcaatctgggcatctggggcctgtctgccagggacgaccccagccacccagaagccaagggcgaggctggagcccgcttcctcatggcaggtgtgggcctcagcttcctctttgctgcacccctcatcctcctggtgttcgccaccttcctggtgggtggcaacgtgcagacgctggtgtgccagagctgggagaacggcgagctctttgagtttgcagacaccccagggaacctgcccccgtccatgaacctgtcgcaacttcttggcctgaggaagaacatcagcatccaccaagcctatcagcagtgcaaggaaggggcagcgctctggacagtcctgcagctcaacgactcctacgacctggaggagcacctggatatcaaccagtataccaacaagctacggcaggagttgcagagcctgaaagtagacacacagagcctggacctgctgagctcagccgcccgccgggacctggaggccctgcagagcagtgggcttcagcgcatccactaccccgacttcctcgttcagatccagaggcccgtggtgaagaccagcatggagcagctggcccaggagctgcaaggactggcccaggcccaagacaattctgtgctggggcagcggctgcaggaggaggcccaaggactcagaaaccttcaccaggagaaggtcgtcccccagcagagccttgtggcaaagctcaacctcagcgtcagggccctggagtcctctgccccgaatctccagctggagacctcagatgtcctagccaatgtcacctacctgaaaggagagctgcctgcctgggcagccaggatcctgaggaatgtgagtgagtgtttcctggcccgggagatgggctacttctcccagtacgtggcctgggtgagagaggaggtgactcagcgcattgccacctgccagcccctctccggagccctggacaacagccgtgtgatcctgtgtgacatgatggctgacccctggaatgccttctggttctgcctggcatggtgcaccttcttcctgatccccagcatcatctttgccgtcaagacctccaaatacttccgtcctatccggaaacgcctcagctccaccagctctgaggagactcagctcttccacatcccccgggttacctccctgaagctgtagggccttgtggggtgaggtgaccctgaggctgcctgtcctcccctttgatttagcctgggccacaggacttcggtagctcttgccccagagcccaggctggcatccaggcctggactgtccccagttccggcttacctggccccaccttgcctgctcctttccacccctttctgctcacgacccccatcattcacgctcagaatcacatgggacttctgtgcagctgcagagccagcaagtccctccaggtgtcaccccttacccccatgctggtggcatcctcacaggaagagcctgttctccacctgctggagcctggaccctggggtgggacagaggcctcgtccaaccccactccccttcccgtgtgtcttccccctgccaagcctccccctgccaagcctccccctgcccctctctgagcccctcgccccccacaccgtcctcatctggcctcccccctggcccccacttccctcttatgcccttcctggccctttgcttcctcccttagtcccctcttcaccatatctccactgctaccttgctggccccagagaccaccctgcccaaccaaaccactcaggtaacgccactaatcaggcaggggccaccatggcctaggtctgggctggctgcaggccctgcctcatggcctctgagccctccactgccccagggccttgggccctctgcagatctcatccaggatttattggtgtccagtggggtgagggaggcctgtctgaaggccgagcctccctgcctgcacccaagttagaaatgggggtaccagcacttagcttctctctgagtgctggctcccaaggaagggacctgggacctgggccacagtgggggcttgcccttacctcttcagaaggaagcatcttccacagcccccacccaactttcttaggagtgatctggtggccagaacaggattttgcacggccccttttatcctgcgcatgtggcctagggtcatccccagcccatccctgtgtcagccctgagtgctggacactgcgttccagaaatgaggaagaggagagagaagagatggacagacctcagatccattaaagtgttctcacttccctgagacttggttctgggtccttaaaaccaggtttcctaggctgggaccctgtacatagttggtgtttaatgagtgtttatggagaggagagttctaaggtcacctctggctgcaggcatccagggattattccagcaatctgcaggtagggagtgggtcccagcctgggagcctgctgtcaggagcaggcagacctggactcacagcctggctgtgatgcttgttcgctcagcttctccatttatgagatggggagaatagtcacagcctcctcaaagggttgtgaaaatcaaatgtgataatttgtggaaagcccttagcagtggcctggcacaaaacaaatgctcagtggatggaagctgcctattattattgtcgttgttgttgtttgccatgactgctctgggccgggggtagagctagcatccgggcatgtacgagggaagagggaggcaggcctctattcaaaggcagaaattcctttaagattgtggtctgctgggtttcagggagtgtctgtgttgtttgtttttgtttgtttgtttgttttgagacagggtctcgctctgtcacccaggctggagtgtagtggtgcagtcttggctcactgcaacctccacctcctgggctcaagcgattctcatgcctcagcctcccgagtagctgggactacaggtgtgtgccactatgcctggctaatttttgtattttttgtagagacggggttttgccatgttgcccaggctggaagtgtctatgtttaactgcatcttataaaccagcaacaagttttctactgggaattagaatggtgcatacacaatgtattattatcactgtcagatgagcatgcttgaatgtagcatgactgcctctttttgcttttcctagaggttttttttttgcttgttactcatctgttgacctacctgggggaagtagcacccttgcatttcaaaaataaaattgatggcattacaaatggaat

SEQ ID NO: 427 - DNA, 3824 bp, Homo sapiens
  source 1..3824: mol_type = genomic DNA
gctcaggaacccaaacctgtcgggcaggttttgagagctgtggagagagggacagaggctggagaaggatgtatggcctgccctgggcttgtctgttccctcctgagcctgagccccttaccttcctgaccccatgaagcacacactggctctgctggctcccctgctgggcctgggcctggggctggccctgagtcagctggctgcaggggccacagactgcaagttccttggcccggcagagcacctgacattcaccccagcagccagggcccggtggctggcccctcgagttcgtgcgccaggactcctggactccctctatggcaccgtgcgccgcttcctctcggtggtgcagctcaatcctttcccttcagagttggtaaaggccctactgaatgagctggcctccgtgaaggtgaatgaggtggtgcggtacgaggcgggctacgtggtatgcgctgtgatcgcgggcctctacctgctgctggtgcccactgccgggctttgcttctgctgctgccgctgccaccggcgctgcgggggacgagtgaagacagagcacaaggcgctggcctgtgagcgcgcggccctcatggtcttcctgctgctgaccaccctcttgctgctgattggtgtggtctgtgcctttgtcaccaaccagcgcacgcatgaacagatgggccccagcatcgaggccatgcctgagaccctgctcagcctctggggcctggtctctgatgtcccccaagagctgcaggccgtggcacagcaattctccctgccccaggagcaagtctcagaggagctggatggtgttggtgtgagcattgggagcgcgatccacactcagctcaggagctccgtgtaccccttgctggcggccgtgggcagtttgggccaggtcctgcaggtctccgtgcaccacctgcaaaccttgaatgctacagtggtagagctgcaggccgggcagcaggacctggagccagccatccgggaacaccgggaccgcctccttgagctgctgcaggaggccaggtgccagggagattgtgcaggggccctgagctgggcccgcaccctggagctgggtgctgacttcagccaggtgccctctgtggaccatgtcctgcaccagctaaaaggtgtccccgaggccaacttctccagcatggtccaggaggagaacagcaccttcaacgcccttccagccctggctgccatgcagacatccagcgtggtgcaagagctgaagaaggcagtggcccagcagccggaaggggtgaggacactggctgaagggttcccgggcttggaggcagcttcccgctgggcccaggcactgcaggaggtggaggagagcagccgcccctacctgcaggaggtgcagagatacgagacctacaggtggatcgtgggctgcgtgctgtgctccgtggtcctattcgtggtgctctgcaacctgctgggcctcaatctgggcatctggggcctgtctgccagggacgaccccagccacccagaagccaagggcgaggctggagcccgcttcctcatggcaggtgtgggcctcagcttcctctttgctgcacccctcatcctcctggtgttcgccaccttcctggtgggtggcaacgtgcagacgctggtgtgccagagctgggagaacggcgagctctttgagtttgcagacaccccagggaacctgcccccgtccatgaacctgtcgcaacttcttggcctgaggaagaacatcagcatccaccaagcctatcagcagtgcaaggaaggggcagcgctctggacagtcctgcagctcaacgactcctacgacctggaggagcacctggatatcaaccagtataccaacaagctacggcaggagttgcagagcctgaaagtagacacacagagcctggacctgctgagctcagccgcccgccgggacctggaggccctgcagagcagtgggcttcagcgcatccactaccccgacttcctcgttcagatccagaggcccgtggtgaagaccagcatggagcagctggcccaggagctgcaaggactggcccaggcccaagacaattctgtgctggggcagcggctgcaggaggaggcccaaggactcagaaaccttcaccaggagaaggtcgtcccccagcagagccttgtggcaaagctcaacctcagcgtcagggccctggagtcctctgccccgaatctccagctggagacctcagatgtcctagccaatgtcacctacctgaaaggagagctgcctgcctgggcagccaggatcctgaggaatgtgagtgagtgtttcctggcccgggagatgggctacttctcccagtacgtggcctgggtgagagaggaggtgactcagcgcattgccacctgccagcccctctccggagccctggacaacagccgtgtgatcctgtgtgacatgatggctgacccctggaatgccttctggttctgcctggcatggtgcaccttcttcctgatccccagcatcatctttgccgtcaagacctccaaatacttccgtcctatccggaaacgcctcagctccaccagctctgaggagactcagctcttccacatcccccgggttacctccctgaagctgtagggccttgtgggagtgatctggtggccagaacaggattttgcacggccccttttatcctgcgcatgtggcctagggtcatccccagcccatccctgtgtcagccctgagtgctggacactgcgttccagaaatgaggaagaggagagagaagagatggacagacctcagatccattaaagtgttctcacttccctgagacttggttctgggtccttaaaaccaggtttcctaggctgggaccctgtacatagttggtgtttaatgagtgtttatggagaggagagttctaaggtcacctctggctgcaggcatccagggattattccagcaatctgcaggtagggagtgggtcccagcctgggagcctgctgtcaggagcaggcagacctggactcacagcctggctgtgatgcttgttcgctcagcttctccatttatgagatggggagaatagtcacagcctcctcaaagggttgtgaaaatcaaatgtgataatttgtggaaagcccttagcagtggcctggcacaaaacaaatgctcagtggatggaagctgcctattattattgtcgttgttgttgtttgccatgactgctctgggccgggggtagagctagcatccgggcatgtacgagggaagagggaggcaggcctctattcaaaggcagaaattcctttaagattgtggtctgctgggtttcagggagtgtctgtgttgtttgtttttgtttgtttgtttgttttgagacagggtctcgctctgtcacccaggctggagtgtagtggtgcagtcttggctcactgcaacctccacctcctgggctcaagcgattctcatgcctcagcctcccgagtagctgggactacaggtgtgtgccactatgcctggctaatttttgtattttttgtagagacggggttttgccatgttgcccaggctggaagtgtctatgtttaactgcatcttataaaccagcaacaagttttctactgggaattagaatggtgcatacacaatgtattattatcactgtcagatgagcatgcttgaatgtagcatgactgcctctttttgcttttcctagaggttttttttttgcttgttactcatctgttgacctacctgggggaagtagcacccttgcatttcaaaaataaaattgatggcattacaaatggaatagaaa

SEQ ID NO: 428 - DNA, 216 bp, Homo sapiens
  source 1..216: mol_type = genomic DNA
atgacacagctgcttctgttccttgtggctctcctggttctgggtcatgtgccatcagggagaagtgaattcaaacggtgctggaagggtcaaggggcctgccaaacttactgcacaaggcaagaaacttacatgcacctgtgcccggatgcgtccctgtgctgtctctcctatgcattgaaacctccaccggtccccaagcatgaatatgagtag

SEQ ID NO: 429 - DNA, 2938 bp, Homo sapiens
  source 1..2938: mol_type = genomic DNA
gtacctgtagctgcggcgctgaggtcggaacgtctgcgtgtgtgcgggctggttttgtggcggctgctgctagagctggagcatttgccgggttggtggctcctgcacatttttacagttctccagtccttctctttcgtcagtataaaagattaaactctacagaagaatgcaatcaagtgatggcttttcctttagaatttgaatatggaggctacaggaacagatgaagttgacaagctaaaaaccaaatttatatctgcttggaacaacatgaaatatagttgggtgttgaaaacaaagacgtattttagtagaaattctcctgtattattgcttggaaaatgttaccattttaaatatgaagatgaagataaaacgttacctgcagagtcgggatgtacaatagaggatcacgtaattgcaggaaatgtagaagaatttcgtaaagatttcatttctagaatatggctgacctacagggaagaattccctcaaatagaaggctcagctttgacaacagactgtgggtggggctgcacattgagaactggccagatgctcttggctcaaggactcatactacactttcttggtagagcttggacctggcctgatgctttgaatattgaaaattcagactctgaatcatggacttcccacactgtcaaaaaatttactgcatcatttgaagcatcactttcaggggaaagagaattcaaaaccccaacaatttctctgaaggaaacaattgggaaatattctgatgatcatgaaatgcgaaatgaagtttatcataggaaaatcatctcttggtttggtgattcccccttggctctttttggcttacatcaactaatagaatatggaaagaagtctgggaaaaaagcaggagattggtatggaccagctgtggttgctcacattttaagaaaagcagttgaagaagcaaggcatcctgatttacaaggaataactatttatgttgcacaagattgtacagtttacaattctgatgtaattgataaacagagtgcttccatgacttctgataatgcagatgacaaagctgttattattctagttcctgttagacttggtggagaaagaaccaacaccgactacttagaatttgtgaagggtattttaagcctggaatattgtgtgggtattattggtggcaaacctaaacagtcatattactttgctggatttcaagatgacagtttgatttacatggatcctcattactgccaatcttttgtagatgtcagcataaaggatttccctcttgagacattccactgcccttctcccaaaaagatgtcttttcgaaaaatggatcccagctgtacaataggattttactgtcgaaatgttcaggacttcaaacgagcttctgaagaaatcaccaagatgctgaaattttcttctaaggagaaatatcccttatttacttttgtaaatggtcattccagagactatgattttacatctactacaaccaatgaagaagaccttttttcagaggatgaaaagaaacaattaaaaagatttagcacggaagagtttgtcttgctttaaagattagcacatttgtgcttgataagaagaattccattgaaaggggaaaaatgaagagaaacaagtatatctgaaatgtttattttcacaaatatcttaattttatatgttctttaaaaaagaacatttgaaaatataacagttaaagatatttttctaaaagagaaatgatttaatgaatcttgctttctaataaataaattgagtgattctggttgcattcctatttccctaagatctactagtgataattctaccttaactgtaagccttttagtcttcaaagtcttccacctgagcccattgttctcatggaggttttgtgatattaaccctcccccaaagactgggatcaccaaatagtttcaaaattctcagtttgtactgaagaccagaagatcagagaaggaaactttaatgctgtctagcctcctgctattaatgcaatcaaagaatacttttgcatatgtcttgataattaaatagtatttgttaactgtgatatgcatacacttatataagcagaattatgagttaaagtaatacttagcaatatgattttataatggctcctcattatgcttgctgttgaaccttttatgaggagtgaatataaagtattggttttccctcacaaatttaaagattatgttattaatactattataactgcatcaatcaagtcagataaaggcaactataaaatagtagtagtgtttgtttcctatctcaagggcgaaattttatgggaactcaatttattatgcagtttttaagtttaaaataccaagaaagatgtcactagattctcttctatgtgatttttgttttttatataaagcagtgtagtggtgtttagaagctgaggccacctgtaaggcaaatctgccttaagtgtattatgtgttacttaaaggcaaatttgtgatctaaaagtacaagagtgatttttgagctaggattataaaatacataataaagatgtgagaagataaaatgcttttgttttggttttaatgttgggattattttaatcctttcatttgaaaaatcagtgtctcaaatgaattctgttcatttataataaatgcatatattgctctgaaaacaatattaatttttttaagtggagctttcatgtttcagtgtagaaacgtgacttataaagacataaaattgtgtatcatctaaagtcattgatctcttccatcagaaaacctgtttgtttagagttgcatgtaaagctgaaagagagggtgggcggattgttttagtatacctgatgagaaaaatcaggtttgacatttctcagtgaagattacttactgagttgaaataaatagtctgaaatcta

SEQ ID NO: 430 - DNA, 806 bp, Homo sapiens
  source 1..806: mol_type = genomic DNA
agcagtgggatagtagcgtgtccacattgtcctttgagaatgagaagtcatcctggagcacagctcttcccacgctccgggcccacacacccagcctcactccatcaaaggagccccgctgcctgcccacccaccctgggtgctttctggcttgcagtgctcttggcagacatgaggcaacgattgctcccgtccgtcaccagccttctccttgtggccctgctgtttccaggatcgtctcaagccagacatgtgaaccactcagccactgaggctctcggagaactcagggaaagagcccctgggcaaggcacaaacgggtttcagctgctacgccacgcagtgaaacgggacctcttaccaccgcgcaccccaccttaccaagaacctgcatcagatttaaaagttgttgactgcaggagaagtgaaggcttctgccaagaatactgtaattatatggaaacacaagtaggctactgctctaaaaagaaagacgcctgctgtttacattaaaactgatgttgctgatatagaaacaaagctctgccacttacctgttctccggggccacgttgtccaatcaggtgcaggttttttgcggaagtgtctgagcagcagggagcggagatattgccacttgtgccagacagttcaaatattttattgtggcaagataaatgacaaaaatgctacctgtgatcttacagaagatgacttagcttgacatgaacagaattttcaaaatcacacaatttgtgctagtaaatgtggatatcataaacttttattagaaagaattaaaataa

SEQ ID NO: 431 - DNA, 566 bp, Homo sapiens
  source 1..566: mol_type = genomic DNA
ctccattccattatacctttgagtatataaaacagctacaatattccagggccagtcacttgccatttctcataacagcgtcagagagaaagaactgactgaaacgtttgagatgaagaaagttctcctcctgatcacagccatcttggcagtggctgttggtttcccagtctctcaagaccaggaacgagaaaaaagaagtatcagtgacagcgatgaattagcttcagggttttttgtgttcccttacccatatccatttcgcccacttccaccaattccatttccaagatttccatggtttagacgtaattttcctattccaatacctgaatctgcccctacaactccccttcctagcgaaaagtaaacaagaaggaaaagtcacgataaacctggtcacctgaaattgaaattgagccacttccttgaagaatcaaaattcctgttaataaaagaaaaacaaatgtaattgaaatagcacacagcattctctagtcaatatctttagtgatcttctttaataaacttgaaagcaaagattttggtttcttaatttccacaaa

SEQ ID NO: 432 - DNA, 506 bp, Homo sapiens
  source 1..506: mol_type = genomic DNA
aatggctgtctcagtacttcgcctgacagttgtcctgggactgcttgtcttattcctgacctgctatgcagacgacaaaccagacaagccagacgacaagccagacgactcgggcaaagacccaaagccagacttccccaaattcctaagcctcctgggcacagagatcattgagaatgcagtcgagttcatcctccgctccatgtccaggagcacaggatttatggaatttgatgataatgaaggaaaacattcatcaaagtgacatcctcaggacacacccatgtggctcctggacaatccaagagcagccaaatcctgcttttccagtttggctccacaagtcctccaggacagagccctcaaagcaactcccaacgagttctcaggattcaggctctggcttcaaccaaacagaactcattttgaacaccctgactgcatttttgcttttagaaagttagaataaatatggcgctttgggatcacatagttgatggagagga

SEQ ID NO: 433 - DNA, 1473 bp, Homo sapiens
  source 1..1473: mol_type = genomic DNA
cgggagcggagagcggaccccagagagccctgagcagccccaccgccgccgccggcctagttaccatcacaccccgggaggagccgcagctgccgcagccggccccagtcaccatcaccgcaaccatgagcagcgaggccgagacccagcagccgcccgccgccccccccgccgcccccgccctcagcgccgccgacaccaagcccggcactacgggcgcgcagggagcggtggcccgggcgcacatcggcggcgccggcggggacaagaaggtcatcgcaacgaaggttttgggaacagtaaaatggttcaatgtaaggaacggatatggtttcatcaacaggaatgacaccaaggaagatgtatttgtacaccagactgccataaagaagaataaccccaggaagtaccttcgcagtgtaggagatggagagactgtggagtttgatgttgttgaaggagaaaagggtgcggaggcagcaaatgttacaggtcctggtggtgttccagttcaaggcagtaaatatgcagcagaccgtaaccattatagacgctatccacgtcgtaggggtcctccacgcaattaccagcaaaattaccagaatagtgagagtggggaaaagaacgagggatcggagagtgctcccgaaaggcccaacaacgccggccctcaggcgaaggttcccaccttactacatgcggagtatgggcgtcgaccacagtattccaaccctcctgtgcagggagaagtgatggagggtgctgacaaccagggtgcaggagaacaaggtagaccagtgaggcagtgtatcggggatatagaccacgattccgcaggggccctcctcgccagacagcctagagaggacggcaatgaagaagataaagaaaatcaaggagatgagacccaaggtcagcagccacctcaacgtcggtaccgccgcaacttcaattaccgacgcagacgcccagaaaaccctaaaccacaagatggcaaagagacaaaagcagccgatccaccagctgagaattcgtccgctcccgaggctgagcagggcggggctgagtaaatgccggcttaccatctctaccatcatccggtttagtcatccaacaagaagaaatatgaaattccagcaataagaaatgaacaaaagattggagctgaagacctaaagtgcttgctttttgcccgttgaccagataaatagaactatctgcattatctatgcagcatggggtttttattatttttacctaaagacgtctctttttggtaataacaaacgtgttttttaaaaaagcctggtttttctcaatacgcctttaaaggtttttaaattgtttcatatctggtcaagttgagatttttaagaacttcatttttaatttgtaataaaagtttacaacttgattttttcaaaaaagtcaacaaactgcaagcacctgttaataaaggtcttaaataattgt

SEQ ID NO: 434 - DNA, 3003 bp, Homo sapiens
  source 1..3003: mol_type = genomic DNA
aggatatctttagccaaaggaaaagctccgcattcccacccagtccagaaattgaaatactatcagggggcaagagcctttctctccagctacacactccatctcccgggagcaaggggaaactccgagaggagggcaacagagccagcatcttgccagggccccggaggaggggttccccgctacgcctgtgccggaggagttccagtcaccgagcgaggggcgcaagggtgggtgcatcctgcgctgcggcgggcgcgctacccagacgctggtgtgcagagccacatgaagcctgctggggactgggggccagggagcagcaagccagctgggactgaggcggacgctgtctcagggagacgctgactcgcaaagacactcccttccttgtgcctgggtaaaaagtctcctcctggggtccctggccatcctgaatatccagaatggtgtttctgaagttcttctgcatgagtttcttctgccacctgtgtcaaggctacttcgatggccccctctacccagagatgtccaatgggactctgcaccactacttcgtgcccgatggggactatgaggagaacgatgaccccgagaagtgccagctgctcttcagggtgagtgaccacaggcgctgctcccagggggaggggagccaggttggcagcctgctgagcctcaccctgcgggaggagttcaccgtgctgggccgccaggtggaggatgctgggcgcgtgctggagggcatcagcaaaagcatctcctacgacctagacggggaagagagctatggcaagtacctgcggcgggagtcccaccagatcggggatgcctactccaactcggacaaatccctcactgagctggagagcaagttcaagcagggccaggaacaggacagccggcaggagagcaggctcaacgaggactttctgggaatgctggtccacaccaggtccctgctgaaggagacactggacatctctgtggggctcagggacaaatacgagctgctggccctcaccattaggagccatgggacccgactaggtcggctgaaaaatgattatcttaaagtataggtggaaggatacaaatgctagaaagagggaatcaaatcagccccgttttggagggtgggggacagaagatggggctacatttcccccatacctactatttttttatatcccgatttgcactttgagaatacatctaaggtcatctttcaaaagagaaaaattggacacttgagtgactttgtttttagttttgtttttgtacattatttatgtgattgttatggaattgtcacctggaaagaacaattttaagcaatgtcatttctagatgggtttctaattctgcagagacacccgtttcagccacatctaaaagagcacagtttatgtggtgcggaattaaacttccccatcctgcagattatgtggaaatacccaaagataatagtgcatagctcctttcagcctctagccttcactcctgggctccaaaagctatcccagttgcctgtttttcaaatgaggttcaaggtgctgctttgcatgcctgccaacccatggaagttgtttcttacttcttttctctcttatttattaaccatggtctgagagttgtttttgttctatgtaacagtattgccacaaaactataggcaaatcgtgtttgcagggagatttctgatgcctctgtgggtgtgtgtaagttaaagtggccacatttaagaaggccaagctttgtagtggttgcacagtcacactgatatgctgatttgctctttctcattgtatgtctatgctttgtcatcagtgctatagtaaattacaaagaaataggtagattgtatgaacatacccacaaatgcctatgatttaggttaccaatgtattctttctcatttggggttttgcttctgtctgtctgtttattggaaacttgtacttcaagtagggggaatcctaattctaataactccttagctaagttttattattcaggcaataaacatgttttcatgtaatactggcttactttgtaatttacatctgtaactttcatatttctaaaaggggccaatgcaaaaggagagagaaggactggatttaagccagtttacttagagtatatgataaagaaggcagaggaatagctacatatttggcaattctcctctctgtagtcaccctgacatcctcacaagaaaacaaatctagccattgcccaaactttaaatttgatctctataggtctgcttaaagactcaaattttctccagtttctctcataaattcaattgcaaaagtttctgacaaggctcataccctgtacccttatgcagagcaagcattccatcctaagttataaactacagtgatgtttaattttgaagccaggtctacattatttaattaatggcttcaaaaggtggagatgcactttatttaatgtctttccctagctaattcttactctcaccttaaatatgctttcttgttgcatatatgcacagatacacacacacacacacacgaaaataaataaatgttcatattcttctgttcaacagacatttattttctcctctcccttgaataagaaaataagttttccattcctatgaactgtctaatatctttctattacagaaggggaaactgaggctgggaaaggctaaatgacttatcctccatcagttataacagcccctggtcttcttaaatttaaacacgggacttcccgaactaatttttttaaggatactgaaaaatgagagagagtggtcgaatgcctgaaattttgcttaacttactgtacttaaaatcaattataacttctttttgttactcagggccccactttttgttgctttctagacttgtgtgtagaaagaagattaatgatcacttaaagtagtttccttctttattctgaaaaaatgaggaaaaaataacaacagtggcaaataaaatcatatttggtact

SEQ ID NO: 435 - DNA, 4679 bp, Homo sapiens
  source 1..4679: mol_type = genomic DNA
cccttccgtgcctcctctggggccaggcaggagagccaggtttatagcagcagccactgctgggtactctggagccagagagtccctgggcagcatgctgtgtgccctgctcctcctgcccagcctcctgggggccaccagggccagccccacctcaggcccccaggagtgtgcaaagggctccacggtgtggtgtcaggatctgcagacagctgccaggtgcggggctgtggggtactgccaaggggccgtatggaacaaacccaccgcgaagtctctgccctgcgacgtatgccaggacatagcagccgccgctggcaatgggctgaaccctgacgccacggagtctgacatcctggctttggtgatgaagacctgtgagtggctccccagccaggagtcttcagccggatgcaagtggatggtggatgcccacagttcggccatcctgagcatgctccgtggggccccggacagtgccccggcacaggtgtgcacagcgctcagcctctgtgagccgctgcagaggcacctggccaccctgaggccactctccaaagaggacacctttgaggctgtggctccgttcatggccaatgggccccttaccttccacccccgccaggcgcctgaaggagctctgtgccaagactgtgtacggcaggtctcccgactccaggaggctgtccggtccaacttgaccttggccgacttgaacatccaggagcagtgtgagtccttggggcctggcctggccgtcctctgcaagaactacctcttccagttttttgtccctgctgaccaagcactgaggcttctccccccgcaggagctctgcaggaaggggggattctgtgaggagctaggggcacctgcccgtttgactcaagtagtggccatggacggggtcccctccctggagctggggttgccaaggaaacagagcgagatgcagatgaaggccggtgtgacctgtgaggtgtgcatgaacgtggtgcagaagctggaccactggctcatgtccaacagctctgagctcatgatcacccatgccctggagcgcgtgtgctcggtaatgcctgcctctatcacgaaggagtgcatcatcttggtggacacctacagcccctccttggtgcagcttgtggccaaaatcaccccagagaaggtgtgcaagttcatccgtctgtgtggcaaccggaggcgggcccgggcagtccatgatgcctatgccatcgtgccgtccccagagtgggacgcggagaaccagggcagcttctgcaatgggtgcaagaggctgctcacggtgtcctcccacaacttggagagcaagagcaccaagcgagacatcctggtggccttcaagggtggctgcagcatcctgccgctgccctatatgatccagtgcaagcacttcgtcacccagtacgagcccgtgctcattgagagtctcaaggacatgatggaccccgtggctgtgtgcaagaaggtgggggcctgccacggccccaggaccccactgctgggcaccgaccagtgtgccctgggcccaagcttctggtgcaggagccaggaggccgccaagctgtgcaacgctgtgcaacactgccagaagcatgtatggaaagagatgcacctccacgctggggaacacgcgtgaccgtggctgccagagacccagagcctgctagcgaggcccatgaggtgggtgctttccccatccccatttcacaaatgaaaaactgaagctctgaggagggaggctgggaaggagcagagctgaagttcaaaaccaagtattcctgatcccgaaagcctctctcttaacaacggtgccgcacagctttgcccttgaaagcatctctactggaccggaacacactcatgtgccccgctccctgacccagccaaggctgccctctcatctccaaggctgagatgttgccggtggtcccatgagagcctgcccatgggctcaggtgcccctttaccttctgctggatggacatctggctgtgagccaggctggggtcatggccggggtgagcggaggcaggggtggacggaggcttcgagggcccatcactagtagggtcattacctcttgccaacagccgggggtgggagtctgggtctcgctcaggccagagcttctcaacctggagtccctgggggtggctgccaaaggtgtgtatgacaagcacgtatccctggacatttccggggagaggtctggggctttggtcacattctccaagggctgctgggcttcggagcagtccccccccatgtctcagccactacagggtccctctctctccttgcaccccagaccctccgctgccctggtaatgagcagaaggaaagtcttggggtgtgctcaaagtcaggagagcaaaatatgccaggcaaaagctcccgggaaaagccggaggagtctggggtggccaccgggatgtggagcagcgagggcaaagacggtgaacacagccctccagctgtctgagcctcagttttctaatctgtagaatggggatgatcatacctgcctcacaagaatgttgagacaattcacagagacgttctggagcccctttcccccgagaccggcattcatgagtctgctgggaccagaaaacccatctcaggggcccagcggggcacccaggagagtctggcggtgcaagcgctgtataaaccacaagcgttctccaaatgccgtgtgccgtgtttttattctcagggaaggcgcagatcccagagctgctacaacagcctccaccttaccctggtgcctccacctcgccccggtgccccctctggcagaaagcctccggggggggtttccatctgggttcaagtgctcctgtggtttctgctcctgctgtttggcccccctaagacactgtgccccctccaggagagcccctgggcatgaccctgcagtgtccttgcagctggcccagcatctgcacgcagcaggtgctcacacatctgggagccgcacacatgagtcccgggggtggaagctggtatttcacctgaggcccatggattaattctcctcttgagtaagaggtgcgccaggcctggatggacgggatgtgagcgggtgctgttttccaagaggccacacccgagctcttaagtaaacgtcgcagacctgggccaccgccccaggaacacaggcacactgggcctgagattctggatgcctcagaagtggcccctattggctgggcaggcctgggcccgctgggcagtcccacaaaagataaggccagcaaggggtggtggtcgtgcctggccaccggatgggccatgggaaggcagctctgcaccagactccaaaacacaggggcccgaagttgttggcctcagtatctgcctcttcccctgagaccacccaccctctccaggagcagccccagaggctctctgtctgcctgccggtaggtgttcccacctgacacactctctgggacaggatggagccataggccctcctctggcttggctgtgagtcgggaggatgcctaccgggaagtatgtgtgacatgacctgaaatcccccgacaggtcacctgggagaggccgggagagggcaagcgccacacctgccaggtggcccagctcagcccacctgcccccaccccagagctacctgcagtgggtggtcagggtggggtgtccccacaccctcttccctacccaccccttgggcctgggtaccagctgctcccacagacccactgagcacatgcgtctccactagatggttgcccgtgatgaacggagctcactggccatgaccccacaggcccagctgcacacccaggtcatgagcacggccctgccccacccccataggggccctctgacccctccactcactcatccgccaccaaagctgtggaggcctgtggcagggtctcagtcacctccatcccctgtgcccggaaccaagcccggaacacaggaggtgctctgcaagtgctcgtggggagtggctgccttggggtctaaaggcagagaggcaggaggagcaagggacgggcccactggtgctgacggcagcaccaccattcagcactgagactgaggcttaaggagtccatccaaatgactccatagccgccgcgttcaggctggaaaaggcttttcagcggagggtgctgtaactgtccagctgtgggagaggagataccagcccaggagaagagcagctggccctactgggcctagaagtttgggagacccatcccagcaaggatgggaaatcaagacagatgttgagcatggatttcccagaggtggtgactgcgccgcacagaggagcatctctgcctgggaggagggagagggctcccgccgggctgccagagccgagcaagtacctgcaccttcagccagacacatgctgggcattcttcagatgccatcgtaaggcggaggcctgggacgtcccagaacacctatggatgctgcccctcgggctttctcggccacaccagatgcagaggggctgtgggagcctggaaaagggcttggtggtccagctgctttgttgttgttgtttttgttttgtttgtttgtttgtttgtttgttttggcttggggcttttcttagaagtgatgtgttgttagaaacttcaaaccagatacaaatatacccaacg

SEQ ID NO: 436 - DNA, 2383 bp, Homo sapiens
  source 1..2383: mol_type = genomic DNA
tgtgtcgtaccaacagccgcatcgttccgaggctgtggaggccgggcgcagcggcgtcaagatggcggctgcggcagtggcggcggcggcggcggcggccgcggctgcatctcttcaggtactggagatggagagcatggagacggccgccgccggctcggcaggactggccgccgaggtccgaggcagcggcacggtggacttcgggcctgggccggggatctctgcaatggaggcgagcgggggcgatccgggcccagaagccgaggatttcgagtgcagctctcactgctcagagctgtcctggcggcagaacgagcagcggcgccagggcctcttctgcgacattaccctgtgcttcggcggggctggaggccgcgagttccgggcccaccgctcggtactggctgccgccaccgagtacttcacgcccctgctctcgggccagttttccgagtcccgctcgggacgggtggagatgcgcaagtggagctccgagccggggcccgaacccgacacagtggaagccgtaatcgagtacatgtacaccgggcgcatccgcgtcagcacgggcagcgtgcacgaggtgctggagttggccgacaggttcctactcattcgtttaaaagaattttgtggagaatttctcaagaaaaaacttcatctctcaaattgtgtggcaattcatagcttagcacacatgtacaccctgagccaacttgctctgaaggctgctgatatgatacggagaaatttccacaaagtgattcaggatgaagaattttatacgttacctttccatctcattagagactggctttcagatttggaaattacagttgattctgaagaggttctctttgaaaccgttttgaaatgggttcagagaaatgctgaagagagagagagatactttgaagaactttttaaattgctcaggttgtcccagatgaaacctacctaccttactcgacatgtcaaaccagagaggctggtagccaataatgaagtttgtgtcaagttggtcgctgacgcagtggagagacatgctctgagagctgagaatatacaatctggcacatgccagcaccccacttctcatgtgtcactattgcctcgttatgggcaaaacatggatgtgatcatggttattggaggtgtgtcagaaggaggggactatttaagtgaatgtgtgggatactttgttgatgaggacagatgggtaaatctgccacatattcataatcacctcgatggacatgctgttgcagtaacagaatcctacgtgtatgttgctggatcaatggagccagggtttgctaaaactgtagaaaggtataacccaaatttgaatacatgggaacatgtttgtagtctgatgacaagaaagcattcttttggactaacagaagtcaaagggaagctctatagcattggaggacatggcaactttagtcctggttttaaagatgtgactgtttataatcctgagcttgataaatggcacaacttggaatcggcaccaaagattcttcgagatgtcaaagcactagccattgaagaccggtttgtatacattgccgcccgcactcctgtagaccgggacactgaagatggattaaaggctgtaattacttgctatgatacagagactcgacagtggcaagatgtggaatctttgccgcttattgacaattactgctttttccaaatgtctgtggtcaattcaaacttttatcagacagcatcatgttgtcccaagagttattgtttagaaaacgaagaggcagtaagaaaaattgccagccaagtgtctgatgagatccttgaaagcttgcctccagaagtcctaagcatcgaaggagcagccatttgctattacaaagatgatgtcttcattataggaggctggaaaaacagtgatgatattgataaacagtatcggaaagaagcctaccgatattgtgcggagaggaagaggtggatgcttcttcctcctatgccacaacctcgttgtagagccactgcttgtcacgtgaggatcccataccggtacttgcatggcacacagagataccctatgcctcaaaacctgatgtggcagaaggaccgcatcagacagatgcaagagatacatcgtcacgccctgaacatgaggcgagtgccaagctctcagattgaatgctaggttctctcaagcgtgccgattaaaactgttacacccgtttcgtgaagctgaagatacccaggctgttatttaaaaaagtatgtcgataacttattttctacatgaactgattattaccccatataaaggaaatagagttaaaaactaaagaatgggagactcagttcaatacatggtcattttgttagcttgcaa

SEQ ID NO: 437 - DNA, 2016 bp, Homo sapiens
  source 1..2016: mol_type = genomic DNA
gttctgatgctgatcttcagtaactctgctgcctctgcctgcctattcagcatttgcctgttaacaggaagctctttctggctcccaactgaagctctctgaggccagcagccgccgtcaatgttcacagagtgcaggcaggcagccaaatgagtgggaattgggtgcacccaggccagatcctaatttgggctatctgggtccttgcagcccccaccaaagggccttctgctgaagggccacagaggaacaccaggctgggatggattcagggcaagcaagtcactgtgctgggaagccctgtgcctgtgaacgtgttcctcggagtcccctttgctgctcccccgctgggatccctgcgatttacgaacccgcagcctgcatcgccctgggataacttgcgagaagccacctcctaccctaatttgtgcctccagaactcagagtggctgctcttagatcaacatatgctcaaggtgcattacccgaaattcggagtgtcagaagactgcctctacctgaacatctatgcgcctgcccacgccgatacaggctccaagctccccgtcttggtgtggttcccaggaggtgccttcaagactggctcagcctccatctttgatgggtccgccctggctgcctatgaggacgtgctggttgtggtcgtccagtaccggctaggaatatttggtttcttcaccacatgggatcagcatgctccggggaactgggccttcaaggaccaggtggctgctctgtcctgggtccagaagaacatcgagttcttcggtggggaccccagctctgtgaccatctttggcgagtccgcgggagccataagtgtttctagtcttatactgtctcccatggccaaaggcttattccacaaagccatcatggagagtggggtggccatcatcccttacctggaggcccatgattatgagaagagtgaggacctgcaggtggttgcacatttctgtggtaacaatgcgtcagactctgaggccctgctgaggtgcctgaggacaaaaccctccaaggagctgctgaccctcagccagaaaacaaagtctttcactcgagtggttgatggtgctttctttcctaatgagcctctagatctattgtctcagaaagcatttaaagcaattccttccatcatcggagtcaataaccacgagtgtggcttcctgctgcctatgaaggaggctcctgagatcctcagtggctccaacaagtcccttgccctccatctgatacaaaacatcctgcacatcccgcctcagtatttgcaccttgtggctaatgaatacttccatgacaagcactccctgactgaaatccgagacagtcttctggacttgcttggagatgtgttctttgtggtccctgcactgatcacagctcgatatcacagagaaggagccacggaggaggagaagttactgagccggaagatgatgaaatactgggctacctttgctcgaaccgggaatcctaatgggaacgacctgtctctgtggccagcttataatctgactgagcagtacctccagctggacttgaacatgagcctcggacagagactcaaagaaccgcgggtggatttttggaccagcaccatccccctgatcctgtctgcctccgacatgctccacagtcctctttcttccttaactttcctctctctcctccagcctttctttttcttttgtgctccttgagaagttatctttctgtgattttggtttcccttctcctcccataatttctcccgcaatcattagcttctttctgagctcagctgctttctatggggatccttgcaaaacaagctgctttcgctgatattttatggacttaggaatgatccttacagaattcttttcaacatcaaaaagtgcaatttgtcttggaaggcaacaagatttcttcaataaatttggaagagggctggcctattagttgtcataataatggttttgtaactcatatgaaataaaatcagaatgt

SEQ ID NO: 438 - DNA, 900 bp, Homo sapiens
  source 1..900: mol_type = genomic DNA
atggtccgctgcctggggcctgcgctgctgctgctgctgttactggggtcggcgagctcggtcggagggaaccgatgtgtggacgcggccgaagcctgcacggcggacgcgcggtgccagcgtttgcgctccgagtatgtggcgcagtgcctgggccgggctgcgcaggggggctgtccccgcgcccgctgccgccgggccctgcgccgcttcttcgcccgcgggccgcccgcgctcacccacgcactgctcttctgcccgtgcgcgggccccgcgtgcgccgagcgtcggcgccagaccttcgtgccctcctgcgccttttcggggcccggccccgcgccgccctcctgccttgagcccttaaacttctgcgagcgcagccgggtctgcaggtgcgcgcgggcggcggcggggccgtggcgagggtggggacggggcctctctccggctcaccgccctcccgccgcgcaggcctcgcctcctggcctttcaggtctcgtgcaccccagcgcccagcgcccccgacggctgcctgctggaccagggcgcccgctgcctgcgcgcctacgcgggcctcgtggggtccccgcaggcaccgccgtcacccctaactacgtggacaacgtgagcgcgcgcgtggcgccctggtgcgactgcggagccagcgggaaccggcgtgaggactgcgaagccttccgggggctctttaccaggaaccgctgcttggatggtgccattcaggcctttgccagcgggtggcccccagtcctgctggaccagctgaacccccagggagacccggagcacagcctcctgcaggtgtcctccacaggcagggccctggagagacgctccctgctctccatacttcctgtcctggctctcccggccctgctctga

SEQ ID NO: 439 - DNA, 566 bp, Homo sapiens
  source 1..566: mol_type = genomic DNA
cccatccaggcagcacggctggctgagcagagacaagggctgcccacactgggactggtagaggaagccggccctgacggatgggtggtctcgcccttcctgggttcatcctgctgcaggtgggcctgagtcgcagatcaggaagcaccgggaagatgcaggcctgcatggtgccggggctggccctctgcctcctactggggcctcttgcaggggccaagcctgtgcaggaggaaggagacccttacgcggagctgccggccatgccctactggcctttctccacctctgacttctggaactatgtgcagcacttccaggccctgggggcctacccccagatcgaggacatggcccgaaccttctttgcccacttccccctggggagcacgctgggcttccacgttccctatcaggaggactgaatggtgtccagcctggtgcccgcccaccccgccaggctgcactcggtcgggcctccacaggcatggagtccccgcaaaaacctggcccctgcaggagtcaggcctggtctcacgctcaataaactccggactgaagatgca

SEQ ID NO: 440 - DNA, 4357 bp, Homo sapiens
  source 1..4357: mol_type = genomic DNA
gacccagcgccgagcccgagccatggcgtccgagcggctccctaacaggcccgcctgtctgctcgtggccagcggcgccgccgaaggtgtgtcggcccagtccttcctccactgtttcacgatggccagcaccgccttcaacctgcaggtggccacccctggggggaaagccatggaatttgtggatgtgactgagagcaatgcacgctgggtgcaagacttccgcctcaaggcttacgccagccccgccaagctcgagtccatcgatggtgcccggtaccatgccctcctgatccccagctgtcctggggccctgaccgacctggccagcagtggctccctggcccgtatcctgcagcacttccactctgagagcaaacccatctgcgccgtcggccacggtgtcgccgccctgtgctgtgccaccaacgaggacagatcctgggtgttcgacagctacagcctgacagggccctctgtgtgtgagctcgtcagggcccccggcttcgcccgcctgccgctcgtggtggaggacttcgtgaaggattcgggcgcctgcttcagtgcaagcgagcctgacgctgtccacgtcgtgctggaccgccacctggtcacaggccagaatgccagctccactgtcccggccgtgcagaacctgctcttcctctgtggcagccggaaatgaacctgctgggtagatgcaccccctgagacagcccaggtgtctccagaggcagccccgtctcaggcttcagggaccccgcctcttccctcctgacaagggccctggatggcagcctggtctggccctgatgggattgttggaggcctcctggaatcagctctgagggggtgtcggctctcctggagggtccaaacccccatcctcctgcatgttctctggtaggaggcagagaaaagaccccacgtgcctggagagctgtgctagctgctaggtggtcctcgggaattccaggctgggttttctagggaggactggttgtcacgtgtggtcactgttgactagacagagtcggctcgggggtcctctgtgtgggtttgccctgctgtggcctgtctgccacccaccacctctttcactgttggtgggggccttgaggggagggcccagccggcgggagctggctcagaactttggccaaaggtgaacggaattttttaggagcagcagcctcctgccccaaggccgaccggcactggcagcactttcctgttgaagaaatcttcctggcgtgtggtttcaaagtgtaagcacctcagtgatgcaccctgtcctaagcattgagaggcacgtttacttgtgaatatgagaccatgagattctcaatgataggaaagtgctgtcccccacggccttgcacagtggcctcgggtagagcggctatcaagagcagacagtggtccagcctgctgggcacctggcctgggctgtggccctccagcgggctgccccctggccccaggttagggcgtccaggagaggcttaggccctctacttcctcacagttccccagtttgagccatcgaaggccttcttcctgcccacctccccgtctcagccacagccgttcccaagcaccagcgtggctcctggtgccagtgacctgccaggaggccccttgtgattataaaaccgttcagttgggccgggcgcagtggctcacacctgtaaccccagcactttgggaggccgaggcgggcggatcacgaggtcaggagatcgagaccatcctggctaacatggtgaaaccccatctctactaaaaaacaaaaatacaaaaagttagcctggcatggtggtgggtgtgtgtagtcccagctacttgggaggctgaggcaggagaatggcgtgaacctgggaggcagagcttgcagtgagctgagatcgtgccactgcactccagcctgggcaatagagtgagactccatctcaaaaaaaaaacgttcagttggctgggcgcggtggctcacgcctgtaatcccagcactttgggaggccaaggtgggtggatcatctgaagtcaggagtttgggaaaagcctggccaacatggtgaaactaaaatacaaaaatgagccgggtgtggtgtcaggcgcctgtattcccagctacttgggaggctgagacgtgagaattgcttgaacctgggaggcggaagttgcagtgagccaagattgcgccattgcactccaacctgggcaatgagtgaaactccgtctcaaaaataaaaaataataaaataaagccgttcaataaggagaatttggaaaaaagtggaagaaggaagcgctgcagccacatccccgccctgaaggctgcgtccctccagtgcctcgcagattagtcaggatgcccacttagcactggccacggggccttgctctgtcccgggtccactctcatccccgtgtggtgatggacctctgtggacaaatgctttttattttatttattttttgagatggagtttgtctctcgtcacccaggctggagtgcagtggcacaatcttggctcactgcaacctctgtctcccgggttcaagcgattctcctgcctcagcctccggagtagctgggattacaggtgtgcgccaccacgcctggctaatttttgtatttttcgtagagaccgagtttcaccatgttggccaggctggtctcgaactcctgacctcaagtgatcctcccgcctcggcctcccaaagtgttaggattacaggcgtgagccactgcgcccggcgtaatttttgtttttagtagagatggggtttcatcatgttggccaggctggtcttgaactcctgacctcaggtgatccatcttcctcagcctcccaaagtgctgggattacaggcgtgagccgccacgtccggctaacaagtacttttttatttttattttattttttggatggagtctcactctgtcgcccaggctggaacacagtggcacgatctcggctcactgcagcctccgcctcccgggttcaagtgattctcctgcctcagcctcccaagtagctaggactacaggtgcacaccaccacacccagctaatttttgtatttttcctttttttttttttttgagatggagtcttgctctgttggcaggctggagtgcagtggcgcgatctcagctcactgcaacctctgcctctgcctcccagattcaagcagttctcctgcctcagcctcccgagtaactgggactacaggtgcatgccactacgcccagctagtttttgtattttcagtagagacggggtttcaccatgttggccaggatggtctcgatctcttgacctcatgatctgcccgcctcggcttcccaaagtgctgggactacaggcaagctcatgtcttaatgtcctagtccatttgggctcctataagaaaatactgtaaactggccgggcacggtggctcacgcctgtaatcccagcactttgggaggctgaggcaggtggatcacctgaggtcaggagttcgagaccagcctggccaagatggtgaaaccccgtctctactaaaaatacagaaattagccgggcgcggtggtgggcgcctgtaatcccatttacttgggaggctgaggcaggagaatcgcttgaacccaggaggcggaggttgcagtgagctgacatcgtgccactgcactctagtctgggtgacagagcaagactccatctcaaaaaaaaaaaaaaagaaaatattgtaaacctagtggcttataaacaacagaaatcagtttcagttttggaggctggaagcccaagatgaaagcaccagtagatgcaacctcttttgtgagggtgatggtcccatgatgaggctgtgcccctgccctgtgaccggatgacctcccaaatgccccacctaataccatccccttgcaggtgaggacttaagcaggtgggttttggggggacgtgctcaggccacagcagggtgcatgaagagccagtgagcctcattgagcccctctggtcagccagatctgacattgagcccagcattgaagatcaaagcaggtggggctttgggatgtgaagtgggttctgacgcggggccccacagacctgtctccgcgtgagctgcctgcaggcccctgcgtcattcctcagctgcgtgcgaggcctctggcttggagagcctccccgctgtgcacagttctctctttgccagggcagggcttggggcagcaccaggctggggcagaggaggaaagcaagaggacagacctccagaagagcagcggagggcgggtgaggatttccccatataccagtgtgtgttcatctacccatgaggaataaaaccatgcagcagcatgc

SEQ ID NO: 441 - DNA, 3728 bp, Homo sapiens
  source 1..3728: mol_type = genomic DNA
cttcctttccttacgcacgctgcgcgcggacgtcggcctctgacgtcgtcgcctcagcgccggctcccggccgggccgcggccgccgaccgttgagccgccggctgagccgcctgctgaagtccctccctcaggaacccctccgccaccctccacctccgaaccgctctcgcggcggcgacccatgtgggggttcaggctcctgcggtcgccgccgttgctgctcctgctgccgcagctcggaatcggaaacgcctcgtcctgctctcaggccagaaccatgaacccgggcggcagcggcggcgcgcgatgctccctctcggccgaggtgcgccgccgtcagtgcctgcagctttccaccgtgcctggagccgatccgcagcgcagcaacgaattgctcctgttggcggcggccggggagggactggagcggcaggacctccccggggacccagcgaaggaggagccgcagccgccgccccagcatcacgtcctctatttccctggggatgtgcagaattaccatgaaattatgactcgtcatcctgagaattatcaatgggaaaactggagtctagaaaatgttgctaccattttagcccaccggttccccaatagttatatttgggtgataaaatgttcccgaatgcatttgcacaaattcagctgctatgacaattttgtgaaaagtaacatgtttggtgccccagaacacaatactgactttggagcttttaagcacctttatatgttattagttaatgcttttaatttaagtcagaatagtttatcaaagaaaagtttgaatgtttggaataaggactccatagcatctaactgtagatccagtccttctcatactacgaatggttgccagggagaaaaagtgaggacctgtgaaaaatctgatgagtctgccatgagtttttatccaccatcactaaatgacgcatcttttactttgattggattcagtaaaggttgtgttgttttgaatcagttgctttttgaattgaaagaagccaagaaagacaagaacatagatgcttttatcaaaagcataagaacaatgtattggctggatggtggtcattctggaggaagcaatacttgggttacttatccagaagtcttgaaagaatttgcacaaacaggaattatcgttcacactcatgtaacaccttaccaagtacgtgatccaatgagatcttggattggaaaggagcacaagaaatttgttcagatacttggggatcttggtatgcaggtgactagccaaattcattttacaaaggaagctccttccatagagaatcacttcagggttcatgaagtattttgagattacaggtatattaatgaacttgttcagtggaagaacataagcacttttgagtgttataaattcagataatgggatgtaattcatagctgcattgtcagttttggggtatggggggaagcacacattcctaaaatgtgagtgtaatgtgcaatagtattttttgcttgtgaatgtgagcagttattaatttggattgagttagaattagttaatttgaaatctaacaaggtggtttgtaataatgctgaggagatataagacccttaaaatgaaagttacaacattgttcttataaaaggtaactaaaattgttactgttggaaataactgattttctgagtaatgttttaaactaatttggtgacattttaacagtaattagctattttgagtggaaatattttcatttctcttcaaacaaaagcaaaggtacgatgctgttttctatcattttggaataactgcaccctgccttttgtgtttttgtaaactccttgactcattctttcatgtgtcaccaagtacttttctcatgagagtcaacatatatttgtttccaaatgtccacaagtgtacaatagtgtaaaggtggtttttaaaaacatagccaggtgtggtggcacgtgcctttagttccagctactcaggaggctaaggcaggaggattgcttgagcccaggctgtgtggttcaccataattgtgtttgtgactagctactgcactccaacctgggcaacatagtgggacttcatctctaaaacaaaacaaaacaaaattacacttaagcactattgtttaatttttaattgtcagtttatcattattttgggtaagacattctggggtttcttgaatcttgtccaaaaaccagttgttttggaaaattgctttaaattgagcatatttatgtatattggataaaaatgtactacagagcaaatttcaaatttttcattatatcagtctttttgaaaggatcaacttggataaaataaatatataatgctctatttgttagagctctattaaaaaggaaacagattccatagatctaagtcaatgtttctccagaagcatgattttgtctgccaaaagaaaatagctctctttggccaaaatgcaaaattacattgctataagaaaagttacaagggaaagtttgaagacacaaatgatttaattttggctcaaaaactgaatttgcttaacactgctacataatttgggtgaagtttccttctgcccgtttttcttgacctagataaatacactttgagaaatccagatctaataaatgtcaaccaacattgacattgtaattgggtgattacaataaaaggtgagcagtttgttgtttattaataattagcttttgcaggtaatgaaatagcagggaagtaacatgctgctttaggactaaaaaaaaaaaaaaaaaaaagacactgaagcttaataccttaatgacccagaagacctagatttataaagccatatagaataaaaatgttaatttcttggtttcttcccagaattatattttaatgactccataaatacattccaaatattcagagattcatgagaaaggattcttaacaaatgtttaaaaataacatttctttttggtgttttaacacttaattttataaactgcagaacagcatctctaaatggctttttttttttttttaaagacaaagtagtattatgttgcttcagtttctttaaatacctcgtttcttttgagaccaaaaattcccatcaaggaaataaatcagcctgattttaacattttacatattacattgcctttaagcactatgattggatggctttttttctatttgtttaataatccttggctaaattcacatgtatctaaaggaaaatagctgagttactgaattctataaggggaagaaaaagcatttattttcacatgattaactgaaatggaaaagtaagacatttagcagaataattcatttaaaaataattttaaaaaatcagacatatttaaaaatctaggttgtctatccagtatgtgaatgcttaattataattgttacatgttgaatgggtattaagagtaagtcaccaggtacacaaaactgccatcatagcaaaatgagacagtgttgaaaagacaaaatattttctggaatgaaaatatattcaagttgatccatattcagatgttttctgtttaatacttcagattggtcctttgtccacatttgtttaaaacttattgtaatgttaatttacacttttggattgtgcctttgtcatgagttgagaaaagtagtcctacaaataatgtgaaagttgttaccaccacagcatgaatgtataattgtattaaaattgatcatccacagaa

SEQ ID NO: 442 - DNA, 1326 bp, Homo sapiens
  source 1..1326: mol_type = genomic DNA
gcggggggcgcgcgacgtgaccacccggactcgaagcccgccccgcccccgcccggctcgccggctccggggtctgctccgggggtcgcggacgcggggccgggcggcggagccggcgccagagcatgcggggcgcggcgcgggcggcctgggggcgcgcggggcagccgtggccgcgaccccccgccccgggcccgcccccgccgccgctcccgctgctgctcctgctcctggccgggctgctgggcggcgcgggcgcgcagtactccagcgaccggtgcagctggaaggggagcgggctgacgcacgaggcacacaggaaggaggtggagcaggtgtatctgcgctgtgcggcgggtgccgtggagtggatgtacccaacaggtgctctcatcgttaacctgcggcccaacaccttctcgcctgcccggcacctgaccgtgtgcatcaggtccttcacggactcctcgggggccaatatttatttggaaaaaactggagaactgagactgctggtaccagacggggacggcaggcccggccgggtgcagtgttttggcctggagcagggcggcctgttcgtggaggccacgccgcagcaggatatcggccggaggaccacaggcttccagtacgagctggttaggaggcacagggcgtcggacctgcacgagctgtctgcgccgtgccgtccctgcagtgacaccgaggtgctcctagccgtctgcaccagcgacttcgccgttcgaggctccatccagcaagttacccacgagcctgagcggcaggactcagccatccacctgcgcgtgagcagactctatcggcagaaaagcagggtcttcgagccggtgcccgagggtgacggccactggcaggggcgcgtcaggacgctgctggagtgtggcgtgcggccggggcatggcgacttcctcttcactggccacatgcacttcggggaggcgcggctcggctgtgccccacgcttcaaggacttccagaggatgtacagggatgcccaggagagggggctgaacccttgtgaggttggcacggactgactccgtgggccgctgcccttcctctcctgatgagtcacaggctgcggtgggcgctgcggtcctggtggggccgtgcggtgagggccgcgcgctgggagccgcgtgccctgggcccaggcctgaccctggtaccgaagctgtggacgttctcgccacactcaaccccatgagcttccagccaaggatgccctggccgattggaaatgctgtaaaatgcaaactaagttattatatttttttttggtaaaaaagaaatgtccatagg

SEQ ID NO: 443 - DNA, 1780 bp, Homo sapiens
  source 1..1780: mol_type = genomic DNA
agctaaccctcgggcttgaggggaagaggctgactgtacgttccttctactctggcaccactctccaggctgccatggggcccagcacccctctcctcatcttgttccttttgtcatggtcgggacccctccaaggacagcagcaccaccttgtggagtacatggaacgccgactagctgctttagaggaacggctggcccagtgccaggaccagagtagtcggcatgctgctgagctgcgggacttcaagaacaagatgctgccactgctggaggtggcagagaaggagcgggaggcactcagaactgaggccgacaccatctccgggagagtggatcgtctggagcgggaggtagactatctggagacccagaacccagctctgccctgtgtagagtttgatgagaaggtgactggaggccctgggaccaaaggcaagggaagaaggaatgagaagtacgatatggtgacagactgtggctacacaatctctcaagtgagatcaatgaagattctgaagcgatttggtggcccagctggtctatggaccaaggatccactggggcaaacagagaagatctacgtgttagatgggacacagaatgacacagcctttgtcttcccaaggctgcgtgacttcacccttgccatggctgcccggaaagcttcccgagtccgggtgcccttcccctgggtaggcacagggcagctggtatatggtggctttctttattttgctcggaggcctcctggaagacctggtggaggtggtgagatggagaacactttgcagctaatcaaattccacctggcaaaccgaacagtggtggacagctcagtattcccagcagaggggctgatccccccctacggcttgacagcagacacctacatcgacctggcagctgatgaggaaggtctttgggctgtctatgccacccgggaggatgacaggcacttgtgtctggccaagttagatccacagacactggacacagagcagcagtgggacacaccatgtcccagagagaatgctgaggctgcctttgtcatctgtgggaccctctatgtcgtctataacacccgtcctgccagtcgggcccgcatccagtgctcctttgatgccagcggcaccctgacccctgaacgggcagcactcccttattttccccgcagatatggtgcccatgccagcctccgctataacccccgagaacgccagctctatgcctgggatgatggctaccagattgtctataagctggagatgaggaagaaagaggaggaggtttgaggagctagccttgttttttgcatctttctcactcccatacatttatattatatccccactaaatttcttgttcctcattcttcaaatgtgggccagttgtggctcaaatcctctatatttttagccaatggcaatcaaattctttcagctcctttgtttcatacggaactccagatcctgagtaatccttttagagcccgaagagtcaaaaccctcaatgttccctcctgctctcctgccccatgtcaacaaatttcaggctaaggatgccccagacccagggctctaaccttgtatgcgggcaggcccagggagcaggcagcagtgttcttcccctcagagtgacttggggagggagaaataggaggagacgtccagctctgtcctctcttcctcactcctcccttcagtgtcctgaggaacaggactttctccacattgttttgtattgcaacattttgcattaaaaggaaaatccactgctc

SEQ ID NO: 444 - DNA, 1323 bp, Homo sapiens
  source 1..1323: mol_type = genomic DNA
gtgcagtcctgtgtcggacacgcccgcagcctggacccgggatccccatccccctaggatctctgagcctcgggcctctgcacccacatccaaggcggcagcgtctgtccctcccagcctctcgctccgcgccatgggcgggccccgggctctgctggccgcactctgggcgctggaagccgccgggaccgccgcgcttcgcatcggagccttcaacattcagagcttcggtgacagcaaagtgtcggaccccgcttgcggcagcatcatcgcgaagatcctggctggctatgacctcgcgctggtgcaggaggtgcgagacccagacctcagcgccgtgtccgcgctcatggagcagatcaacagcgtgtccgagcacgagtacagctttgtgagcagccagcccctgggccgggaccagtacaaggagatgtacctgttcgtgtacaggaaagacgcggtgtcggtcgtggacacctacctgtacccagaccccgaggacgtcttcagccgcgagcccttcgtggtcaagttctcggcccccggcaccggtgagcgggccccgcccctcccctcccgccgagctctgacgcccccaccccttcccgcagcagcacagaacctggtgctgatcccgctgcacgcggcgccgcatcaagccgtggcggagatcgacgcgctctacgacgtgtacctggacgtgatcgacaagtggggcaccgacgacatgctgttcctgggcgacttcaacgccgactgcagctatgtgcgggcgcaggactgggccgccatccgtctgaggagcagtgaggtcttcaagtggctcatccctgacagcgccgacaccacggtgggcaactcagactgcgcctacgaccgcattgtggcctgtggcgcccgcctgcgccggagcctgaagccccagtcggccaccgtgcacgacttccaggaggaattcggcctggaccagactcaggctcttgccatcagcgaccactttccagtggaggtgaccctcaagttccaccgatgactcgaggcctggctggggcatgccacctgcagaccctggctctgaggaatggcccaacagtggccccttcagggtggcagccacccttcagtgaggccccaaggcagagtcggctgggcgtggaccaggggccatggacacgtgatgtgctgctctgtacctccgttccccatctgtgggacgggctgcatccagcgacctcatggggtgttgtgagccccatgaggggtgcagggggcactgcccggcagatgtctgctcaataaatgagctgctcccggtcgggcccc

SEQ ID NO: 445 - DNA, 6193 bp, Homo sapiens
  source 1..6193: mol_type = genomic DNA
acatttgtgatcacctggtcacacacctgggcaggaggctgcccctcctccctggtttgaggaagcaggaaaaggtacccgcgagagacagccagcagttctgtggagcagcggtggccggctaggatgggctgtctctggggtctggctctgccccttttcttcttctgctgggaggttggggtctctgggagctctgcaggccccagcacccgcagagcagacactgcgatgacaacggacgacacagaagtgcccgctatgactctagcaccgggccacgccgctctggaaactcaaacgctgagcgctgagacctcttctagggcctcaaccccagccggccccattccagaagcagagaccaggggagccaagagaatttcccctgcaagagagaccaggagtttcacaaaaacatctcccaacttcatggtgctgatcgccacctccgtggagacatcagccgccagtggcagccccgagggagctggaatgaccacagttcagaccatcacaggcagtgatcccagggaagccatctttgacaccctttgcaccgatgacagctctgaagaggcaaagacactcacaatggacatattgacattggctcacacctccacagaagctaagggcctgtcctcagagagcagcgcctcttccgacagcccccatccagtcatcaccccgtcacgggcctcagagagcagcgcctcttccgacggcccccatccagtcatcaccccgtcacgggcctcagagagcagcgcctcttccgacggcccccatccagtcatcaccccctcatggtccccgggatctgacgtcactctcctcgctgaagccctggtgactgtcacaaacatcgaggttattaattgcagcatcacagaaatagaaacaacgacttccagcatccctggggcctcagacacagatctcatccccacggaaggggtgaaggcctcgtccacctccgatccaccagctctgcctgactccactgaagcaaaaccacacatcactgaggtcacagcctctgccgagaccctgtccacagccggcaccacagagtcagctgcacctgatgccacggttgggaccccactccccactaacagcgccacagaaagagaagtgacagcacccggggccacgaccctcagtggagctctggtcacagttagcaggaatccccttgaagaaacctcagccctctctgttgagacaccaagttacgtcaaagtctcaggagcagctccggtctccatagaggctgggtcagcagtgggcaaaacaacttcctttgctgggagctctgcttcctcctacagcccctcggaagccgccctcaagaacttcaccccttcagagacaccgaccatggacatcgcaaccaaggggcccttccccaccagcagggaccctcttccttctgtccctccgactacaaccaacagcagccgagggacgaacagcaccttagccaagatcacaacctcagcgaagaccacgatgaagcccccaacagccacgcccacgactgcccggacgaggccgaccacagacgtgagtgcaggtgaaaatggaggtttcctcctcctgcggctgagtgtggcttccccggaagacctcactgaccccagagtggcagaaaggctgatgcagcagctccaccgggaactccacgcccacgcgcctcacttccaggtctccttactgcgtgtcaggagaggctaacggacatcagctgcagccaggcatgtcccgtatgccaaaagagggtgctgcccctagcctgggcccccaccgacagactgcagctgcgttactgtgctgagaggtacccagaaggttcccatgaagggcagcatgtccaagcccctgaccccagatgtggcaacaggaccctcgctcacatccaccggagtgtatgtgtggggaggggcttcacctgttcccagaggtgtccttggactcaccttggcacatgttctgtgtttcagtaaagagagacctgatcacccatctgtgtgcttccatcctgcattaaaattcactcagtgtggcccagaggctgtctattgatctgcatgctttcgccatttttatagtacagggattgtgtatagtctcactgctacctcctccttctactcccccaggtcttggtttggactttgatgatagcatttactgagacgggcctggagcctgtcgaacagcccgctgcagcagggcagggaccacctttgttcatctcagtatcccctgaactagcagagtgtctggcctgcagtgggatcgcagagaatgtggaattgacctaaatttaaatttcaagttctggacacaagcctcaattattcctcttatatgttataacttacatgctattatttttttaaaaaattaatatggtttactttttattataaaagtaaaacttggccaggctcagtggctcacgcctgtaatcccagcactttgggaggccgaggccggtggatcacgaggtcaggagtttgagactagcctggccaacatggtgaaaccccgtctctactaaaaacacgaaaattagctgggtgtggtggcaggtgcctgtaatcccagctacccaggaggctgagacgggagaatcacttgaacccgggaggcagaggttgcagtgacccaagatcctaccactgcaccccagcctgggcaaaagggcaagactctgtctcataaataaataaatttaaaataaaagtaaaacttgtttatgatttcaaaattttgaaatattccaaagaccaagcaaagtaagaagtgggaagaggagaaagaaaaacttttctataatcccacctcttagatacaacgatttattttttaaaattgagacagggtctcactctcacccaaactgcagtgcagtggtgcgaccatggctcactgcagcctccacctcccagctccagtgatcctcccacctcagcctcctgaggagctgggaccacagctggctaatttttgtactttgttttgtaaaaaaggggctttaccatgttgagcaggttggtctcgatcttctgagctcaagcagtcctcctgcctcagactcgcaaagtgctgggattacagacatgagccactgtgcccagccttatatacagctattattattaatgtatactgtgtattcatttcaattcttaatctctccacttggatgttgatgaaatacatacctcacattcaacatttctttctttttttttttctttttgagatggaaaggagcctggctctgtcacccaggctggagtgcagtggcgtgatctcagctcactgcaagctccacctcttgggttcacgtgattctcctgcctcagcctcctgagtatctgggactacaggtgccaccaccatgctcggctaattttttgaatttttagtagagacggagtttcaccgtgtcagccagcctggtctcaaactcctgacctcaagtgatccacccacctcggcctcccaaagtgctgggattccagttaatgagcactgctcctggcctccacatttctaaaatcgaagttctgatcttttcctctggacctgccccacctgcatcttccccatctcagttaacgtcagttgcatccttcaggtgctcaggccgaaatcctcggcaccgtctttattcccctctcacattttgcaccaggaaattctgctggctctaaggccatcaaactgtgcccagaatgtggcccctcctcagcatctccagtgctaccaccgagatggtccacgatgccatcatctctcacctgcactactacaggtctccctgtttccagctcagcccccaccccagtctagtcccagtgtgtcagccagggctgtctttttacaacataaggcagaccacaccacttctttgctccaatcctcccatttcactcagaagaaaagctccgacaacagctgcaaagccgtgcacgacctgcgcccctcccctgcctccttaatttgctgactgcaccgcagccacacggacgtctttcttgtcccttgaatgcgctgggcctgctcttgccttgggacctttctgtgcattgcttagtctgctcagaagccttctcctctacatatccacttgtctaaaccctctacctccaccttcatgccccttctcagcgaggtctaccatgaccatgctgcctacaaattcagtctccccttctgtactttgacgtactttatagtgctgatcacaattgaacgtcatacatattttgttttctttattatctgagtcctccaactagaatgaaagattttgcccattatggtttccctagtgccaagaacagtacctggcacataccaggggctcagtaaacatttgttagatgaatgaaggaaacaaggagacaatgttgatgctgctgtgagcaaggggagtctgaacgtttgacagatcccttccatttctggagtggggcagaatgagtttcataaagtagctcggacaaaaataattcgctcatcttggcatatatgttgggcagctgccgcagaagagagactgagctatgtgccgtggaggattcaaatctgtctcttctcccagggattgaagttagacacgtacagcaataataagttgaaagaacttatttacaccgcatatagcaacaacaggatgcccttaatatatagagaactcttacagcgcaagaaaataaaaaggcaaacataccagtagaaaaatgggtaaatggcaacaggtaattcacaaaagaagaaatacaaatgtcctctcctcccgccaccaccccccatgaaaaagaacgtgtgacttcagtagcaaaaacaggtccattaatacagtgagatattgcttattgtatgtctgtactgatctatactgggtgctgggcaaacgggcattcttaaacactcctagtagggaagaaattggtacaacctttccggaggacaatttaactgatttatttaaagcccgaaaaatgtacatacctttaactcagcagtttcgttactgatttatcttaaggaagtaatttagaatctgtgcctaactgtttacaataactcatagatgaaaaaggcaaaacaaaacacaagtaacctcaaatctccccatgtaacagtttgcttaaacactatagcgttattttacgcaagctacagaagcattgttgaaacatatatttattaggacagaaaaaaattcatgaaatgttattttatcttcttttttcttaaaatggaacttaaaaaaaatttttttaactccaacctaccttttacaccatctgcagagctttcctctcccaaatcaaagctactcctgttcctacctccaggatggaatccccaccttcgtatgcaagggtcttcatgatatggcctcagccaactatcttagctccaggtcacggccccatcttccatatcctatgctgcttgcacaggaagcagctcgctaaccccaggcacacctgctttcatctggagcgtctgcccatcatgattcctccccctggtcccttcacctggaaaactcctattcattcctcaaagcccagttcagatggcacctctccatgacttcatcagattccctacagaggtgctgattttctggtctcttgtgtttctgttgtaacacttaacatgctgtattataatgtgcttattttatttacaagtttgttacattgtacgtgctcgaggacaagcagccggtagtattcacctctgtcatcacagaagctggcgtggagccctccacatgagggcactgatgtgtttgctgagtgactgggacaatggtgggccacgtgagccccgaaactttcagtgggctctgaaagttaagaaaagggcattcagtactgaaatcacacaaaacgtaaatttaatgatataattgttccgaagctgctctataatttggcatgaatggagagcagtttacaaaaatgacaacaccactgttatataaacccaattcttaaataggttttcttctcttgctttgtatttcctcaagtgggtgatacttaatacagtggctcatgtaatcttaattactacatatgaggacacggacatgtacatatgatgctgattactgttatttttggaagtaaaaaaattgtaaaatttg

SEQ ID NO: 446 - DNA, 1514 bp, Homo sapiens
  source 1..1514: mol_type = genomic DNA
agttcgatcggtagcgggagcggagagcggaccccagagagccctgagcagccccaccgccgccgccggcctagttaccatcacaccccgggaggagccgcagctgccgcagccggccccagtcaccatcaccgcaaccatgagcagcgaggccgagacccagcagccgcccgccgccccccccgccgcccccgccctcagcgccgccgacaccaagcccggcactacgggcagcggcgcagggagcggtggcccgggcggcctcacatcggcggcgcctgccggcggggacaagaaggtcatcgcaacgaaggttttgggaacagtaaaatggttcaatgtaaggaacggatatggtttcatcaacaggaatgacaccaaggaagatgtatttgtacaccagactgccataaagaagaataaccccaggaagtaccttcgcagtgtaggagatggagagactgtggagtttgatgttgttgaaggagaaaagggtgcggaggcagcaaatgttacaggtcctggtggtgttccagttcaaggcagtaaatatgcagcagaccgtaaccattatagacgctatccacgtcgtaggggtcctccacgcaattaccagcaaaattaccagaatagtgagagtggggaaaagaacgagggatcggagagtgctcccgaaggccaggcccaacaacgccggccctaccgcaggcgaaggttcccaccttactacatgcggagaccctatgggcgtcgaccacagtattccaaccctcctgtgcagggagaagtgatggagggtgctgacaaccagggtgcaggagaacaaggtagaccagtgaggcagaatatgtatcggggatatagaccacgattccgcaggggccctcctcgccaaagacagcctagagaggacggcaatgaagaagataaagaaaatcaaggagatgagacccaaggtcagcagccacctcaacgtcggtaccgccgcaacttcaattaccgacgcagacgcccagaaaaccctaaaccacaagatggcaaagagacaaaagcagccgatccaccagctgagaattcgtccgctcccgaggctgagcagggcggggctgagtaaatgccggcttaccatctctaccatcatccggtttagtcatccaacaagaagaaatatgaaattccagcaataagaaatgaacaaaagattggagctgaagacctaaagtgcttgctttttgcccgttgaccagataaatagaactatctgcattatctatgcagcatggggtttttattatttttacctaaagacgtctctttttggtaataacaaacgtgttttttaaaaaagcctggtttttctcaatacgcctttaaaggtttttaaattgtttcatatctggtcaagttgagatttttaagaacttcatttttaatttgtaataaaagtttacaacttgattttttcaaaaaagtcaacaaactgcaagcacctgttaataaaggtcttaaataat

SEQ ID NO: 447 - DNA, 253 bp, Homo sapiens
  source 1..253: mol_type = genomic DNA
atgaggatcttttactatctccattttctgtgttatgtgaccttcattctaccagccacatgtaccttggtgaatgctgatcgttgcaccaaacgttacggtcgttgtaaaagagactgtcttgagagtgaaaagcaaatagacatatgttccttaccaagaaaaatttgctgcactgagaaattgtatgaagaagatgatatgttttgaaaagaaaggcatacctctgaacaaagaagttacatgtgcacca

SEQ ID NO: 448 - DNA, 342 bp, Homo sapiens
  source 1..342: mol_type = genomic DNA
atgaaattattgacaaccatatgtagactgaaacttgaaaaaatgtactcaaagacaaatacatcttccacaatatttgaaaaggcccgacatgggacagagaaaatcagcacagccagaagtgaagggcaccatatcacctttagtaggtggaagtcatgtacagcgattggaggtcgatgtaaaaatcaatgtgatgatagtgaatttaggatttcatactgtgcaagacctacaactcattgctgcgtgacagaatgtgaccctacggacccaaataattggatcccaaaggactcagtagggactcaagaatggtaccctaaagactcacgtcattga

SEQ ID NO: 449 - DNA, 4411 bp, Homo sapiens
  source 1..4411: mol_type = genomic DNA
agggcctgtccctctcacttccactcgattgtaatttcatccccgggccggtcgagcctccctccctcccgcggccagcccttccctcccagtcggcctccttcgtcgcccccgcccccgcgaaaagccctgcagcttgcagccggcttcactcgcgcacgccgacctcccggctgcagtcctacctcttggaactacccgtgtttccgggcccagccctcgcagccccccacctcctcgccccggcccggggatccgttggggccgcgtcccccacgcgcccccggagacgccctttccgtgtgcgcccgggacttggtgaaactttgcaggcgccggctgcgaaatggatttaatccgaggcgtcttgctccggctcctgctcctggcttccagcctcggacccggcgcggtgtcgctccgagcggccatccgaaaaccaggcaaggtagggcctcctcttgacatcaagctgggcgcattgaactgtacggctttcagcatccagtggaaaatgccaaggcatcctggaagtcccatccttgggtacactgtcttttactctgaggttggcgcagataaatccctgcaggagcagttgcacagcgtgcctctcagccgggacatcccgaccacggaggaagtgattggagatttgaaaccaggcactgaatatcgtgtgagcatagcagcttacagccaggctggcaaagggcggctgagctctcctcggcatgtcaccactttgtcccaagattcctgcctgcctcctgcagctccccagcagccacatgtcattgtggtttcggattctgaggtggccctgtcttggaaacctggagcgagtgaaggaagcgcccctattcagtactattctgtggaattcatcaggccagatttcgacaagaagtggacctcaatccatgagcggatccagatggactccatggttatcaagggcctcgatccagataccaactaccagtttgccgtgagggcaatgaattcccatggccccagcccccgcagctggcccagtgacatcatccggaccctctgccctgaggaggcgggaagtggccgctatggaccccgttatatcaccgacatgggagctggtgaggatgatgaaggatttgaagacgacttagatttggatatttcctttgaggaggttaaaccacttcctgctaccaaaggagggaataagaaatttttggtggaaagcaagaagatgtctatatctaacccaaagaccatttctaggctcatcccccctacctcagcatctctccctgtgaccacggtggctccccagcccattcccatacagagaaaggggaagaatggtgtggccataatgtcaaggctctttgacatgccttgtgatgaaactctctgctctgctgacagcttctgtgtcaatgactacacctgggggggctcgcgatgccagtgcaccctgggcaaaggtggtgagagctgctcagaagatattgttatccagtatcctcagttctttggccactcctatgtaacgtttgaacctctgaagaattcttatcaggcatttcaaattactcttgaatttagggcggaggcagaggatggcttactgctctactgtggggagaacgaacacgggaggggggatttcatgtccctggctatcatccgacgctccctgcagttcaggtttaattgtggaactggggttgccatcatcgtaagtgagaccaaaatcaaactagggggttggcacacggttatgctctacagagatgggctgaacgggctgctgcagctgaacaatggcaccccagtgacaggccagtctcagggccaatacagtaaaattactttccggacacctctctatcttggtggcgctcccagcgcttactggttggttagagcaacagggacaaaccgaggctttcaaggctgtgtgcagtcgctcgctgtgaatgggaggagaattgacatgaggccctggcccctgggaaaagcactcagtggggctgatgtgggggaatgcagcagtggaatctgtgatgaggcctcgtgcatccatggtggcacctgcacagcaatcaaagccgactcctacatttgcctctgtccccttgggtttaaaggtcgacactgtgaagatgctttcaccttgaccattcctcagttcagagagtctctgagatcttacgctgcaactccctggccactggagccccagcattacctttccttcatggaatttgagatcacatttcggccagactcaggagatggtgtcctcctgtacagctatgacacaggcagcaaagacttcctgtccatcaacttggcagggggccacgtggagttccgctttgactgtggctctgggaccggtgtcctcaggagtgaagatcccctcaccctgggcaactggcacgagcttcgtgtatctcgcacagcaaagaatggaatcttacaggtggataagcagaagatagtggagggaatggcagagggaggcttcacacagattaagtgcaacacagacattttcattggcggagtccccaattatgatgatgtgaagaagaactcgggtgtcctgaagcctttcagcgggagcatccagaagatcatcctgaatgaccgaaccatccatgtgaagcatgacttcacctccggagtgaatgtggagaatgcggcccacccctgtgtgagagccccttgtgcccatgggggcagctgccggcccaggaaggagggctatgactgtgactgccccttgggctttgaggggcttcactgccagaaagcgatcatagaagccattgagatcccgcagtttatcggccgcagttacctgacgtatgacaacccagatatcttgaagagggtgtcaggatcaagatcaaatgtgttcatgaggtttaaaacaactgccaaggatggccttttgctgtggaggggagacagccccatgagacccaacagcgacttcatttccttgggccttcgggatggagccctcgtgttcagctataacctgggcagtggtgtggcatccatcatggtgaatggctccttcaacgatggtcggtggcaccgagttaaggccgttagggatggccagtcaggaaagataaccgtggatgactatggagccagaacaggcaaatccccaggcatgatgcggcagcttaacatcaatggagctctgtatgtgggtggaatgaaggaaattgctctgcacactaacaggcaatatatgagagggctcgtgggctgtatctctcacttcaccctgtccaccgattaccacatttccctcgtggaagatgccgtggatgggaaaaacatcaacacttgtggagccaagtaacaccagctggccttgtccaagggacagagccttctattctgagaatcccaggggccctcagaccctgcctgatgctatatgcagaggcccagggaccaggtgtgtttcctctcaccaagaagaaagtacacactgatgagaaactgagaaccaagacaggcatccctgggtggcctttcctgctgacactccacgagctgacccagcagaattctctgtgtaggaagcatcggactttgtccattgaatatgtagcggctgccagagatcacacatcaatgcaaattccagagcctgtctgctatagctcagtgactgtgttgtgattcatagtacattaaaaagagagagagagagaaagaatcccacagggcactattaaaatacttctctccttccctgactcatgacactcttcctgacagcagaatgactgtgtgaccttgaacttcacatttcccacattggcccttggattgttcggattaaccccttccactcctcactggctggttcactgtgttctgactagtccataaaaataaagatggaaggagatcaaacacagaatcataatcataatgcggcccccttccccagagcttacctcgaatgtgaaatccctacttcttataatgcagagttaaggagctgagcccccatgattttgtagctgtacttttgtatgtgtatatttttatagctgcagattgtccacacagtatacttttggaagtttgggtggatgactctgaattcttgcacacctttcctaaaaatttctcccaagagagacttgtttgggccttttgtggtgtcagtggaatggataggtaacttgggtgggcaacttggggagctgaccattctcttttggtaaatgttgacggctcaagaggatgaatatgaagctttccaagataagcagattaaaaggaacatgtgttaccgaggtaggtcactgtcatttttgttttaagagttggggggagtatctatagtaaacttgaataaaggggacaaagctagaactta

SEQ ID NO: 450 - DNA, 1607 bp, Homo sapiens
  source 1..1607: mol_type = genomic DNA
agtgcaatcacagctcactgcagccttgatgtcctgggctcaagtgatcagcctcccgaagtgctgggattacggcgtgagccaccactcccagccttcgagtgcttttgaggatgtctgtgagaggcatcctcaggctggggacccaggaatatcccagccctctggaccccgaggttggaccctactgtgacacacctaccatgcggacactcttcaacctcctctggcttgccctggcctgcagccctgttcacactaccctgtcaaagtcagatgccaaaaaagccgcctcaaagacgctgctggagaagagtcagttttcagataagccggtgcaagaccggggtttggtcgtgacggacctcaaagctgagagtgtggttcttgagcatcgcagctactgctcggcaaaggcccgggacagacactttgctggggatgtactgggctatgtcactccatggaacagccatggctacgatgtcaccaaggtctttgggagcaagttcacacagatctcacccgtctggctgcagctgaagagacgtggccgtgagatgtttgaggtcacgggcctccacgacgtggaccaagggtggatgcgagctgtcaggaagcatgccaagggcctgcacatagtgcctcggctcctgtttgaggactggacttacgatgatttccggaacgtcttagacagtgaggatgagatagaggagctgagcaagaccgtggtccaggtggcaaagaaccagcatttcgatggcttcgtggtggaggtctggaaccagctgctaagccagaagcgcgtgggcctcatccacatgctcacccacttggccgaggctctgcaccaggcccggctgctggccctcctggtcatcccgcctgccatcacccccgggaccgaccagctgggcatgttcacgcacaaggagtttgagcagctggcccccgtgctggatggtttcagcctcatgacctacgactactctacagcgcatcagcctggccctaatgcacccctgtcctgggttcgagcctgcgtccaggtcctggacccgaagtccaagtggcgaagcaaaatcctcctggggctcaacttctatggtatggactacgcgacctccaaggatgcccgtgagcctgttgtcggggccaggtacatccagacactgaaggaccacaggccccggatggtgtgggacagccaggcctcagagcacttcttcgagtacaagaagagccgcagtgggaggcacgtcgtcttctacccaaccctgaagtccctgcaggtgcggctggagctggcccgggagctgggcgttggggtctctatctgggagctgggccagggcctggactacttctacgacctgctctaggctagagtgcagtggtgcgatctcggctcgttgcaacctccatctcctggaatcaagcgattctcctgcctcagcctcccaagtagctggaattacaggcgcccgccaccacgcccggctaattttttatttttagtagagacagggtttcaccatgttggccaggctggtctcaaactcctgacctcaggttatccacccactttggcctcccaaagccga

SEQ ID NO: 451 - DNA, 3374 bp, Homo sapiens
  source 1..3374: mol_type = genomic DNA
gaatgcgcggtgactcaaaagtgctggccacgcgctcgttcatccaagcgcgaggggctgagttgggaacttggtttgcctcctggggctccggctcgtgcaatgtgcaaggcgggggtgcggaccgagagagcgcgcgtttcgggcagtccccgctggagacagcgcagtgggcgccatcggcctggggatggagatggtccactcaggcgggggtcggggggacgccaggagtggtgactccgggtccccgggggagcgtgccggggcggagcccaccgcgcggttctcccggcaccgccgagccgggcagaggccctggagcccaaggccccgcgcggccccacgccaagggcgccaggcctgcctaagagccgtggcgctgggaacccggctacccctgggccgggaacctgataaccagctccagcgcgagcaccaggggcgctcaaggtgaacgcgccgggcccggggtccgcccccggcgcggccccgccccggccccggccccggccccggccccgactttcgggcagccctgcccagtcccctgtcctggcccagcccctctccatcccagcgtgccgtgcgcggcggcggcgcgcgggcgcctggggcgggacttccggcgcgctggagcgttttccggccgtgcgtttgtggccgtccggcctccctgacatgcagccctctggaccccgaggttggaccctactgtgacacacctaccatgcggacactcttcaacctcctctggcttgccctggcctgcagccctgttcacactaccctgtcaaagtcagatgccaaaaaagccgcctcaaagacgctgctggagaagagtcagttttcagataagccggtgcaagaccggggtttggtcgtgacggacctcaaagctgagagtgtggttcttgagcatcgcagctactgctcggcaaaggcccgggacagacactttgctggggatgtactgggctatgtcactccatggaacagccatggctacgatgtcaccaaggtctttgggagcaagttcacacagatctcacccgtctggctgcagctgaagagacgtggccgtgagatgtttgaggtcacgggcctccacgacgtggaccaagggtggatgcgagctgtcaggaagcatgccaagggcctgcacatagtgcctcggctcctgtttgaggactggacttacgatgatttccggaacgtcttagacagtgaggatgagatagaggagctgagcaagaccgtggtccaggtggcaaagaaccagcatttcgatggcttcgtggtggaggtctggaaccagctgctaagccagaagcgcgtgggcctcatccacatgctcacccacttggccgaggctctgcaccaggcccggctgctggccctcctggtcatcccgcctgccatcacccccgggaccgaccagctgggcatgttcacgcacaaggagtttgagcagctggcccccgtgctggatggtttcagcctcatgacctacgactactctacagcgcatcagcctggccctaatgcacccctgtcctgggttcgagcctgcgtccaggtcctggacccgaagtccaagtggcgaagcaaaatcctcctggggctcaacttctatggtatggactacgcgacctccaaggatgcccgtgagcctgttgtcggggccaggtacatccagacactgaaggaccacaggccccggatggtgtgggacagccaggcctcagagcacttcttcgagtacaagaagagccgcagtgggaggcacgtcgtcttctacccaaccctgaagtccctgcaggtgcggctggagctggcccgggagctgggcgttggggtctctatctgggagctgggccagggcctggactacttctacgacctgctctaggtgggcattgcggcctccgcggtggacgtgttcttttctaagccatggagtgagtgagcaggtgtgaaatacaggcctccactccgtttgctgtgacgggtctgctgcagtcctcagtcgggggtcctgggcaccatgtgactccccatcctcccatgaggggtccctgccctggatgagtcctagctgggggacaccctgagagctcgagcccctcccacccgggcatccgctggctgcctcctgtcagctgggcaggcggggcccacagtacctgccccaccaggacagcctggctcaggcctttctgggctgcttctcacatcctgggctggatgtgggtttggaagctctggaaccatcccggactcgcccactcctggattcgagggccctcgcagggacagctctgcccagcatcaccccagggcctggcagtgatagagctgagagctccacccccacatacctgccacccacctggccagccacagcacgtgtgtcacctgcagagagccacccagacgtccccaccgagtccagcacggcaagggtgcaggggctgccctagaaatgggctcagaggagcctggcccaccctcttgaaactggtcctggaccttggctcagctctgccgcctcaggtagcacgacccccaggccagcctggacacatcagggagcatggtgaggggcaacggcaggacccgtgggccatatcgggacaggcatttccagcgaggggtggggcagaggacatgtggctggcaggctacacccaccctgccatgcagcggtgtccaggctctggggaggccctggggaatttggaggcatcatgagccaaggcctggtggccctcgttcccctgcccctcgtcaccatcctgtccttggctggccgtgaggactcccctcctcaccactgggtcccacagggctgaggtgggcagtagagggcataggtgggtacatgtcccgggcaaggtctctcggggggacagaagtgagtccagggagtgggtgggcctgggcgtccctcactcagaatgccgtggggtgaggacggtgaggacagggtgggcactgggttctggtttagagtcagtaatgttagggcgcagtgggcagggggtcaggacatctccagccggtggtgaggaagcatggtggggtctcctccacaggacgggagctggggagggggtcctgggtcggacccaaggcacccacacttgagaaagcctccgcctggacgtcagggaggcctgcgagctgccacagtgcaggtgcagccgttcccaccgccctgctgctgcttgacacgggcataggagatacaagtggtgtgtgcggcggttcatgcctgtaatcccagtactttggaaagccgtggcgggaggaacgctgggcaacatggtgaaaccccgtctctaccccctaaaaatagaaaaattagcaag

SEQ ID NO: 452 - DNA, 2166 bp, Homo sapiens
  source 1..2166: mol_type = genomic DNA
ccgggtctcagggcgcctggctgaagtgagcatggcttcagtggcctgggccgtcctcaaggtgctgctgcttctccccactcagacttggagccccgtgggagcaggaaatccacctgactgtgatgccccactggcctctgccttgcctaggtcatccttcagcagctcctcagagctgtccagcagccacggcccggggttttcaaggcttaatcgaagagatggagctggtggctggactccacttgtgtcaaataaataccaatggctgcaaattgaccttggagagagaatggaggtcactgctgtcgccacccaaggaggatatgggagctctgactgggtgaccagctacctcctgatgttcagtgatggtgggagaaactggaagcagtatcgccgagaagaaagcatctggggttttccaggaaacacaaacgcagacagtgtggtgcactacagactccagcctccctttgaagccaggttcctgcgctttctccctttagcctggaaccctaggggcaggattgggatgcggatcgaagtgtacggatgtgcatataaatctgaggtggtttattttgatggacaaagtgctctgctgtatagacttgataaaaaacctttaaaaccaataagagacgttatttctttgaaatttaaagccatgcagagcaatggaattctacttcacagagaaggacaacatggaaatcacattactctggaattaattaaaggaaagcttgtcttttttcttaattcaggcaatgctaagctgccttccactattgctcctgtgaccctcaccctgggcagcctgctggacgaccagcactggcattccgtcctcatcgagctcctcgacacgcaggtcaacttcaccgtggacaaacacactcatcatttccaagcaaagggagattccagttacttggatcttaattttgagatcagctttgggggaattccgacacccggaagatcgcgggcattcagacgtaaaagctttcatgggtgtttagaaaatctttattataatggagtggatgttaccgaattagccaagaaacacaaaccacagatcctcatgatgggaaatgtgtccttctcatgtccacagccacagactgtccctgtgacttttctgagctccaggagttatctggctctgccaggcaactctggggaggacaaagtgtctgtcacttttcaatttcgaacgtggaacagagcaggacatttgcttttcggcgaacttcgacgtggttcagggagtttcgtcctctttcttaaggatggcaagctcaaactgagtctcttccagccgggacagtcaccaaggaatgtcacagcaggtgctggattaaacgatgggcagtggcactctgtgtccttctctgccaagtggagccatatgaatgtggtggtggacgatgacacagctgttcagcccctggtggctgtgctcattgattcaggtgacacctattattttggagctctctacgagcagtcttgtgaagcccacaagcaccgagggaacccgtctgggctttactatattgatgcagatggaagtggccccctgggaccatttcttgtgtactgcaatatgacagacgccgcgtggacggtggtgcagcacggtggccccgacgcggtgaccctccgaggtgcccccagcgggcacccgcgctcggctgtgtccttcgcgtacgcagcgggcgcggggcagctgcggtccgcggtgaacctggcggagcgctgcgagcagcggctggctctgcgctgcgggacggcgcggcgcccggactcacgagatggaaccccactgagctggtgggttggaagaaccaatgaaacacacacttcctggggaggttctctgcctgatgctcaaaagtgtacttgtggattagaggggaactgcattgattctcagtattactgcaactgtgatgctggccggaatgaatggtgatttccacatgatttccctgcacaaaaatgtggtttttattctttaattatgcatagttaattaaatgtcagacaagctggtacaataaggtaactaaagtatgttcaagcaagctgaaatacaagttttgatgaaatatgatcagttaatctaaggattaaattttatgaccaaag

SEQ ID NO: 453 - DNA, 3649 bp, Homo sapiens
  source 1..3649: mol_type = genomic DNA
attttctttcgctgtaccttactgccttgctcgctcctgccctcactcctgcgatggtttctttggcagctcagtcgtagcgtttaagtctggtcctatgaaggcctttctgttactccacggtcttgggcagtttgcgttggctctaactcttaccacagaattgcagaaattcctctctttattgagggcaccgctagcacctgccccccgaccctggttctgttttgtgaaatactgcctgctttgcttatccactgcagttaacttttggagttacccatatttcatctctttgacatggactcccatacggagtgaccttgtatcctaggttgccagagagagagttctggcttataccattgtcccagcataatcactttcaaaagattcatggtttgtatgatcaagtttgtctctgtctctaagtgagatacacttaatatttgtagttaagagagtggcacgtggcagcccacgtgagacttgcacgggggcccacagatgtcagagccacagactaggaaatgagaattcctccaggtcagtgctcatatgcctcatgtaggtagagagctttgggtggctttgcccttagagggcaggggatcccctcccaccctggcacagaaagtccaagctaatactgagagctatgtctagtcaaattcatccccatagttactgtggggcgtcaaagccagggcccctaaattcactgtcatgatccagaagaaggtgttcagagttcaagcccagctccttgacatggcatctggctcctgggaaagtaactgatgtggaagtgtgaccagtgttaggcctaaggggtcctgggcttccccaggaaccagagaactcagtccatgcagggccagttagttttaaagactgcatatcagcacttataacggtcctaggattaggctaagaggtagaacactggttatccactaggatgaccaaccatcttagtttgcctgggattgaggggtttcctaggacatgggacttgcagttttaagaccagaaaactcctgggcgaactgggatgagttggtcaccctcttctcaaccctggctgcacgttagactctcttgaggagcctctcatttagagtctaatttaattgattcaggtagttgtattttttttaacgctctgaggttgattccaacaagctaccacagttgagaactactaggctgtagacagtgtttccaataaccattgaagatgtttggtttttgagcagaagtggaccgagacgtccctgaaaggggtgtatgactctgtgcgttggtctttcgccttagcaagagggatatcaagctggcagttgcctactattgctattatctgtccccaccgccaggccttctttctcattggtgaggaccaagctttctcttttcccggcatgctccgataccctctccctgaagacaggaggtcagtggaattgcctcattttgattggtggaatcatgatttacacagttgtagatgaagctggcatgagacttgatacaggactgccatctctaggtctgggacatgtgccccggagactggtggtctagaggctaactgtgagactgtgtgtgctttggctttgcccggtggggtgtgggagcttggagaccaggtgcttctgggactgtcctctctgcaggcctccaggatcatgtggtatgtcagcaccaggggcgtagccccacgggtcaactttgagggggccctcttctctggctatgcacctgacgggggcctctttatgcctgaagagctcccacagttggacagagggaccctgtgccagtggagcacactctcctatcctggcctggtgaaggagctgtgtgccctcttcattggctctgagctccttccaaaagatgaattaaatgatctgatcgaccgagccttcagcagattccgtcacagagaagtggtccatctgtccaggttgaggaatgggctgaacgtgttggagctgtggcatggcgtcacatatgcatttaaggacctgtccctgtcctgcacaacacagttcctgcagtacttcctggagaagagggagaagcacgtcactgtggttgtaggaacatctggggacacaggaagtgctgccattgagagtgttcaaggggcaaagaacatggacattatcgttctgctgcccaaaggtcactgcacaaagattcaggagctccagatgacaacggtgctgaagcagaacgtacatgtgtttggagtggagggaaacagcgatgagctcgatgagccgatcaagactgtgtttgccgatgtggcttttgtcaagaagcacaatctgatgagcctgaattcgatcaactggtcccgggtcctggtgcagatggcccatcacttctttgcttacttccagtgtacgccatccttggacacacatcccctacccctggtggaggtggttgtgccaacaggggctgccggtaaccttgcagctgggtacattgctcaaaagataggcctgcccatccgtctggtcgtggcagtgaaccgcaatgacatcatccacaggactgtccagcagggagacttctctctctctgaggctgttaaatcaaccttggcatcagctatggacattcaggtgccctacaacatggagagggtgttctggctgctctctggctctgacagccaggtgacaagagccctcatggagcagtttgaaaggacccaaagtgtgaatctgcccaaggaactgcacagcaagctttcagaggcagtgacatccgtgtcagtgtcggatgaagccatcacccagaccatgggccgctgctgggatgagaaccagtacttgctgtgcccccactcagcggtggccgtgaactaccattaccagcagatagacaggcagcagcccagcactccccggtgctgcctcgcccctgcctctgcagccaagttcccggaagctgtcctggctgctggcctgacccctgagactcccgcggagatcgtagccctggagcacaaggagacacgctgcaccctgatgcggagaggtgacaactggatgctgatgcttcgggacaccattgaggaccttagccgacagtggaggagtcatgccctcaacacctcccagtagcctggctggaggtggctttctttaggcttcagatcccaggaagatgcaccttctgagctgccttgtgcaccctccccattaagcgtaggttaggaggtttccgggaggctgctcagctggatctggagccagctggctttgctccgttccctggctagtctgtgcctggtcaccagggaggctgagtgaggggctgtgaacagttgccggaagcaccccctccctccccggcccgtgcagcagtgtctgagctgtagtgaaagtttcagggcctgcaaaagaagaggcttgggcacaggactgaccatggctccaggggtttaggaccccagacctgtgaaggtgggagcagctcaccaccttcacgcaggctttgtatgttctctgagccttagttgattttggcccccaaaccaaatccaaaggttctggcccaccttgtcagaggcttccaccctgctcacatgttgggaatccctggaataaaatgcttgttcagtgtg

SEQ ID NO: 454 - DNA, 614 bp, Homo sapiens
  source 1..614: mol_type = genomic DNA
ttctttatatgtctggtagaatttggctgtgaatccatctggtccagggccttttctggttggggctccatggttcctagaggcaaggaagaagagccaccagtcaaataggtttcagcacctccaactccaacatcttcaaagcagcgactgggaagaaaaataatccttctgacaacacatattcagacacatatggtcagcctcatgaagctctggatacccatgctcatgacattcttctgtacggtgctactgtctgtgctgggagaaatgaggaagaaaagatatgacaggaaggaattgttacttgaagaatgctggggaaagccaaatgtcaaagaatgtaccaataagtgttctaaagcctttagatgtaaagacaaaaattacacatgctgctggacctattgtggaaacatctgctggataaacgtcgaaaccagtggagattactaaaaccgtagcttcccaccaggctgccacctgtgtgggctgggaaatgtttaagaggtctcatagtagtaccctgtggctacttttaggaacaccagtctatttttactgagagctggacaacagcaaacacttgacaaataaacttatttaccagt

SEQ ID NO: 455 - DNA, 730 bp, Homo sapiens
  source 1..730: mol_type = genomic DNA
agtcatgcgttttatggcaggccctgcagggagccagagtctgggtcccctgtgcttccacagcagcccccaagccctctacacggtcctcttaatagtgctggtcatgatgagcttggtgtttggtaagtttgttcctgtcaattgggaaccccctcaaccacttccattccccaaatacctgcgctgctaccgatgcctcttggagaccaaggagttagggtgccttctgggatctgacatctgcctcaccccagctggcagcagctgcatcactctccacaaaaagaacagcagcggttctgacgtcatggtgagtgactgccgaagtaaggagcagatgagtgattgttcaaatacccgaacttctccggtgtctggcttctggatattctctcaatactgcttcctggatttctgcaatgaccctcaaaacagagggctctatactccttagtgtgactgcagcaaactttggtgtaaaattccaccagtttccagccaccttcctgacttctatctgggcttggccaggacttctagtccctcacaccagccctccttgcctccctccagccactggaccccagccttggctcttcctcttggttgacgcccttcagcacacttactgctactctgtacccccagccctactgcccaccaggtttcctctcttgtcccctagtccctggatgtttctcccaaataaatttgtgtgtaaactgtt

SEQ ID NO: 456 - DNA, 3187 bp, Homo sapiens
  source 1..3187: mol_type = genomic DNA
gcgggggaccgcgcccggggatcctgcaggggcgggaagggggctcgggctccttgcttccgccgcagtggggcgctgccgggctccccggcactagcgctgctggcggccccggcggccgggcgtgctgcctgcaagatgtccgtgcgccgcggccggcggccggcgcggccggggacccgcctctcctggctgctgtgctgcagcgccctgctgtccccggccgcgggctacgtgatcgtgagctccgtgtcttgggccgtcaccaacgaggtggacgaggagctggacagcgcctccactgaggaggctatgcccgcgctgctagaggattcgggcagcatctggcagcaaagcttccccgcctctgcccacaaggaggacgcgcacctgcggccccgggcgggcgccgcccgggccaggccgccccccgcgccacccgggatgttctcctaccggcgcgagggcggccagacggccagtgcgcccccgggccctagactgcgcgccgccaccgcccgctccctggcccatgccagcgtctggggctgcctggccaccgtgtccacccacaagaagatccaaggactgccatttgggaactgcctgcccgtcagtgatggccccttcaacaatagcactgggattcctttcttctacatgacagccaaggaccccgtggtggctgatctgatgaagaaccccatggcctcgctgatgctgccagaatcagaaggggagttctgcagaaaaaacatcgttgatccggaagatccccgatgtgtccagttaacgctcactggccagatgatcgcagtgtctccagaagaagtagaatttgccaagcaagccatgttttcaaggcacccagggatgaggaagtggcctcgtcaatatgaatggttctttatgaagatgaggatagaacatatctggcttcagaaatggtatggaggcgcatccagtatttcaagggaggaatatttcaaagcagttcccagaaaggcctgatggagtgagaagaaagtccttggtgtttgcacttaaatgaaaaccttttcagtgatgcagccagacagctattgaccactgtctctttgttgaagggttcatagcagccctgccatccctgcagcagaatgagagagggtgaacagggaactctatgctagatttgagattaaagtggtcatttgcagatctccaactcacacagatacttcacgtagatagtctttattccattgtattcaatccagactcatcgattcagaaatcatataatagctggtggtcaaaatgacatgttgagatcattgttgtttcattgtttaaggaaaaaaaaaaatgcctgtacctacaatgtgattgctttgtattgtgagagtatctttgttgcttgctctgccaaatgcagtcttggttctaagttcactgtgaccacgaagcagctgactgtgcatcacgcagtcacaatattgtttttagggtgagggtggaggactgtgtgtccgtggattactcctcctgctggtggattgcagatgcattattaggtcatactggctagaatgcagcttttctcccaccataacatgaaaacagtgtaagaacatagggtgctttgtgcatagcccttctctatgtaagcagccatggcagtcattaaagagaaaggagtagctttgacattaagctccccagatccctgctgctcatacttctggcaagggttcccctctctcatgcatgaacaggggcatccaaaataagaagctctccattctgtggtggggaaagcggagaggggagtgggtgaagctgggaaagtaaaggcagcacgttacagaaggaagaaaggaagccagtaactgagggcccactgcctgcccggccctgggccaggccctcaacagaagccatctcatttaagccctgcaaccaatgagatgcacgtcatcattggctcttacagacaagaaaactagactcagaggggctgagtccacatcccagacagctcactgcagacacaggtggagtggttcctacaagacatccagttttaacaacaaaagagttattgaaatgcatgggtagaaattgaaccaggaaaatcagtaaagtgattgtaaaaaagaaggactagcttgcctggagatgatgtttcttgcttttggaaaaaaaaaaaaagtctctgaaatttgattcttactacagatttaaaactttctacatattatatgtaggagctcctagtgtttttgagaaattagactgtacctgtgtacacttctaaggtctacatggacctatgtatatatatctaagacctctgatcattaaaacctataaagggttgagctgtcccaagttttctgtctttctgtaatggctacaaactttctttggtaggttagggaggttgtataacataaaaaacacatcactatatgtaggaaatatacatttttcaagtaaataagagtgttattaatgattatgaacttttgcttaacaaaataacatacgacgagagcttgagttgtcaaaatatattttaattatctattgctaaaaacatagtaagatgcagagaattctttatttgtcataagccagtcctcaaaagagttcctaacagtagtgatttctaatatataagaataaggtacttctgagggaattttatattttcagagtttaaaattattgctactcccaatttagaaaaatggggagaaagctggaagaacaaatgacatgctcaaatgtattgcataagtcaacctcacaccttaatactgggagcttctctgcctcctgatcctgtcttgcagataaggtcccctggctaggtttgcgtttatagtcaggttccatttagctcattaaaggtcactgctgcttcaaaggactttgcccagtggatgccattcataaccactgatgaatgttatcagctatttatccaaattacaggaaatgaaacctgaaaaggttgggtaagaatagtgttgaaaattcacagttttaagtttgatggtctccattcaggcaagtgtgtttcagcaaatctctagaaatttacattgattaaaatgttagaggctgttctggaagttctagacatggcaataaggcaagaaaaagagattaaatgcatacagatcgaaagaaaaaaaaa

SEQ ID NO: 457 - DNA, 4148 bp, Homo sapiens
  source 1..4148: mol_type = genomic DNA
cctttggttctgtttcacagttctcagcctcccctccctttctccacagccaggctgctcagtccctctctgcgggggcctagaggctcggtgaggggagcgggacttggttgccatggtcacattgaagccagccgcagctggcccgggcagctgctcctcctgggcccggggccccggacgctcggacaaagccaggcagcgttggcagccccagacccgaccccaaaggcctgagactggggtgactgggacctaagagaatcctgagctggaggcccccgacagctgctctcgggagccgcctcccgacacccgagccccgccggcgcctcccgctcccggctcccggctcctggctccctccgcctcccccgcccctcgccccgccgccgaagaggccccgctcccgggtcggacgcctgggtctgccgggaagagcgatgagaggtgtctgaaggtggctattcactgagcgatggggttggacttgaaggaatgccaagagatgctgcccccacccccttaggcccgagggatcaggagctatgggaccagaggccctgtcatctttactgctgctgctcttggtggcaagtggagatgctgacatgaagggacattttgatcctgccaagtgccgctatgccctgggcatgcaggaccggaccatcccagacagtgacatctctgcttccagctcctggtcagattccactgccgcccgccacagcaggttggagagcagtgacggggatggggcctggtgccccgcagggtcggtgtttcccaaggaggaggagtacttgcaggtggatctacaacgactgcacctggtggctctggtgggcacccagggacggcatgccgggggcctgggcaaggagttctcccggagctaccggctgcgttactcccgggatggtcgccgctggatgggctggaaggaccgctggggtcaggaggtgatctcaggcaatgaggaccctgagggagtggtgctgaaggaccttgggccccccatggttgcccgactggttcgcttctacccccgggctgaccgggtcatgagcgtctgtctgcgggtagagctctatggctgcctctggagggatggactcctgtcttacaccgcccctgtggggcagacaatgtatttatctgaggccgtgtacctcaacgactccacctatgacggacataccgtgggcggactgcagtatgggggtctgggccagctggcagatggtgtggtggggctggatgactttaggaagagtcaggagctgcgggtctggccaggctatgactatgtgggatggagcaaccacagcttctccagtggctatgtggagatggagtttgagtttgaccggctgagggccttccaggctatgcaggtccactgtaacaacatgcacacgctgggagcccgtctgcctggcggggtggaatgtcgcttccggcgtggccctgccatggcctgggagggggagcccatgcgccacaacctagggggcaacctgggggaccccagagcccgggctgtctcagtgccccttggcggccgtgtggctcgctttctgcagtgccgcttcctctttgcggggccctggttactcttcagcgaaatctccttcatctctgatgtggtgaacaattcctctccggcactgggaggcaccttcccgccagccccctggtggccgcctggcccacctcccaccaacttcagcagcttggagctggagcccagaggccagcagcccgtggccaaggccgaggggagcccgaccgccatcctcatcggctgcctggtggccatcatcctgctcctgctgctcatcattgccctcatgctctggcggctgcactggcgcaggctcctcagcaaggctgaacggagggtgttggaagaggagctgacggttcacctctctgtccctggggacactatcctcatcaacaaccgcccaggtcctagagagccacccccgtaccaggagccccggcctcgtgggaatccgccccactccgctccctgtgtccccaatggctctgcgttgctgctctccaatccagcctaccgcctccttctggccacttacgcccgtccccctcgaggcccgggcccccccacacccgcctgggccaaacccaccaacacccaggcctacagtggggactatatggagcctgagaagccaggcgccccgcttctgcccccacctccccagaacagcgtcccccattatgccgaggctgacattgttaccctgcagggcgtcaccgggggcaacacctatgctgtgcctgcactgcccccaggggcagtcggggatgggccccccagagtggatttccctcgatctcgactccgcttcaaggagaagcttggcgagggccagtttggggaggtgcacctgtgtgaggtcgacagccctcaagatctggttagtcttgatttcccccttaatgtgcgtaagggacaccctttgctggtagctgtcaagatcttacggccagatgccaccaagaatgccaggaatgatttcctgaaagaggtgaagatcatgtcgaggctcaaggacccaaacatcattcggctgctgggcgtgtgtgtgcaggacgaccccctctgcatgattactgactacatggagaacggcgacctcaaccagttcctcagtgcccaccagctggaggacaaggcagccgagggggcccctggggacgggcaggctgcgcaggggcccaccatcagctacccaatgctgctgcatgtggcagcccagatcgcctccggcatgcgctatctggccacactcaactttgtacatcgggacctggccacgcggaactgcctagttggggaaaatttcaccatcaaaatcgcagactttggcatgagccggaacctctatgctggggactattaccgtgtgcagggccgggcagtgctgcccatccgctggatggcctgggagtgcatcctcatggggaagttcacgactgcgagtgacgtgtgggcctttggtgtgaccctgtgggaggtgctgatgctctgtagggcccagccctttgggcagctcaccgacgagcaggtcatcgagaacgcgggggagttcttccgggaccagggccggcaggtgtacctgtcccggccgcctgcctgcccgcagggcctatatgagctgatgcttcggtgctggagccgggagtctgagcagcgaccacccttttcccagctgcatcggttcctggcagaggatgcactcaacacggtgtgaatcacacatccagctgcccctccctcagggagcgatccaggggaagccagtgacactaaaacaagaggacacaatggcacctctgcccttcccctcccgacagcccatcacctctaatagaggcagtgagactgcaggtgggctgggcccacccagggagctgatgccccttctccccttcctggacacactctcatgtccccttcctgttcttccttcctagaagcccctgtcgcccacccagctggtcctgtggatgggatcctctccaccctcctctagccatcccttggggaagggtggggagaaatataggatagacactggacatggcccattggagcacctgggccccactggacaacactgattcctggagaggtggctgcgcccccagcttctctctccctgtcacacactggaccccactggctgagaatctgggggtgaggaggacaagaaggagaggaaaatgtttccttgtgcctgctcctgtacttgtcctcagcttgggcttcttcctcctccatcacctgaaacactggacctgggggtagccccgccccagccctcagtcacccccacttcccacttgcagtcttgtagctagaacttctctaagcctatacgtttctgtggagtaaatattgggattggggggaaagagggagcaacggcccatagccttggggttggacatctctagtgtagctgccacattgatttttctataatcacttggggtttgtacatttttggggggagagacacagatttttacactaatatatggacctagcttgaggcaattttaatcccctgcactaggcaggtaataataaaggttgagttttccac

SEQ ID NO: 458 - DNA, 686 bp, Homo sapiens
  source 1..686: mol_type = genomic DNA
ggaaaatgtaggctaccagtagaaaatgacattctctattaataagatctgaggtgcgacacacataattgtcccaatttttaagattgatggggagcatgaagcatttttttaatgtgttggcaggccccattaaatgcataaactgcataggactcatgtggtctgaatgtattttagggctttctgggaattgtcttgacagagaacctcagctggacaaagcagccttgatctgagtgagctaactgacacaatgaaactgtcaggcatgtttctgctcctctctctggctcttttctgctttttaacaggtgtcttcagtcagggaggacaggttgactgtggtgagttccaggaccccaaggtctactgcactcgggaatctaacccacactgtggctctgatggccagacatatggcaataaatgtgccttctgtaaggccatagtgaaaagtggtggaaagattagcctaaagcatcctggaaaatgctgagttaaagccaatgtttcttggtgacttgccagcttttgcagccttcttttctcacttctgcttatacttttgctggtggattcctttaattcataaagacatacctactctgcctgggtcttgaggagttcaatgtatgtctatttctcttgattcacttgtcaataaagtacattctgcaaaagca

SEQ ID NO: 459 - DNA, 659 bp, Homo sapiens
  source 1..659: mol_type = genomic DNA
acaagtggggcatctgtaggggccacagtgagctctcaatgatcatctgtagtggcagcaaaagagttcgagccccacttcaaacaacttcataataaaaggccagacaaaagagctgtcagccagttactacagacactcaatgcagacaccttcagagtattgggaaaagacttgccttctgccagaacttaacccaaatacacacagagagcaccatgaagccctggattcttctactcgtcatgttcatctctggagttgtgatgcttctgcctgtgctgggaagcttctggaacaaagatccctttctagatatgataagagaaactgagcagtgctgggtacagcctccatataagtactgtgagaaaaggtgtactaaaataatgacttgtgtacgtccaaatcatacatgctgctggacctactgtggaaacatctgcttagacaacgaagagccccttaaatcaatgctaaacccctagattctattggccgatcactactgtgggctgaaggatgaccatctggtctaagaagagtgctgcctacttccttcttgggacacccactggctctagctggtaacctttctgctatttccttgacctctttaccctgaagcttttgtcaaataaactgctacatcaacctga

SEQ ID NO: 460 - DNA, 597 bp, Homo sapiens
  source 1..597: mol_type = genomic DNA
atgctgccttgcctcgccctgcttctcctgatggagctgtccgtgtgcactgtggcaggtgatggtggagaggaacagacactcagcactgaagcagagacctgggaaggcgctggccccagcattcagctccagctgcaggaggtgaagacgggcaaggcaagccagttctttgggctgatggggaagcgagtgggaggaagacctctgatccagccaaggagaaaaaaaggcagagaggatgaggcccaaggttcagagtaaaagcccccaccacagacttcccagaggacacggtgccgcttcttcctacctggatgtcacagctgacaagccggcaggccaactctcttctctgtgtctcctgtcctcatcgctggcacttcacacaaggcccacactgaacccactgggcttcttcctggactctcagtgtcaagcagcagtcctgcataaatgcacagcttcgccgtagcaagctgcactgactctgccctccctcacactcagagttggcatctcactgcacagcagtgaggagactcgcacactctgtatcctgtgcctagcacacagtaggcactcaataaatgagtg

SEQ ID NO: 461 - DNA, 2333 bp, Homo sapiens
  source 1..2333: mol_type = genomic DNA
gtccctagagacagcctggaaagattgggtgccagctgcagagaggagagcaaggcgaccaaacgcagggtaaggtctggaggtgctcatagttcactacgggacatgtacatggaagtgaataattatgtcacaaggtgccaagggggctagttacctcacataggatcttagaaaaggtctcctggagaccatgtctgagctggtcctgaggtgtgagtagggattctccgcagggcggggaaggacttgaaagagtctggcaatatggagcacatcaggattatggaaggtgagcttggagaacaaggcagagtctagcctgtgaaaggcctcttgcaatttgttgaggatccatgaccttctcccatgcatggtgaaatgcccttaaaggattttgaatagatttaaaagacactcaaaaacaaaaaacggtagattcaaaatagacggtagggatcgctttcttccgttttctttgaaggatcagaagtgtttaccaccacctggattgtttttgggctttcagctgtggctgcctgcagcccatcctgcccccagcacctagagtcatctttagaaatgcaagcctgatcgtggaatccaccttcctaacacccttcagtgccctcctcttcgttacacccttactatacaaacgatagtccatggaccagcagcatcaacataaccagggagcttgttagaaatgtagaatctggtccatcccaaacctgacgaagcagaagctgcattttgccaagatcccagggaatttgtgtgcccgttatggtttgcgaagtgcttcccaagagaacatacggcaagccagagggatctttgcagatcttgctcctttcattctctggcctcatcttgtcgctctcctccatccgtgcccacatccccactgtactggaccgcttgcagctccttgaatgcagcatagtcttgttttcttttttgcagtgattctacatctttcccatcttctccacctggatgcctccatccatcctttcagacttcccttctctagcaaacctttcttgctaattcccatgtctaacacaacacttccccatactgcatggccattatcctttctgcatcagactgtgagcaccttgaaggcagtggcagtgactcattcattgtggcatctgcagattccagtggactgccaggcatgcaatagaaaatcaaaaaagatttactgctaaataatcctcaactccagtggcagctccatgtgccatttctcttccgctctggcctcggctcttcctgtgcctacctggggcttggctttcacctaggtgtctgcatggaagggagagcgacctggaggaccatcgccaatccatcaatagcctcccggttgagatgacttcagctctgatttggaagagctatgatattgtttataggagtgaattaatatgtgtaaaggttacaaagtaaacagttaaattaaattaattgtgctggagcaggtcaaacaggcttctgagagatgaacatacacatctctattaactccacattcagtgagtgtgggtaacttgaaattggctgggtcaccatttacatcatagaaattggcaaatagtacaaattagggctccctcacccctactcgggcatagagctggtacactagcacacctctggttatacatgcatgcgtgtgccaccagaacaaaacacctaacagcaggcacgttgcctctgttgcccaccattacagctcccgcacggagcagacagactcatggcaggaattgaatgcatgtttgtcgagtggaagcatgaacaaatccacaaaatgcccaagatgaggcaaagaaggacattggctcaaatgttaaacataagttaggagctgagataatgcccagaggaaaaatgttctgtaattctaagtaaaacccatctctaaggcaggatgctgcttatgagggctccacagacagatgggggaggcctgggtcctgcccttggaaagagtctgacagctcgacttctggaaacagccatctgcacaggtcaacatcttcttagctgacagggagcagatttgcagaccacatcacatttgaaattccagaagaaacttcttggagtctgctcttgtgcaaatgagcctagaaagcccgttaactttgggtggaggcttccactgtttggctatcccaagtgggcccaaagctaaggaaaacccaccagccctttgcttcctgcttcctctatttgtttgccccaggaaatcagaggtgatgacatgatttggcttgggcacgacaggaataaacgatatttaagagacgtca

SEQ ID NO: 462 - DNA, 612 bp, Homo sapiens
  source 1..612: mol_type = genomic DNA
ggcttgcagtgctcttggcagacatgaggcaacgattgctcccgtccgtcaccagccttctccttgtggccctgctgtttccaggatcgtctcaagccagacatgtgaaccactcagccactgaggctctcggagaactcagggaaagagcccctgggcaaggcacaaacgggtttcagctgctacgccacgcagtgaaacgggacctcttaccaccgcgcaccccaccttaccaaggggatgttccactgggaattagaaataccatctgccgtatgcagcaagggatctgcagactttttttctgccattctgggacaggccagcagcacagacaacgctgtggataaggagagtagagacttcctcttcctgcctcctgtcttctggagttgtgaccgcagggtggcccaggtggatcggcttcagaggccaggaggcagctctctgcagccgaagagcaggagcctcacccacggtctgtggctctgactaagcctggactgcctctcggctgtgctccgtggactggctccccagggatccatgtgagagaccggagtatgatcctcagtgcgaggacaaataaaagtagtgattatgtccacccca

SEQ ID NO: 463 - DNA, 1024 bp, Homo sapiens
  source 1..1024: mol_type = genomic DNA
gattctcgcctcgccgcagcccagccctgcgcgccttgcccggcggcccccgcccggccgctccgggcccctggccccgcggagcgatgctgctgctggctgccgccttcctcgtggccttcgtgctgctgctgtacatggtgtctccgctcatcagccccaagcccctcgccctgcccggggcgcatgtggtggttacaggaggttccagtggcatcgggaagtgcattgctatcgagtgctataaacaaggagcttttataactctggttgcacgaaatgaggataagctgctgcaggcaaagaaagaaattgaaatgcactctattaatgacaaacaggtggtgctttgcatatcagttgatgtatctcaagactataaccaagtagagaatgtcataaaacaagcacaggagaaactgggtccagtggacatgctggtaaattgtgcaggaatggcagtgtcaggaaaatttgaagatcttgaagttagtacctttgaagtgaagccatataatgtctacatcacagttgcttacccaccagacacagacacacctggctttgccgaagaaaacagaacaaagcctttggagactcgacttatttcagagaccacatctgtgtgcaaaccagaacaggtggccaaacaaattgttaaagatgccatacaaggaaatttcaacagttcccttggctcagatgggtacatgctctcggccctgacctgtgggatggctccagtaacttctattactgaggggctccagcaggtggtcaccatgggccttttccgcactattgctttgttttaccttggaagttttgacagcatagttcgtcgctgcatgatgcagagagaaaaatctgaaaatgcagacaaaactgcctaatcttcttaccccttggaagaagactgtttccaaataatttgaacagcttgctgctaaatgggacccaatttttggcctatagacacttatgtattgttttcgaatacgtcagattggaccagtgctcttca

SEQ ID NO: 464 - DNA, 2283 bp, Homo sapiens
  source 1..2283: mol_type = genomic DNA
atgaggtggattctgtgctggagcctcaccctctgcctgatggcgcagacggccttgggtgccttgcacaccaagaggcctcaagtggtcaccaaatatggaaccctgcaaggaaaacagatgcatgtggggaagacacccatccaagtctttttaggagtccccttctccagacctcctctaggtatcctcaggtttgcacctccagaacccccggagccctggaaaggaatcagagatgctaccacctacccgcctgggtgcctgcaggagtcctggggccagctggcctcgatgtacgtcagcacgcgggaacggtacaagtggctgcgcttcagcgaggactgtctgtacctgaacgtgtacgcgccggcgcgcgcgcccggggatccccagctgccagtgatggtctggttcccgggaggcgccttcatcgtgggcgctgcttcttcgtacgagggctctgacttggccgcccgcgagaaagtggtgctggtgtttctgcagcacaggctcggcatcttcggcttcctgagcacggacgacagccacgcgcgcgggaactgggggctgctggaccagatggcggctctgcgctgggtgcaggagaacatcgcagccttcgggggagacccaggaaatgtgaccctgttcggccagtcggcgggggccatgagcatctcaggactgatgatgtcacccctagcctcgggtctcttccatcgggccatttcccagagtggcaccgcgttattcagacttttcatcactagtaacccactgaaagtggccaagaaggttgcccacctggctggatgcaaccacaacagcacacagatcctggtaaactgcctgagggcactatcagggaccaaggtgatgcgtgtgtccaacaagatgagattcctccaactgaacttccagagagacccggaagagattatctggtccatgagccctgtggtggatggtgtggtgatcccagatgaccctttggtgctcctgacccaggggaaggtttcatctgtgccctaccttctaggtgtcaacaacctggaattcaattggctcttgccttatatcatgaagttcccgctaaaccggcaggcgatgagaaaggaaaccatcactaagatgctctggagtacccgcaccctgttgaatatcaccaaggagcaggtaccacttgtggtggaggagtacctggacaatgtcaatgagcatgactggaagatgctacgaaaccgtatgatggacatagttcaagatgccactttcgtgtatgccacactgcagactgctcactaccaccgagatgccggcctccctgtctacctgtatgaatttgagcaccacgctcgtggaataatcgtcaaaccccgcactgatggggcagaccatggggatgagatgtacttcctctttgggggccccttcgccacaggcctttccatgggtaaggagaaggcacttagcctccagatgatgaaatactgggccaactttgcccgcacaggaaaccccaatgatgggaatctgccctgctggccacgctacaacaaggatgaaaagtacctgcagctggattttaccacaagagtgggcatgaagctcaaggagaagaagatggctttttggatgagtctgtaccagtctcaaagacctgagaagcagaggcaattctaagggtggctatgcaggaaggagccaaagaggggtttgcccccaccatccaggccctggggagactagccatggacatacctggggacaagagttctacccaccccagtttagaactgcaggagctccctgctgcctccaggccaaagctagagcttttgcctgttgtgtgggacctgcactgccctttccagcctgacatcccatgatgcccctctacttcactgttgacatccagttaggccaggccctgtcaacaccacactgtgctcagctctccagcctcaggacaacctctttttttcccttcttcaaatcctcccacccttcaatgtctccttgtgactccttcttatgggaggtcgacccagactgccactgcccctgtcactgcacccagcttggcatttaccatccatcctgctcaaccttgtgcctgtctgttcacattggcctggaggcctagggcaggttgtgacatggagcaaacttttggtagtttgggatcttctctcccacccacacttatctcccccagggccactccaaagtctatacacaggggtggtctcttcaataaagaagtgttgattagacctg

SEQ ID NO: 465 - DNA, 896 bp, Homo sapiens
  source 1..896: mol_type = genomic DNA
ggaggactcagactctgctcttcagatccacacactgatcccaactacaaccagtgacctgaacttggagtctgagtagggcggccccggtgactgagatggcatcgtctctaaagatctggggcacactcttggccctactttgcatcctatgcacactgcttgtacagagcaaagaagtttcttggagagaattcatgaaacagcactacttaagtccaagtcgagaattcagagagtacaaatgtgatgtcctcatgagagaaaatgaagctctgaaagacaagagctctcacatgtttatctatatctcatggtacaaaatcgagcatatatgcactagtgacaactggatggatcgcttccgaaatgcatatgtatgggtccagaatcctctcaaagtactcaagtgtcaccaggagaattccaaaaatagctacacagagagcaggagcttcaactacattgaattccattgtagcatggacgggtatgttgatagcatagaagacctaaagatggtagaacctatcggcaactagaaagtctatgcacatcctcaggtattggtagagtattcagtgctttctaagtagcagcccctgcctccatcaatagtcctaccactcccctcttgcatttatttgtcaatgttttccaaatacttagagttatgaatagcataatttcttgataccataactttgcctgtgttgtttctctgcctggaatacacttttgtcttcatttacctaatttactcttatacttttgtcgacattcagctcatatggcatctgttcttgattaacccaagactttcctgatattgactctcttgatacatacccaagctgaacaatcttcccttccctaaataaattatatgactgcaa

SEQ ID NO: 466 - DNA, 927 bp, Homo sapiens
  source 1..927: mol_type = genomic DNA
tccagggctctgagaaaaggaggaggacgcagactctgctcttcagatccacatgctgatccccactacaatcagtgacctgaactcagagtccaagtaggacacgcaggtggacgtggtgactgagatgacatcctctctaaagatttggggcatactcttggccctgctttgcatcctttgcaggctgtgtgtatacagtaacaacatttactggagagaattcataaaacttcattacttaagtccaagtcgagaattcaaagagtacaaatgtgatgtcctcatgagagaaaaagaggctctgaaaggcaagagctttcatatgttcatctatagcttatggttcaaaattcagcgtgcatgcatcaatgagaaggggagcgaccgatatagaaatgcatatgtatgggccccaggtgccctcaaagtactcgagtgtcactgggagaagtacaacaataggtacacagagagcagaagcttcagctacattgaattccattgtggcgtagatggatatgttgataacatagaagacctgaggattatagaacctatcagcaactagaaagtctatgcacatcctcagatattggtagagtattcagtgcttccaaagtggtgggccctgcctccatcaatagcccctgccactccccgcttacatttatgtgtcagtgttttccaactacttagagtttatgtacctcgtgatttcttgataccaaatctttgtgtggtttctgtatctgtaatacaattttgtcctaatttgcctaatttacacccacattttttccaagattcagctcatatggcatctgtcctcgactaacctaagactttcctgatattgactctctttatacctacccaagctgaacgaccctccttttcttaaataaaatatattattctaacgta

SEQ ID NO: 467 - DNA, 1878 bp, Homo sapiens
  source 1..1878: mol_type = genomic DNA
ttcagaaaaaaagtgattcaatttccataaatttaatttactcacagcgttttcataatgttgctataacatctgaatgacagtccatggcattatttccgtggttgcagcaagccacttctcctactccctgtccatattagatgcatctcctgtttttcaagggagagaaacccctgctcagcccctgatgagcacatcatcaaatatttactattgttttattaatcaatgtgggtggttattatgtgtctctggctcagggagtgtttcatccaactaagctccctcagtggttgtctcacttcatctcttatagattaacttccttccaaaatgtcaccattcctgtatctggttctcttggtacttgggcttcatgctacaatccactgtgcatcacctgaaggcaaagtaacagcctgccattcatcccaaccaaatgccactctctacaagatgtcatccattaatgctgactttgcattcaatctgtaccggaggttcactgtggagaccccagataagaacatcttcttttcccctgtgagcatttctgcagctttggttatgctttcctttggggcctgctgcagcacccaaactgagattgtggagaccttggggttcaacctcacagacactccaatggtagagatccagcatggcttccagcatctgatctgttcactgaattttccaaagaaggaactggaattgcagataggaaatgccctcttcattggcaagcatctgaaaccactggcaaagttcttgaatgatgtcaagaccctctatgagactgaagtcttttctaccgacttctccaacatttctgcagccaagcaggagattaacagtcatgtggagatgcaaaccaaagggaaagttgtgggtctaattcaagacctcaagccaaacaccatcatggtcttagtgaactatattcactttaaagcccagtgggcaaatccttttgatccatccaagacagaagacagttccagcttcttaatagacaagaccaccactgttcaagtgcccatgatgcaccagatggaacaatactatcacctagtggatatggaattgaactgcacagttctgcaaatggactacagcaagaatgctctggcactctttgttcttcccaaggagggacagatggagtcagtggaagctgccatgtcatctaaaacactgaagaagtggaaccgcttactacagaagggatgggttgacttgtttgttccaaagttttccatttctgccacatatgaccttggagccacacttttgaagatgggcattcagcatgcctattctgaaaatgctgatttttctggactcacagaggacaatggtctgaaactttccaatgctgcccataaggctgtgctgcacattggtgaaaagggaactgaagctgcagctgtccctgaagttgaactttcggatcagcctgaaaacactttcctacaccctattatccaaattgatagatctttcatgttgttgattttggagagaagcacaaggagtattctctttctagggaaagttgtgaacccaacggaagcgtagttgggaaaaaggccattggctaattgcacgtgtgtattgcaatgggaaataaataaataatatagcctggtgtgattgatgtgagcttggacttgcattcccttatgatgggatgaagattgaaccctggctgaactttgttggctgtggaagaggccaatcctatggcagagcattcagaatgtcaatgagtaattcattattatccaaagcataggaaggctctatgtttgtatatttctctttgtcagaatacccctcaactcatttgctctaataaatttgactgggttg

SEQ ID NO: 468 - DNA, 498 bp, Homo sapiens
  source 1..498: mol_type = genomic DNA
ggctgctccttgctatagaagacctgggacagaggactgctgtctgccctctctggtcaccctgcctagctagaggatctgtgaccccagccatgaggaccctcgccatccttgctgccattctcctggtggccctgcaggcccaggctgagccactccaggcaagagctgatgaggttgctgcagccccggagcagattgcagcggacatcccagaagtggttgtttcccttgcatgggacgaaagcttggctccaaagcatccaggctcaaggaaaaacatggactgctattgcagaataccagcgtgcattgcaggagaacgtcgctatggaacctgcatctaccagggaagactctgggcattctgctgctgagcttgcagaaaaagaaaaatgagctcaaaatttgctttgagagctacagggaattgctattactcctgtaccttctgctcaatttcctttcctcatctcaaataaatgccttgttacaaga

SEQ ID NO: 469 - DNA, 1357 bp, Homo sapiens
  source 1..1357: mol_type = genomic DNA
gcggccgggaggccggagcagcacggccgcaggacctggagctccggctgcgtcttcccgcagcgctacccgccatgcgcctgccgcgccgggccgcgctggggctcctgccgcttctgctgctgctgccgcccgcgccggaggccgccaagaagccgacgccctgccaccggtgccgggggctggtggacaagtttaaccaggggatggtggacaccgcaaagaagaactttggcggcgggaacacggcttgggaggaaaagacgctgtccaagtacgagtccagcgagattcgcctgctggagatcctggaggggctgtgcgagagcagcgacttcgaatgcaatcagatgctagaggcgcaggaggagcacctggaggcctggtggctgcagctgaagagcgaatatcctgacttattcgagtggttttgtgtgaagacactgaaagtgtgctgctctccaggaacctacggtcccgactgtctcgcatgccagggcggatcccagaggccctgcagcgggaatggccactgcagcggagatgggagcagacagggcgacgggtcctgccggtgccacatggggtaccagggcccgctgtgcactgactgcatggacggctacttcagctcgctccggaacgagacccacagcatctgcacagcctgtgacgagtcctgcaagacgtgctcgggcctgaccaacagagactgcggcgagtgtgaagtgggctgggtgctggacgagggcgcctgtgtggatgtggacgagtgtgcggccgagccgcctccctgcagcgctgcgcagttctgtaagaacgccaacggctcctacacgtgcgaagagtgtgactccagctgtgtgggctgcacaggggaaggcccaggaaactgtaaagagtgtatctctggctacgcgagggagcacggacagtgtgcagatgtggacgagtgctcactagcagaaaaaacctgtgtgaggaaaaacgaaaactgctacaatactccagggagctacgtctgtgtgtgtcctgacggcttcgaagaaacggaagatgcctgtgtgccgccggcagaggctgaagccacagaaggagaaagcccgacacagctgccctcccgcgaagacctgtaatgtgccggacttaccctttaaattattcagaaggatgtcccgtggaaaatgtggccctgaggatgccgtctcctgcagtggacagcggcggggagaggctgcctgctctctaacggttgattctcatttgtcccttaaacagctgcatttcttggttgttcttaaacagacttgtatattttgatacagttctttgtaataaaattgaccattgtaggtaa

SEQ ID NO: 470 - DNA, 717 bp, Homo sapiens
  source 1..717: mol_type = genomic DNA
cgcttcctctccaggcaaaatgaagctgaatctggtgcagatctttttcatgttgctgatgctgctgctgggcctggggatgggcctggggttgggacttcatatggctacagcagtcttggaggagagtgatcaaccgctcaatgaattttggtccagtgactcacaggacaaagctgaggccactgaggagggagacggcacccaaaccacagaaacgctggtgcttagcaacaaagaagtggtgcaacctggctggccagaagatcccatcctcggtgaagatgaggttgggggtaacaagatgctcagagcctcagctctctttcagagcaacaaagactatcttaggcttgaccagacagatagagaatgcaatgatatgatggcacacaagatgaaggagcccagtcagagttgcatagcccagtatgcattcatccatgaggatctaaacacagtcaaagctgtctgtaacagtcctgtcattgcctgtgagctcaaggggggaaaatgtcacaaaagctcccgaccttttgatttgacattgtgcgagctgtcccaaccagaccaggtcactcctaactgcaattacctaacttctgttataaaaaagcacattattataacctgtaatgacatgaagcgccagttaccaactggacaatgaagcaactcatcatcttttttctcttcaccttctcctgttcctcttcc

SEQ ID NO: 471 - DNA, 222 bp, Homo sapiens
  source 1..222: mol_type = genomic DNA
atgaggattgctgtcctcctcttcgccattttcttctttatgagccaagttctaccagccaggggcaaattcaaggagatctgtgaacgtccaaatggctcctgtcgggacttttgccttgaaacagaaatccatgttgggagatgtttaaatagccaaccctgctgcctgcctctggggcatcaaccaagaattgagagcactacacccaaaaaggactga

SEQ ID NO: 472 - DNA, 767 bp, Homo sapiens
  source 1..767: mol_type = genomic DNA
aggcccttccgcaatcggagccctcacagaggccaaactgatataaatctgcttaggaggcctgattcacagacgctacaggatggagcggggcgcaggagccaagctgctgccgctgctgctgcttctgcgggcgactggtttcacatgtgcacagacagatggccggaacggctacacggcggtcatcgaagtgaccagcgggggtccctggggcgactgggcctggcctgagatgtgtcccgatggattcttcgccagcgggttctcgctcaaggtggagcctccccaaggcattcctggcgacgacactgcactgaatgggatcaggctgcactgcgcgcgcgggaacgtcctaggcaatacgcacgtggtagagtcccagtctggaagctggggcgaatggagtgagccgctgtggtgtcgcggcggcgcctacctagtggctttctcgcttcgcgtggaggcacccacgaccctcggtgacaacacagcagcgaacaacgtgcgcttccgctgttcagacggcgaggaactgcaggggcctgggctgagctggggagactttggagactggagtgaccattgccccaagggcgcgtgcggcctgcagaccaagatccagggacctagaggcctcggcgatgacactgcgctgaacgacgcgcgcttattctgctgccgcagttgaacggcgccgccgccgccgctctctcccgggccaggaggctagtcccacctcttgctattaaagcttctctgagttg

SEQ ID NO: 473 - DNA, 2179 bp, Homo sapiens
  source 1..2179: mol_type = genomic DNA
cgcgcaggtccccagcacatctgggcgagagcggcgccgctggagccgaggggggcgccgagcgcagatctggagcagcagagccacggcgcagctggggcccttcgaggcgctcggggcgcacatctgggacctcgagcgggggccgtgccgcgcgcagctggaccaggggaggggggcggcggctgcacagctggaccgaagggggcggggtcggccctgggcgacccgctgaggggagggccgcgggccgccggggactggagcatgggacggcgcgcctgaaggagcaggaaggggaaggaggcctgggaccccgaaaagagaaggggagagcgaggggacgagagcggaggaggaagatgcaactgactcgctgctgcttcgtgttcctggtgcagggtagcctctatctggtcatctgtggccaggatgatggtcctcccggctcagaggaccctgagcgtgatgaccacgagggccagccccggccccgggtgcctcggaagcggggccacatctcacctaagtcccgccccatggccaattccactctcctagggctgctggccccgcctggggaggcttggggcattcttgggcagccccccaaccgcccgaaccacagccccccaccctcagccaaggtgaagaaaatctttggctggggcgacttctactccaacatcaagacggtggccctgaacctgctcgtcacagggaagattgtggaccatggcaatgggaccttcagcgtccacttccaacacaatgccacaggccagggaaacatctccatcagcctcgtgccccccagtaaagctgtagagttccaccaggaacagcagatcttcatcgaagccaaggcctccaaaatcttcaactgccggatggagtgggagaaggtagaacggggccgccggacctcgctttgcacccacgacccagccaagatctgctcccgagaccacgctcagagctcagccacctggagctgctcccagcccttcaaagtcgtctgtgtctacatcgccttctacagcacggactatcggctggtccagaaggtgtgcccagattacaactaccatagtgataccccctactacccatctgggtgacccggggcaggccacagaggccaggccagggctggaaggacaggcctgcccatgcaggagaccatctggacaccgggcagggaaggggttgggcctcaggcagggaggggggtggagacgaggagatgccaagtggggccagggccaagtctcaagtggcagagaaagggtcccaagtgctggtcccaacctgaagctgtggagtgactagatcacaggagcactggaggaggagtgggctctctgtgcagcctcacagggctttgccacggagccacagagagatgctgggtccccgaggcctgtgggcaggccgatcagtgtggccccagatcaagtcatgggaggaagctaagcccttggttcttgccatcctgaggaaagatagcaacagggagggggagatttcatcagtgtggacagcctgtcaacttaggatggatggctgagagggcttcctaggagccagtcagcagggtggggtggggccagaggagctctccagccctgcctagtgggcgccctcagccccttgtcgtgtgctgagcatggcatgaggctgaagtggcaaccctggggtctttgatgtcttgacagattgaccatctgtctccagccaggccacccctttccaaaattccctcttctgccagtactccccctgtaccacccattgctgatggcacacccatccttaagctaagacaggacgattgtggtcctcccacactaaggccacagcccatccgcgtgctgtgtgtccctcttccaccccaacccctgctggctcctctgggagcatccatgtcccggagaggggtccctcaacagtcagcctcacctgtcagaccggggttctcccggatctggatggcgccgccctctcagcagcgggcacgggtggggcggggccgggccgcagagcatgtgctggatctgttctgtgtgtctgtctgtgggtggggggaggggagggaagtcttgtgaaaccgctgattgctgacttttgtgtgaagaatcgtgttcttggagcaggaaataaagcttgccccggggca

SEQ ID NO: 474 - DNA, 800 bp, Homo sapiens
  source 1..800: mol_type = genomic DNA
ccaaagtgatcatttgaaaaagagatatccacatcttcaagcccatataaaggatagaagctgcacagggcagctttacttactccagcaccttcctctcccaggcaaaatgaaaatacttgtggcatttctggtggtgctgaccatctttgggatacaatctcatggatacgaggtttttaacatcatcagcccaagcaacaatggtggcaatgttcaggagacagtgacaattgataatgaaaaaaataccgccatcattaacatccatgcaggatcatgctcttctaccacaatttttgactataaacatggctacattgcatccagggtgctctcccgaagagcctgctttatcctgaagatggaccatcagaacatccctcctctgaacaatctccaatggtacatctatgagaaacaggctctggacaacatgttctccagcaaatacacctgggtcaagtacaaccctctggagtctctgatcaaagacgtggattggttcctgcttgggtcacccattgagaaactctgcaaacatatccctttgtataagggggaagtggttgaaaacacacataatgtcggtgctggaggctgtgcaaaggctgggctcctgggcatcttgggaatttcaatctgtgcagacattcatgtttaggatgattagccctcttgttttatcttttcaaagaaatacatccttggtttacactcaaaagtcaaattaaattctttcccaatgccccaactaattttgagattcagtcagaaaatataaatgctgtatttataga

SEQ ID NO: 475 - DNA, 2014 bp, Homo sapiens
  source 1..2014: mol_type = genomic DNA
gctggcagcaggcagcaggcagcaggcgggcgcgctgtggctccgcgccgcgcggtccgggctctgttcattcatgattggtactcggccctccgagacccagcccgagcgcagggaggggagccgagtgtgcggcaggaggggcgggcggacggcggctcccgcaccgcacgcggcgctggctcggcagcctcggccgggcggccgctctggccccgtgtccagtgccaggcaggcttcagggcaccgtcctcggccctgggcgagggaaccgccgggccgggtcctcgcgcggggaagcggttccgaaggctcgcggggagcggctagccctgagtccctgcatgtgcggggctgaagaaggaagccagaagcctcctagcctcgcctccacgcttgctgaataccaagctgcaggcgagctgccgggcgcttttctctcctccaattcagagtagacaaaccacggggatttctttccagggtaggggaggggccgggcccggggtcccaactcgcactcaagtcttcgctgccatgggggccgtcatgggcaccttctcatctctgcaaaccaaacaaaggcgaccctcgaaagataagattgaagatgagctggagatgaccatggtttgccatcggcccgagggactggagcagctcgaggcccagaccaacttcaccaagagggagctgcaggtcctttatcgaggcttcaaaaatgagtgccccagtggtgtggtcaacgaagacacattcaagcagatctatgctcagtttttccctcatggagatgccagcacgtatgcccattacctcttcaatgccttcgacaccactcagacaggctccgtgaagttcgaggactttgtaaccgctctgtcgattttattgagaggaactgtccacgagaaactaaggtggacatttaatttgtatgacatcaacaaggacggatacataaacaaagaggagatgatggacattgtcaaagccatctatgacatgatggggaaatacacatatcctgtgctcaaagaggacactccaaggcagcatgtggacgtcttcttccagaaaatggacaaaaataaagatggcatcgtaactttagatgaatttcttgaatcatgtcaggaggacgacaacatcatgaggtctctccagctgtttcaaaatgtcatgtaactggtgacactcagccattcagctctcagagacattgtactaaacaaccaccttaacaccctgatctgcccttgttctgattttacacaccaactcttgggacagaaacaccttttacactttggaagaattctctgctgaagactttctatggaacccagcatcatgtggctcagtctctgattgccaactcttcctctttcttcttcttgagagagacaagatgaaatttgagtttgttttggaagcatgctcatctcctcacactgctgccctatggaaggtccctctgcttaagcttaaacagtagtgcacaaaatatgctgcttacgtgcccccagcccactgcctccaagtcaggcagaccttggtgaatctggaagcaagaggacctgagccagatgcacaccatctctgatggcctcccaaaccaatgtgcctgtttctcttcctttggtgggaagaatgagagttatccagaacaattaggatctgtcatgaccagattgggagagccagcacctaacatatgtgggataggactgaattattaagcatgatattgtctgatgacccaaactgcccatgtcatttgtttccagaaacgaggaccaataattctctcacactggcatttgtgctggtagtacaagtcctttaatatgtccaggaagggagccattgcccagtggtccatatctccaccacatcccctgcttgagcccagcgctgcatgtccctcccaagaagtccagaatgcctgcaaattgctgtaattttataccatgttctaaccaataaacagaactatttcttacactctcaa

SEQ ID NO: 476 - DNA, 3461 bp, Homo sapiens
  source 1..3461: mol_type = genomic DNA
ccttgctctcgccgctgctgccggagccgaagcagagaaggcagcgggtcccgtgaccgtcccgagagccccgcgctcccgaccagggggcgggggcggccccggggagggcggggcaggggcggggggaagaaagggggttttgtgctgcgccgggagggccggcgccctcttccgaatgtcctgcggccccagcctctcctcacgctcgcgcagtctccgccgcagtctcagctgcagctgcaggactgagccgtgcacccggaggagacccccggaggaggcgacaaacttcgcagtgccgcgacccaaccccagccctgggtagcctgcagcatggcccagctgttcctgcccctgctggcagccctggtcctggcccaggctcctgcagctttagcagatgttctggaaggagacagctcagaggaccgcgcttttcgcgtgcgcatcgcgggcgacgcgccactgcagggcgtgctcggcggcgccctcaccatcccttgccacgtccactacctgcggccaccgccgagccgccgggctgtgctgggctctccgcgggtcaagtggactttcctgtcccggggccgggaggcagaggtgctggtggcgcggggagtgcgcgtcaaggtgaacgaggcctaccggttccgcgtggcactgcctgcgtacccagcgtcgctcaccgacgtctccctggcgctgagcgagctgcgccccaacgactcaggtatctatcgctgtgaggtccagcacggcatcgatgacagcagcgacgctgtggaggtcaaggtcaaaggggtcgtctttctctaccgagagggctctgcccgctatgctttctccttttctggggcccaggaggcctgtgcccgcattggagcccacatcgccaccccggagcagctctatgccgcctaccttgggggctatgagcaatgtgatgctggctggctgtcggatcagaccgtgaggtatcccatccagaccccacgagaggcctgttacggagacatggatggcttccccggggtccggaactatggtgtggtggacccggatgacctctatgatgtgtactgttatgctgaagacctaaatggagaactgttcctgggtgaccctccagagaagctgacattggaggaagcacgggcgtactgccaggagcggggtgcagagattgccaccacgggccaactgtatgcagcctgggatggtggcctggaccactgcagcccagggtggctagctgatggcagtgtgcgctaccccatcgtcacacccagccagcgctgtggtgggggcttgcctggtgtcaagactctcttcctcttccccaaccagactggcttccccaataagcacagccgcttcaacgtctactgcttccgagactcggcccagccttctgccatccctgaggcctccaacccagcctccaacccagcctctgatggactagaggctatcgtcacagtgacagagaccctggaggaactgcagctgcctcaggaagccacagagagtgaatcccgtggggccatctactccatccccatcatggaggacggaggaggtggaagctccactccagaagacccagcagaggcccctaggacgctcctagaatttgaaacacaatccatggtaccgcccacggggttctcagaagaggaaggtaaggcattggaggaagaagagaaatatgaagatgaagaagagaaagaggaggaagaagaagaggaggaggtggaggatgaggctctgtgggcatggcccagcgagctcagcagcccgggccctgaggcctctctccccactgagccagcagcccaggaggagtcactctcccaggcgccagcaagggcagtcctgcagcctggtgcatcaccacttcctgatggagagtcagaagcttccaggcctccaagggtccatggaccacctactgagactctgcccactcccagggagaggaacctagcatccccatcaccttccactctggttgaggcaagagaggtgggggaggcaactggtggtcctgagctatctggggtccctcgaggagagagcgaggagacaggaagctccgagggtgccccttccctgcttccagccacacgggcccctgagggtaccagggagctggaggccccctctgaagataattctggaagaactgccccagcagggacctcagtgcaggcccagccagtgctgcccactgacagcgccagccgaggtggagtggccgtggtccccgcatcaggtgactgtgtccccagcccctgccacaatggtgggacatgcttggaggaggaggaaggggtccgctgcctatgtctgcctggctatgggggggacctgtgcgatgttggcctccgcttctgcaaccccggctgggacgccttccagggcgcctgctacaagcacttttccacacgaaggagctgggaggaggcagagacccagtgccggatgtacggcgcgcatctggccagcatcagcacacccgaggaacaggacttcatcaacaaccggtaccgggagtaccagtggatcggactcaacgacaggaccatcgaaggcgacttcttgtggtcggatggcgtccccctgctctatgagaactggaaccctgggcagcctgacagctacttcctgtctggagagaactgcgtggtcatggtgtggcatgatcagggacaatggagtgacgtgccctgcaactaccacctgtcctacacctgcaagatggggctggtgtcctgtgggccgccaccggagctgcccctggctcaagtgttcggccgcccacggctgcgctatgaggtggacactgtgcttcgctaccggtgccgggaaggactggcccagcgcaatctgccgctgatccgatgccaagagaacggtcgttgggaggccccccagatctcctgtgtgcccagaagacctgcccgagctctgcacccagaggaggacccagaaggacgtcaggggaggctactgggacgctggaaggcgctgttgatccccccttccagccccatgccaggtccctagggggcaaggccttgaacactgccggccacagcactgccctgtcacccaaattttccctcacaccctgcgctcccgccaccacaggaagtgacaacatgacgaggggtggtactggagtccaggtgacagttcctgaaggggcttctgggaaatacctaggaggctccagcccagcccaggccctctccccctaccctgggcaccagatcttccatcagggccggagtaaatccctaagtgcctcaactgccctctccctggcagccatcttgtcccctctattcctctagggagcactgtgcccactctttctgggttttccaagggaatgggcttgcaggatggagtgtctgtaaaatcaacaggaaataaaactgtgtatgagccca

SEQ ID NO: 477 - DNA, 1051 bp, Homo sapiens
  source 1..1051: mol_type = genomic DNA
ctctgcggggagacgccagcctgcgtctgccatggggctcgggttgaggggctggggacgtcctctgctgactgtggccaccgccctgatgctgcccgtgaagccccccgcaggctcctggggggcccagatcatcgggggccacgaggtgaccccccactccaggccctacatggcatccgtgcgcttcgggggccaacatcactgcggaggcttcctgctgcgagcccgctgggtggtctcggccgcccactgcttcagccacagagacctccgcactggcctggtggtgctgggcgcccacgtcctgagtactgcggagcccacccagcaggtgtttggcatcgatgctctcaccacacaccccgactaccaccccatgacccacgccaacgacatctgcctgctgcggctgaacggctctgctgtcctgggccctgcagtggggctgctgaggccgccagggagaagggccaggccccccacagcggggacacggtgccgggtggctggctggggcttcgtgtctgactttgaggagctgccgcctggactgatggaggccaaggtccgagtgctggacccggacgtctgcaacagctcctggaagggccacctgacacttaccatgctctgcacccgcagtggggacagccacagacggggcttctgctcggccgactccggagggcccctggtgtgcaggaaccgggctcacggcctcgtttccttctcgggcctctggtgcggcgaccccaagacccccgacgtgtacacgcaggtgtccgcctttgtggcctggatctgggacgtggttcggcggagcagtccccagcccggccccctgcctgggaccaccaggcccccaggagaagccgcctgagccacaaccttgcggcatgcaaatgagatggccgctccaggcctggaatgttccgtggctgggccccacgggaagcctgatgttcagggttggggtgggacgggcagcggtggggcacacccattccacatgcaaagggcagaagcaaacccagtaaaatgttaactg

SEQ ID NO: 478 - DNA, 2792 bp, Homo sapiens
  source 1..2792: mol_type = genomic DNA
gggggaagggaacggggggaagccatcttcaccccccaccccaatgcacacacaattaagccaggaagcagcttgcaaccactagcctggggagggtccgcatgtgtcaagggtgagggcaacagatgctggacccagggagctctctgccacaggtcagtctacaaggcctcagggaccaacttgccaacagctggacttgatcactagctggcaaactgagctcacgtatcgggtggaataacaagcggactttgctctctgctgtgcaaaacgctgtttttagaggatttgccacagcagcggatagagcaggagagcaccaccggagcccttgagacatccttgagaagagccacagcataagagactgccctgcttggtgttttgcaggatgatggtggcccttcgaggagcttctgcattgctggttctgttccttgcagcttttctgcccccgccgcagtgtacccaggacccagccatggtgcattacatctaccagcgctttcgagtcttggagcaagggctggaaaaatgtacccaagcaacgagggcatacattcaagaattccaagagttctcaaaaaatatatctgtcatgctgggaagatgtcagacctacacaagtgagtacaagagtgcagtgggtaacttggcactgagagttgaacgtgcccaacgggagattgactacatacaataccttcgagaggctgacgagtgcatcgaatcagaggacaagacactggcagaaatgttgctccaagaagctgaagaagagaaaaagatccggactctgctgaatgcaagctgtgacaacatgctgatgggcataaagtctttgaaaatagtgaagaagatgatggacacacatggctcttggatgaaagatgctgtctataactctccaaaggtgtacttattaattggatccagaaacaacactgtttgggaatttgcaaacatacgggcattcatggaggataacaccaagccagctccccggaagcaaatcctaacactttcctggcagggaacaggccaagtgatctacaaaggttttctattttttcataaccaagcaacttctaatgagataatcaaatataacctgcagaagaggactgtggaagatcgaatgctgctcccaggaggggtaggccgagcattggtttaccagcactccccctcaacttacattgacctggctgtggatgagcatgggctctgggccatccactctgggccaggcacccatagccatttggttctcacaaagattgagccgggcacactgggagtggagcattcatgggataccccatgcagaagccaggatgctgaagcctcattcctcttgtgtggggttctctatgtggtctacagtactgggggccagggccctcatcgcatcacctgcatctatgatccactgggcactatcagtgaggaggacttgcccaacttgttcttccccaagagaccaagaagtcactccatgatccattacaaccccagagataagcagctctatgcctggaatgaaggaaaccagatcatttacaaactccagacaaagagaaagctgcctctgaagtaatgcattacagctgtgagaaagagcactgtggctttggcagctgttctacaggacagtgaggctatagccccttcacaatatagtatccctctaatcacacacaggaagagtgtgtagaagtggaaatacgtatgcctcctttcccaaatgtcactgccttaggtatcttccaagagcttagatgagagcatatcatcaggaaagtttcaacaatgtccattactcccccaaacctcctggctctcaaggatgaccacattctgatacagcctacttcaagccttttgttttactgctccccagcatttactgtaactctgccatcttccctcccacaattagagttgtatgccagcccctaatattcaccactggcttttctctcccctggcctttgctgaagctcttccctctttttcaaatgtctattgatattctcccattttcactgcccaactaaaatactattaatatttctttcttttcttttcttttttttgagacaaggtctcactatgttgcccaggctggtctcaaactccagagctcaagagatcctcctgcctcagcctcctaagtacctgggattacaggcatgtgccaccacacctggcttaaaatactatttcttattgaggtttaacctctatttcccctagccctgtccttccactaagcttggtagatgtaataataaagtgaaaatattaacatttgaatatcgctttccaggtgtggagtgtttgcacatcatttaattctcgtttcacctttgtgaaacatgcacaagtctttacagctgtcattctagagtttaggtgagtaacacaattacaaagtgaaagatacagctagaaaatactacaaatcccatagtttttccattgcccaaggaagcatcaaatacgtatgtttgttcacctactcttatagtcaatgcgttcatcgtttcagcctaaaaataatagtctgtccctttagccagttttcatgtctgcacaagacctttcaataggcctttcaaatgataattcctccagaaaaccagtctaagggtgaggaccccaactctagcctcctcttgtcttgctgtcctctgtttctctctttctgctttaaattcaataaaagtgacactgagcaaataacctcatcaggttatatttgcccacataccctaagcacaaaa

SEQ ID NO: 479 - DNA, 2312 bp, Homo sapiens
  source 1..2312: mol_type = genomic DNA
agtgacaaatgctggctgcaatccagccagccctctgccctttctgagcccgagggactgccacctccactgtgtgcacactcagctacgggacacatttcaggtatccaaggcagcagaggtgagtgggtcccccgagctctgtgaccttatgctccacactaactctggcagagcctccgtttcctcatagaacaaagaacagccaccatgcagctcttcctcctcttgtgcctggtgcttctcagccctcagggggcctcccttcaccgccaccacccccgggagatgaagaagagagtcgaggacctccatgtaggtgccacggtggcccccagcagcagaagggactttacctttgacctctacagggccttggcttccgctgcccccagccagagcatcttcttctcccctgtgagcatctccatgagcctggccatgctctccctgggggctgggtccagcacaaagatgcagatcctggagggcctgggcctcaacctccagaaaagctcagagaaggagctgcacagaggctttcagcagctccttcaggaactcaaccagcccagagatggcttccagctgagcctcggcaatgcccttttcaccgacctggtggtagacctgcaggacaccttcgtaagtgccatgaagacgctgtacctggcagacactttccctaccaactttagggactctgcaggggccatgaagcagatcaatgattatgtggcaaagcaaacgaagggcaagattgtggacttgcttaagaacctcgatagcaatgcggtcgtgatcatggtgaattacatcttctttaaagctaagtgggagacaagcttcaaccacaaaggcacccaagagcaagacttctacgtgacctcggagactgtggtgcgggtacccatgatgagccgcgaggatcagtatcactacctcctggaccggaacctctcctgcagggtggtgggggtcccctaccaaggcaatgccacggctttgttcattctccccagtgagggaaagatgcagcaggtggagaatggactgagtgagaaaacgctgaggaagtggcttaagatgttcaaaaagaggcagctcgagctttaccttcccaaattctccattgagggctcctatcagctggagaaagtcctccccagtctggggatcagtaacgtcttcacctcccatgctgatctgtccggcatcagcaaccactcaaatatccaggtgtctgagatggtgcacaaagctgtggtggaggtggacgagtcgggaaccagagcagcggcagccacggggacaatattcactttcaggtcggcccgcctgaactctcagaggctagtgttcaacaggccctttctgatgttcattgtggataacaacatcctcttccttggcaaagtgaaccgcccctgaggtggggcttctcctgaaatctacaggcctcagggtgggagatgaagggggctaagctatggcccatctgtatgctggtagctagtgatttacacaggtttagttgactaatgaggcattacaaataatattactctatgatgattgcttccacccacacgactgcaacatacaggtgccttggggaaatgtggagaacattcaatcttgccgtcactattcatcaatgaagattaacactgagatccagagaggctggatgacttgctcaagttcaccagcatggtagtggcaaagagaggtccagagtcctggcccttgatgcccagctcagtgccacaaagctcaataggagggatgttccagtggatgagggccaccaggaagcacaggtccaaggctggtcccacacttatcagcagcaacaactgtcagttcatcctgcatgggaaaaatgttggaatgggagtctgaaatggggctactgtttcagtcctaatgtgctgtgtgacattgggacaacactttccctctctggacctcagtttccctctgtatacaaggatcagattcttgctgtgacccaagaactcctgaaatcatatagaaaggctggggtgggccctgtcattcgtggttgatttcaatacactcaagtgccattcatcctttaagaaaaacatctggatatcaaggtggaaatggcccatttaatgattgattatatcattttgtggatatagttataatctgatgggcctggctgggagtggaagaagggaagccttttgcaaatagtagagtatcagttgcaggtgccaatgactaactttttgaattctatgttggcattaacaataaagcattttgcaaacactggt

SEQ ID NO: 480 - DNA, 5844 bp, Homo sapiens
  source 1..5844: mol_type = genomic DNA
aagactcaggggctctcttgttggtgaacagtagcaaaatctggagtaactgtgcctggaattttttggccccaagtctaaacaaaggaatagtttccagataagcgctgtttgcataggtggtggtctgtcacgtggtgggccaggctattcagttcttggtcagcgagacgcctgccttgggtgctggatgccggctgtacgacatgcggctctcccctttccatttacagctggagttccacatgaaggagaagagagaggacctccagattagctggtctttcatcagtgtgccggaaatggccgttaatatccagcccaaagcactgggggaggaccaggtggctgagacaagtgcgatgtctgacgttctcaaggacatcttgaagcatttggctggttctgcctctccatcagtggttctgattaccaagcccacgactgtaaaggaagctcagaacttacagtgtgctgcatctactgctcaggaatcctgtcctcctaaacctccaagggctcacgagctgaagctactggtgaggaacatccacgtcttgctgctcagcgagcccggtgcctcaggccacattaatgcagtgtgcgtcgtgcagctgaacgatcctgttcagaggttctccagcaccctgacgaaaaacactccggacctcatgtgggaagaggaattcaccttcgagttgaatgccaagtcgaaggagttacacctgcagatttcagaggctgggcgatcctcagaaggtctgctggcgacggcgacagttcctctggacttatttaagaagcagccttctgggccacagagcttcacgctgaccagcgggtctgcctgcggcagctcggtgctgggctcggtcacggcagagttctcttacatggaacctggtgaattgaaatcctggcccatccctccccctgttcctgctgcaaaaatagaaaaggaccgcacggtgatgccctgtgggactgtggtcactactgtcactgctgtgaagaccaagcctcgcgtcgacgtggggagggcgtccccgctgagctctgattctccggtgaagactcccatcaaggtgaaggtgatcgagaaggacatctctgtccaggccatcgcctgccgcagcgcccccgtcagcaaaacactctcttcttcagacacagaattgttggtgttgaatggttcggatccagtggctgaagtggccattcgacagctcagtgaatcttcaaagctgaaactcaagtcgccacggaagaaaagcactattatcatatcagggatctccaagacctcactatctcaggaccacgacgctgccctgatgcagggctacacggcctctgtggacagcacccaccaggaggacgccccatcccatccggagagggcggcagcctctgccccgccagaggaagccgagtcagcccaggcatcccttgcccccaagccccaggaggacgagctagactcctgggacttggagaaggagccacaggccgcggcatggagcagccaggtcctgctggaccccgacggtgatgagctgtcagagagctccatgagtgtcttggagccgggcactgccaaaaagcataaaggaggaattctaaggaaaggtgcaaagctgttcttccgccggcggcatcaacagaaagacccaggcatgagtcagtcacacaatgaccttgtgttcctggagcagccagagggttcccggaggaaaggcatcaccctcaccaggatcctgaacaagaagctgctctccaggcacagaaacaagaacaccatgaacggtgcccccgtggagccctgcacgtagggcctgaggtcatcacctccaagccagaagacgtgcacccatgttaactaccctcaccaggacgcagccagtgtgtccgccggatgtccagatgccccgcttgtcttgctgggtttcttccaaccatctcgtcatttaaagggaaaacaaaatctgagtctccagccaggaggcttctcccagagaggacaaaaaagcccaacttgccaccagatgctaaatgagacttgacagctgcagagcttgggctgtgctcatagctaagggttagggttcaatattagaaggagattaacattataagtgaaataatatgctctaatagattgtggagggcaggtttgagggacttagtttacctattctacactaacaagtgttgttttgggtccatgcctggaccatgtcacaaaaaggaggtgcccccctgtgctgtcactgtgaatggaaaggatgggtcacctctcttcatctgctgcttggaataaaaaatgcagctggccctgagtacagggaagtggaacataggcaggattttggattaatagagaaattttgataagaatggagacgctacgacagatgtaggaagtcatctacctttgatattagccatagaacttgaacactaactatatcctatgcatagtatgcagaacacttttctaagtttactttgagcctacttgcaagtggaagatatatatattctcacatggtttttacatttttctctatcgtgttaaaagctctaataatgctagtggagcagttgacatccagggttttttttcctgcctgtcatacttgctaaacaagagcacagcgggcctgtcagatgaagtcaggagccatacgtgaccgctcgtagaacacagtaaccaaacacatacatggattttgccaagtgctgccagtagccaaaacaaagtctttttagggcaatagaggaaattattttgtgtctcaggtgtcagtcttaggaatggaagtttaataacaaatgggccaaactcgcaggacattccttctatgagcgcttcagaattttgctgtgaacagtcctcttggacacaggttggggtgcccttgtttgggtttgttttggtggaaaacatcacaaacctggcacaccatttgaatatccctaatatcattccagtcgctttcctcatcagttgcctttctatttcagttcattcacagatctcacttctgaatgtgccacttccagtagacatgctggtcaaagagcagtcatcattggggtgaagtgttcttgacagtttaatatgattcacttttctccaaagacatgtaaaaggctgttacgaaagcttggcttctgtcatggagacggaaatgggcaagcttccttccgtagcctcttgttaatccttaaacattaaatatttcgggggtaatagagccactggtgagtaaaaacctatataaaaaccaaaattataggattttttcttttttagtaaaaaccggtatcaaaaccaaaattataggatttttttcttttttagtaaaaacctatataaaaaccaaaattataggattttttcttttttagtaaaaacctatatgaaaaccaaaattataggatttttttcttttttagtaaaaacctgtataaaaaccaaaattataggatttttttttcttcttttttagagagagagattagaaaacgacattaggaatttcactttaaaatgcgcattacaaacttcttaggtgttccaggaattatcaagtgactttaaaatgacttttccaacctgctttgtttttaaaaattatattccagttttaatcattgtaaaaaaagcacctggagtttcaaaacatgtgaatactaccaagtttctgtccccaaagtcaggcatcactgttagtcttttgggacagatgggacagatgttcactttaatgttttacttgaagttttactgctctttgccatgtggtaaaaagaggctgagacatatttaagaattccaagaggatattatgtgtcagaatttcagacactgatgagaagtttttaattgttcttttttatttgattttggaattcaggtgcactctattcaagtgcaaggatatcagaagtttttttttatttaaaaaatttttttttcgagatggagtttcactctgttgcccaggctggagtgcaatggcagcttactgcaacctccacctcctggttcaagcgattctcctgcctcagcctcccaagtagctgggattacaggcacgcgccaccacacctggctaattctatttagtagaaatggagtctcaccatgttggtcaggctggtctcgaactcctgacctcaggtgatccacccaccttggcctcccagcgtgctgggattataggcatgagccaccaggccggccccaggattttatattaagccttcttgctctcaaaaaaaaaaaaaggttttaactattccatttccagatgaatcccatgagcgctgcttactgttgaataccaaggtctagggctctgcttcctgtagacacgcacacgttgtctccatccaatggccttttctgaagttacagaaaacaccaacatgggagggagtttatgaagcaaaggcaaaggcaacacgtcggctagcttcagggtagcaccgtgagaaatgggctgtattgatactgtgaatgtttgttttccaagctgttttatacaggtttgttttttcatggtgtagggtatttatgacaaagtaaatgttgtgaaggttaaagataaattaagattatccaccaaatgctaaaaatactgatgtgtaaatcacctttatcgcctcacctcttctacaagcttttgtggcttgagggcttttgtttttggcttttgtctggatgaaagttttgcccagttgtgttttaaaaacaattcctcatgaacactaagattaattgtgtctgtatctctggaactgggtgctcatgttggttttaatgagcttgcaacccttccccgtttgctttgtttaaggaggtgcctctgttctttgtggaggagtgaaatggagctttaagtgtgtgtgtgtgttatgtgtgtttgcacacacgcgtgtgttattgtagcaataacaaaaagtagccatctccttgttccagctgaaaacctgctgtgagagttttgacagagcactttattttcgtcaagtttcaagtctgagttcaaaaccagccctgatcccttatgaccaactgctactcgaccagtcgccactcagtggccacctggtgcccgtttagatttttgcttgggttttactggccacctctatagacgagagttgcaaagttgctttgagcagagagggaaagattaatttacactgctggccaccgaaggcaggtgtttcctgggtagtaatctcacggctcttgatctggaaacttcagagtacaaattggtggatggtggaaggcaggacacgtatctctgtctgacggaaaacagacctcggggctggcgtaaaccctgctgccaggccctctccccactgccccaaaccggcctagacacgaagaccaaagcagcctgcacagggcaaggcccccgcggaatcctgcagagcaaactcaggttaacttgggtccatgaccgtttgcattcgaaacacaatacactgcctcgttctctcagttagcagctgggcagcagcgcaccattcatcatttaggcttgtggtttgttgtttactctaccaatgttatgtcgaaactgcattgtaaaaagagaagaaagtggcaggttttccaggtccacggaaaggtttggcctgacgctggagtgcggtgatgaacttacgtgacaatgattgtattcctcagtagcactttaaacgccgaagacagccctgcagcaagcctgcacacgggcttgggtgggttcctttggagaagatgtggctggaacacaaacaatctttgaaagaaataaatgtgcacacagaacacta

SEQ ID NO: 481 - DNA, 1200 bp, Homo sapiens
  source 1..1200: mol_type = genomic DNA
agctctggcacaatggcttttcttccttcctgggtttgtgtactagttggttccttttctgcttccttagcagggacttccaatctctcagagacagagccccctctgtggaaggagagtcctggtcagctcagtgactacagggtggagaacagcatgtacattattaatccctgggtataccttgagagaatggggatgtataaaatcatattgaatcagacagccaggtattttgcaaaatttgcaccagataatgaacagaatattttatgggggttgcctctgcagtatggctggcaatataggacaggcagattagctgatccaacccgaaggacaaactgtggctatgaatctggagatcatatgtgcatctctgtggacagttggtgggctgatttgaattattttctgtcttcattaccctttcttgctgcggttgattctggtgtaatggggatatcatcagaccaagtcaggcttttgcccccacccaagaatgagaggaagttttgttatgatgtttctagctgtcgttcatccttccctgagacaatgaacaagtggaacaccttttaccagtatttgcagtcaccttttagtaagtttgatgatctgttgaagtacttatgggctgcacacacttcaaccttggcagataatatcaaaagttttgaagacagatatgattattattctaaagcagaagcgcattttgagagaagttgggtactggctgtggatcatttagctgcagtcctctttcctacaaccttgattagatcatataagttccagaagggcatgccaccacgaattcttcttaatactgatgtagcccctttcatcagtgactttactgcttttcagaatgtagtcctggttcttctaaatatgcttgacaatgtggataaatctataggttatctttgtacagaaaaatctaatgtatatagagatcattcggaatctagctctagaagttatggaaataactcctgaaacatttaacttcaaacttcaggaaatgattaatgaattaaaaatgaaaaactcgaacttgacaatcagtaatttcaaaaaattaatgtcatcatgaccatgtagtttattctttctgatatttttgatttatgcttatttgttaagatcttgtacatgtattaaaaacttaaattaaatgcattcaagttaaaa

SEQ ID NO: 482 - DNA, 3195 bp, Homo sapiens
  source 1..3195: mol_type = genomic DNA
gatgtcgaaactaaagcctggaaaggtcaaagagcttgatgaaggtcaaataggtagtaaggggtggctggacccagaccagggctcctaagttcgtcgctttcctcaccgcgctgggctctctgagcgtcctaatagccacgcccacctcaaatggcgatcccagagagcatctggcttcaattttcctttttccggaggggagatggattccctggaatggaactgggctctggtgtatgagctcagtggagagcaccatgacgaagagtggtcagtgaagacttaccaggaagtagctcagaagtttgtggaaactcaccctgagtttattggaatcaaaatcatttattcggatcacagatccaaagatgtggctgtcatcgcagaatccatccgaatggccatggggctccgaatcaagttccccacggtggtggcagggtttgacctggtggggcatgaggacactggccactccttgcatgactacaaggaagctctgatgatccccgccaaggatggcgttaagctgccttacttcttccacgccggagaaacagactggcagggtacttccatagacaggaacattctggatgctctgatgctgaacactaccagaatcggccatggatttgctttgagcaaacaccccgcagtcaggacttactcctggaaaaaggacatccccatagaagtctgtcccatctctaaccaggtgctgaaactggtgtctgacttgaggaaccaccctgtagccactctgatggccactgggcaccccatggtgatcagctctgatgacccagctatgtttggtgccaaaggcttgtcctatgatttctatgaggtcttcatgggcattggggggatgaaggctgacctgaggaccctcaaacagctggccatgaactctatcaagtacagtaccctgttggagagtgagaaaaatactttcatggaaatctggaagaagagatgggataagttcatagcagatgtggctacaaagtgaggagaagctagccagccctctacaagctgtcttcttgcacacgctgtcacttcctctcactcgttcttgaatcagctccatgtgcccatgaaatcaatggcctctgtatggagcgaccctgtgagaagcacttggctggctgagcaaattcatcctctggaaatattctctctcagccacagtgacattgaccctcttggttttctcctgtctctggccatttcttccagtttccctatttcagagtcttctcctctctctgatctctgtgctgtttcctcaggactcagtcctgggctctcttctattctggtctctttatttttttatttttgtattttttcgagatggagttttgctcttgttgcccaggctggagtacaatggtgcgatctcagctcagtgcaacctccgccacccgggttcaggcaattctcttgcatcagcctcgcgagtagttggaattataggcatgtgccaccacacccagctgatttttgcatttttagtagagacaggttttcaccatgttggcgaggctggtatccaactcttgacctcaggtgatccactcgccccttggctcccaaagtgctggaattacaggcattagccaccatgcctggcctattctggtctctttaactctctcctctttatttctcttctctctctgtacacttttcctgggtggtctcatccattcctttgctttttcataccatttatttgttaatgattcccacatttatttatgcacttggagagctcacaggaatctcagaaactgatgaggtacaattctgaaccctcagtctcttccctttaaacctttctttttctctactttaatttttctaaagagtgtcttgctatgttgcccaggctggtctccaactcaagtgatcctcctgccgcagtctcccgaagtgctgggattactgacatgagccaccacactcagccctttaaacctttccctggcctttcccatagctggtgaaggacacctccatccattccacgcagttgctcaaagcagaaattttcagtgcaagtcttgatgctgcgccgtcccccactccctacatcagaacgcatccctcatctggactccagcggtggcttcttgatgctgcgcggtcccccactccctacatcagaatgcatcccgcatccagactccagcggtggtgctctacctgcacgctgttgccaagtccaagctaccatactcctgcctgagctatgacaacagcctcctcactgatctcccctttcttccctttgcctcctccagctcatttttcacagtgtagaatgacattttgtttgtttgttttgttttgtttgagatggagtctcgctctgttgcccagggtggagtgcagcggtgcgatctcggctcactgcaacctccacctcccgggttcaagcggattctcgtgcctcagcctcctgagtagctgggattacaggcatgcaccaccatgcccggataatttttgtatttttagtagagatggggtttcactatgttggccaggctggtctcgaacacctgacctcgtggtccacccgcctcggcctcccaaagcactgggattacaggcgtgagccacccggcctggcctagaatgacttttaaaagatcaaattaaatcaggtcactcctttgcttacaacgcagtgcgtttagaggtacaccccatgtctccacagggcatacagcatccgatttaatctggatccattccggcgccttcctctcccagtcacccagagggccccaaccccggcggccctttcttcctcaaatgtcctcggctctataccgtgcctgggtcttttctctttctctctgcctggaagattccttctttccccttttgtcttgcccactcctgtttacccttcaagtttcaagttcatgtcactgtctcagagaggttttcctgtgctcgccctgtttctctcaggaagccttgctcttttccatcatgcctctaatcacagcttataatcggatatttatttctgtgtctacagtcttgccctgccagactgtatgccccatgtgggcaggcgctcatgattgtttctgattgtttcacgcatgctgctaacccagagcctgggcccaaagctagttagtactcaataaacaatgcattgaa

SEQ ID NO: 483 - DNA, 987 bp, Homo sapiens
  source 1..987: mol_type = genomic DNA
cccccagaacaagatgggagtcatggccatgctgatgctccccctgctgctgctgggaatcagcggcctcctcttcatttaccaagaggtgtccaggctgtggtcaaagtcagctgtgcagaacaaagtggtggtgatcaccgatgccatctcaggactgggcaaggagtgtgctcgggtgttccacacaggtggggcaaggctggtgctgtgtggaaagaactgggagaggctagagaacctatatgatgccttgatcagcgtggctgaccccagcaagcagacattcaccccaaagctggtcctgttggacctctcagacatcagctgtgtcccagatgtggcaaaagaagtcctggattgctatggctgtgtggacatcctcatcaacaatgccagtgtgaaggtgaaggggcctgcccataagatttctctggagctcgacaaaaagatcatggatgccaattactttggccccatcacattgacgaaagccctgcttcccaacatgatctcccggagaacaggccaaatcgtgttagtgaataatatccaagggaagtttggaatcccgttccgtacgacttacgctgcctccaagcacgcagccctgggcttctttgactgcctccgagccgaagtggaggaatacgatgttgtcatcagcaccgtgagcccgactttcatccggtcgtaccacgtgtatccagagcaaggaaactgggaagcttccatttggaaattctttttcaggaagctgacctacggcgtgcacccagtagaggtggcggaggaggtgatgcgcaccgtgcggaggaagaagcaagaggtgtttatggccaaccccatccccaaggccgccgtgtacgtccgcaccttcttcccggagttctttttcgccgtggtggcctgtggggtgaaggagaagctcaatgtcccggaggaggggtaactgcaggaggccaaatgggccaccccttggaaata

SEQ ID NO: 484 - DNA, 2028 bp, Homo sapiens
  source 1..2028: mol_type = genomic DNA
caggaacttccgtcaagcccaggtgagaggtgccaggaggctgcctgggtcctcaagggggatatatgtccaaatggccttaccacaaggccccttcgccctcaaagttctgctcctcccgggggcttcttaggatctaaaaggatcagtcctagccatctcgtcagccatctcagcaagggctgacggggcggaacagcaaagcagaggcgggtcctgagagcgtggagcctgaagcccggcgccagagggagaccaagagggtgagatgcggctggaacccagccagagcggagactgaagcctgaactaggggccgggcctcaggcctaggaactagccacgagctgaaaaggaggcggatggcccggacagaagaggcggggctttcagaccagagggcggagccaagagctgaaaagggtggtgatttggtccagaagaggaagaacttaggctccggaggcagagccaaaggctgaaggggactactccctaggacagaggccgggaggtatcgggccgacgaagccgagtggcgcggaggagcggagccttcagccccgcggctgggccgagcccgaaggtggcgtcggtgtcggggagccgccgcgtgcaccggccgtcctccctgggccgcatcgcggtggtggtggaccagggctcgggcttcaccaaggcgggcttcgcgggcgagaaccagccgcgcatagtgctgaagagctctagcttggtgcccagctgggaccggccggtgctgcccggagcgccgggctgcgagctggcgggcggcgtggcgcgggcgcaccccatcaagcacggcgtggtggcggactgggaggcgctggaagggctgtgggagcgcctgctggtgggcggcctgcgggtgtgcccagagcagtggcccgtgctggtgagcgactcgccgttggcgccgcccgcgggccgcgaaagggtggcggagctgctgttcgagaccctggcagtgcccgcgtgccacatggctagcaccgcgttgctggcgctctgctccaccggcgcgttcagcgggctggccgtggaggcgggcgcgggcgtgtgccacgccacgcccatctacgcgggtcactcgtggcaccaggccaccttccgactgaacgtggcaggcagcaccctgtcgcgctacctgcgggatctgctggtggcggcgaaccctgacctcttgcagcaggccctgccccgcaaggccatcacacatctcaagaagcgcagctgctacgtgtccctggacttcgagggcgacctccgcgaccccgcccgccaccatccggccagtttcagcgtgggtaacgggtgctgcgtctgcctcagcagtgagcgcttccgctgccccgaacccatcttccagccgggcctgctgggccaggctgagcaggggctgcccgcgctggccttccgggcgctgcagaagatgcccaaaacgctgcggacacgcctggcagacaccgtggtgctagccggcggctccacactgtttcctggcttcgccgagcgcctggacaaggagctggaggcgcagtgccggcggcacggctacgcggccctgcggccccacctggtggccaagcatgggcgtggcatggctgtgtggaccggcggctccatggtggcctccctgcactccttccagcgccgctggataactcgggccatgtaccaggagtgtggctccaggctgctgtacgatgtgttcaactgagtcaggctggactggggggggtggcactgcgttgggggacagctctctatctaaagagtcaagtgtttggagctggcagggtcctcctggaggttggagctgactggatgggtcacccccataccctttctgggccaggagaaggtatttgggacccatgggaccctcattttgaactgcagtttgaatctccccaaccactgccagttcagagaatgccagtccagctgcctacccacagggccctactttatggcaataaaggtgatgccccacttgtgtccatgcca

SEQ ID NO: 485 - DNA, 1036 bp, Homo sapiens
  source 1..1036: mol_type = genomic DNA
ctcgccgcgctgagccgcctcgggacggagccatgcggcgctgggcctgggccgcggtcgtggtcctcctcgggccgcagctcgtgctcctcgggggcgtcggggcccggcgggaggcacagaggacgcagcagcctggccagcgcgcagatccccccaacgccaccgccagcgcgtcctcccgcgaggggctgcccgaggcccccaagccatcccaggcctcaggacctgagttctccgacgcccacatgacatggctgaactttgtccggcggccggacgacggcgccttaaggaagcggtgcggaagcagggacaagaagccgcgggatctcttcggtcccccaggacctccaggtgcagaagtgaccgcggagactctgcttcacgagtttcaggagctgctgaaagaggccacggagcgccggttctcagggcttctggacccgctgctgccccagggggcgggcctgcggctggtgggcgaggcctttcactgccggctgcagggtccccgccgggtggacaagcggacgctggtggagctgcatggtttccaggctcctgctgcccaaggtgccttcctgcgaggctccggtctgagcctggcctcgggtcggttcacggcccccgtgtccggcatcttccagttctctgccagtctgcacgtggaccacagtgagctgcagggcaaggcccggctgcgggcccgggacgtggtgtgtgttctcatctgtattgagtccctgtgccagcgccacacgtgcctggaggccgtctcaggcctggagagcaacagcagggtcttcacgctacaggtgcaggggctgctgcagctgcaggctggacagtacgcttctgtgtttgtggacaatggctccggggccgtcctcaccatccaggcgggctccagcttctccgggctgctcctgggcacgtgagggcgcccaggggggctggcgaggagctgccgccggatcccggggaccctcctactgatgcccgtggtcaccacaataaagagccctccaccctc

SEQ ID NO: 486 - DNA, 2857 bp, Homo sapiens
  source 1..2857: mol_type = genomic DNA
cgctcgcgtccgccgggcagtcccctgccgcagatccgcgcccgccgcgcgagggcgcccggggccgccgcccctcctgacccgggcctgggcgcgcctgcggaggccgcggtgggagggaccgtcccaggctccccaccccgcccagcaccttgggccccgccgcttccgctcgccctggggccgctcagggagccgggacgcgctgcctgggctccgcgcagccgatgacattctgagttcttcctctccataccgggctccacgtctcctgtcttctttacctgatccacaggacccctcaactttcctgtaagggaggctctattaccccgtttttcagagacgagaggtagggctcagagaggtttagttactttccaagatcacacagccagtcagggcagagccgggacacaaccctgtgtctctggcggtggctctatggactcggcccctctgttccccaggccccacctcttccagaacctcctgctcttcctgtgggccctgctgaactgtggtttgggggtcagtgctcagggtccgggcgagtggaccccgtgggtgtcctggacccgctgctccagctcctgcgggcgtggcgtctctgtgcgcagccggcgctgcctccggcttcctggggaagaaccgtgctggggagactcccatgagtaccgcctctgccagttgccagactgccccccaggggctgtgcccttccgagacctacagtgtgccctgtacaatggccgccctgtcctgggcacccagaagacctaccagtgggtgcccttccatggggcgcccaaccagtgcgacctcaactgcctggctgaggggcacgccttctaccacagcttcggccgcgtcctggacggcaccgcctgcagcccgggtgcccagggggtctgcgtggctggccgctgccttagcgccggctgtgatgggttgttgggctcgggtgccctcgaggaccgctgtggccgctgcggaggcgccaacgactcgtgccttttcgtgcagcgcgtgtttcgtgacgccggtgccttcgctgggtactggaacgtgaccctgatccccgagggcgccagacacatccgcgtggaacacaggagccgcaaccacctggcactgatggggggcgatgggcgctacgtgcttaatgggcactgggtggtcagcccaccagggacctacgaggcggccggcacgcatgtggtctacacccgagacacagggccccaggagacattgcaagcagccgggcccacctcccatgacctgctcctacaggtcctcctgcaggagcccaaccctggcatcgagtttgagttctggctccctcgggagcgctacagccccttccaggctcgtgtgcaggccctgggctggcccctgaggcagcctcagccccggggggtggagcctcagccccccgcagcccctgctgtcacccctgcacagaccccaacgctggccccagacccctgcccaccctgccctgacacccgcggccgcgcccaccgactactccactattgcggcagtgactttgtgttccaggcccgagtgctgggccaccaccaccaggcccaggagacccgctatgaggtgcgcatccagctcgtctacaagaaccgctcgccactgcgggcacgcgagtacgtgtgggcgccaggccactgcccctgcccgatgctggcaccccaccgggactacctgatggctgtccagcgtcttgtcagccccgacggcacacaggaccagctgctgctgccccacgccggctacgcccggccctggagccctgcggaggacagccgcatacgcctgactgcccggcgctgtcctggctgagcccctgcaggagccccggccacacacagcaagaaagatacatctgaccagcctcaacgtcaacgtatttcccctctcaccctggcttccaggcagctctgaaatacgtcccacctgtgcagctatgtgactccctcccacacacgcttaagacacctctgcatgcagtcaaagccactgtcacaagccggcaggcactggtgaggaggcactaaggagactctgacttttatttcgcctctctccttggctgccaggaagctcatagctatttatactcagaaagtttaacgctgctttctttctctttgcgcgcgtcacacttgcttggagacactgtcatgaacgagcatgacaccctgctgccctgggtacccagaagatcatctgtttacttcccagacactgtgctgtctctgctctctgctactcacacacaccctcatgtgtgaagggcagagacactgtcacaaacaggcatgccccttagaagacatgcctaaccaggcactgtaacgtaccaacgtaccaatttccccttttcccctggctaccaggaaactcggagacaatcttttcagcctcagcatttctggctggatttccacccatcaacacgtgcttgctcctcctttttttttttttctgaggtagacccttgctctgtcacctaggctgaagtgcggtggtgcaatcatggctcactgcagcctcaaattcctgggctcaagcgatcctcccacctcagcctccacagcagctggaactccaggtgtgaatcaccatgcccggctaacttttaaattttttgtagagatggggtcttgctacgttgcccacactgctctccaactactggcctcaaacgatcctcctgcctcggcctcccaaagcactggaatttcaggcatgcactatcgtactggctgttcaccccccttttattcctctttaatttttacaagcactttttaaaaaaaaattttactttaagttc

SEQ ID NO: 487 - DNA, 630 bp, Homo sapiens
  source 1..630: mol_type = genomic DNA
agagcccaagaacactggtggccaaaggatggtgtcttgtgaaaggagggcaagcaaaagtgtaggacaaattttgctttgggattttggttacacctgcagactatcccacagaaggaggaacagcactgaaatcctttctcgcaatcttcctgcattgtacacaggcagctctgcagggaagtctgtgactgcctggccagacttagggctcacgctctggtcagagttatggcaccccagactctgctgcttgtcctggttctctgtgtgctgctgctgcaggcccagggaggataccgtgacaagatgaggatgcagagaatcaaggtctgtgagaagcgacccagcatagatctatgcatccaccactgttcatatttccaaaagtgtgaaacaaataagatatgctgttcagccttctgtgggaacatttgtatgagcatcctatgagtgggagagtgggctgggatgtgcatcctgctccctgaacccttccatccgagactgtgcccacatccgaagcacaaggacatcaaatcatcagcacaagaacatcaacaggaatgccaccctccccagtgtctgaactccctgtccctgtcaaataaaccagaacaaatgcccatg

SEQ ID NO: 488 - DNA, 7390 bp, Homo sapiens
  source 1..7390: mol_type = genomic DNA
agggaaggggagcgcccgccccttccctgccgccgcgagcgccccgggaggggaccggggctgccgtccctccgcctcttcccccgcggggcgtagcgatggcccgggccagggccggggcgctgctggcgctttgggtgctcggggccgccgcgcatccgcagtgcctggacttcaggccgcccttccggccgacgcagccgctgcgcctctgcgcgcagtactcggacttcggctgctgcgatgaggggcgcgacgccgagctgacccgccgcttctgggccctggcgagccgcgtggacgccgccgagtgggccgcgtgcgccggctacgcgagggacctgctgtgccaggaatgctcgccgtatgcagcccacctctatgacgccgaggacccattcacgcccctgcgcacggtgcccgggctctgccaggattactgcctggacatgtggcataagtgccgggggctgttccgtcacctgtcaactgaccaggagctctgggcgctggagggcaaccttgccaggttctgccgctacctgtccctggatgacacggactactgcttcccttacctgctggtcaacaagaacctcaactcaaacctgggccacgtggtagccgatgccaagggctgcctgcagctgtgcctggaggaggtggccaacgggctgcgcaaccccgtggccatggtccatgccagggatggcacccaccgcttcttcgtggccgagcaggtggggctggtgtgggcctacctgcccgaccgctcgaggctggggaagcctttcctgaacatcagccgggtggtgctcacctcgccctgggagggtgacgagcgtggcttcctgggcattgccttccaccccagcttccagcacaaccgcaggctctacgtctactactcagtgggtatccgcagcagtgagtggatccgcatcagcgagttcagagtctccgaggatgacgagaacgccgtggaccacagctctgagaggataatcctggaggtcaaagaaccagcctcaaaccacaacgggggccagctgcttttcggggatgacgggtacctctacatcttcactggagatggcgggatggccggagacccctttgggacatttggaaatgcccaaaacaagtcggcgctgctgggcaaggtgctgcgcatcgacgtggaccgtaaggagcgcggcctgccctacggcatcccgcccgacaacccgttcgtgggcgaccccgcggcgcagcccgaggtctacgccctgggcgtgcgcaacatgtggcgctgctccttcgaccgtggcgacccctcctcgggcactggccgcgggcgcctcttctgcggcgacgtgggccagaacaagttcgaggaggtggacgtggtggagcgcggcggcaactatggctggcgcgcgcgcgaagggttcgagtgctacgaccgcagcctgtgcgccaacacctctctcaatgacttgctgccgattttcgcctacccgcacacggttggcaagtcggtcacagggggctacgtgtaccggggctgcgagtaccccaacctgaacggcctctacatttttggggatttcatgagcgggcgtctgatgtccctccaagagaacccagggacaggccagtggcagtacagtgagatctgcatgggccacggccagacctgtgagttcccaggcctcatcaacaactactacccgtacatcatctccttcggggaggacgaggccggggagctgtacttcatgtcgacaggggagccgagtgccacagctccacgcggagttgtctacaaaataattgacgcatccaggcgggcaccacctggcaaatgtcagatccagcctgctcaggtgaagatcagaagccgtctcatcccctttgtgcccaaagaaaagttcatcccgaagacacggagcaccccgcggcctacagcgcgggcgcccacgcgggcgccccgccgagggcgccccacggccgctccccccgcgccaaccccgcggccagcgcggcccacccagcagccagggagccggaggggcggcgggcggcggcgggggcggctgaactcggcgagccgggcgttccgggatggcgaggtgcgcctggtgcggcccgcgggcctgagctctggcagcgggcgcgtggaggtgttcgtgggcggacgctggggcaccgtgtgcgacgactcctggaacatcagcggcgccgccgtcgtgtgtcgccagctggggtttgcctacgccgtgcgcgccgtcaagagagccgagttcggccagggcggctcgctgcccattctgctggacgatgtgcgctgcgcgggctgggagcggaacctgctggagtgccagcacaacggcgtgggcacccacaactgcgagcacgacgaggatgcgggcgtcgtgtgcagccaccagaaccccgacctgtaggcaacacgccgctgccccaggccatcccgccggcgggggagcctggcaggggccgctccgccctgtgtgcgcccagcgggtgcacacgtgttctagagtgaagggggtgcgggtgtgtgctgtcctggggacatgtgtgaggcgctgcagtgcatgtgtgtcctctgcagacccaaggcaggagtgtgtgttgggggcggtgtgggctctggaagtgcatggtccatcatgggcgggaggagttcctttcttacctccaagcgtttcagacaccagcaggaacagcagccgggctgtgggaccctgaggagggagggcagccaggcttcgaggacggacatggcccctggctgtgctaacagaggcacagcttgcagactgagggcggtggggagaaccaggcttgtcctgcccacagctggaatggaaggtgcaagaacagccggagggtggcctgaggaatgtggcccggacagcatggcctggtgcccgcatcccccccaccccctggcagtcagaggcgctggagagaaccggaaggcatccagtggggaagggaaagccttctggaaggtgggagcagggtgagctgcaggcctggggccccactggaggggcaggctgcgtggaggagccagcacctgctcagggaggatggctgtgaggactggatgacctccaaggccgtatgctggagaagccactcagcagcatactcagtccttgtgggtgctcctgggatgggaccagcctcctccaaccctgaggcctgattctctcttgctcttggggcagaagccacccacactagctgggcagagctttcaccctggccctccagtgagtcggtgggcctccactactttcaaagctgtgtttgggccctggggccacctctgtcctttccatccccatccctgctcagtgtaaacccaggagacctgattcctccagccctacctcggggctgaccaggctgggggtccagtgaaactactgacactttttcacccagggctatgccaataatgtggctgtttacacaccactttcctgcctcctctctgacctgcacctgtgtgggagccggggtgggaaccaggagaaaggggtgaggcctcccgcttcccacctgcatcacaggtggaagctccttcactccagggatgctcggccctggctctgtgccaggccgcagaggggcacttagtatgactgcgctcagcctcggatgggagcacgggtggggggtgggtaagcagatgagtcaccaggcagtgaagacaggatgtggcccatgtcgggggttggaagaggtctgggtggggcacccaaacccaacctatgggggggctttgggagggggtgatgctgtgccaagttctgggagctggcaccaggggtggctgggcaggccttggggcaggcatgagtctggcagggtctcctagctgctagtatagggtctcctagccactagtataggatcctgggctgcagcagaaagctttaggtcactgtcttggactcctcatactctgtgctttacagaatgggaaactgaggcacacagaggttagatatcttagggcaccaagccagggaagggagaagtcaagtttgaatacagcagcttagtttagagtccccgcaccctaaccactgccctccccagctacactatgcctgcagagagcggtgtgctggggctcctgcctggtgtgggagtgccagcctggctgggaagcagctgatggagatccctgggggctcctcttgcctggcaggtgcccccgctgctggcctcatgctcctctcgggcctccagtggcccaggggaggttgagtgggcatcttcctgggatgcaggggagttctgagctctgacgccgggcgtgttaggagatagcaggccgttaatgaccatcccagccgaattcctcactgtgcagatgaggaagtgagctcagggaggctgagtgtcccaggcctgttgccagatgaggccacgctgagactggagccagggaaggtgcagcaagccttgaggccctcaagaatgcagccgagccagggccctgcttgcctggccccagaagctgttttgctcagagctggattaggagggttggcaaagggagctctgggtgcggcctcaggccctccagtacttctctgggcagttcgggctttggccttcagtcttccaggccaggcgctcttcctccccagcctccaactcatcacctctcaggccccaaaccaggcctgggctaggctgcagcctgcctcctggggactcactccacagtccccaggtcagtggtccccaacctttttggcatcatggactggtttcatgtaagacaatttttccatggatgggggttggggggatggttttgggatgaaatgtcccacctcagatcatcaggcattagattctcataaggagttcacagcctagatccctcgcatgcacagttcatagtaggtttcatgttcctatgcggatctaatgccactgctgatctggcaggaggcagagctcaggtgggaatgcttgctccccacactaccctgccccactgccactcacctcctgctgtgtggcccggttcctaacaggccacccatcagtactggtccgtggcccagggtttggagacctctgccctaggtagtaataagagtggacagctgttatatgtaaatacttgttccccgatgctggaaagaaatagcactaaaacataaatttaattctttcagcaaggcaattttactttctgcagaaagggtgctcatcgcagatggaacaatagtgagaggacacctgaacaaaggagggaagcaattgttagcccttatgcagtttgtccctgctactgtgtcctatgtccattggcagaagccagaccgcacaatctaaactaaaacccgattggctgtttaaaatttttctaaataggtaaaagtaatggaaggataaaggaaaagaggaagttgcttacgaaaggacttagaaaagtaataatattcccaaataaggaaggggtataggctgtgagctgggacatgcctgtgagcacgtccagcacagatatcttggttaaagtataaggacatagaacgtactatgtgcctgtgagcacgtctaacagttacatagaatagggcttgacaaagagttattagcataaagcaaggaggtttgaaggaagttcgtctttaaaagaaaccattatttctaacacttacgatttattctttaacaagaagggaaactttcaagaggaacttttactttctacaacagctgacctctgctgagcgcttactacatgccaagcactgctctgaaagtttaacataccattcactcatgtaatcctcatattaatgcacatttactcacgtggaagccgagttccagggcatttgtcacttaccaaatgtcacatagccaaaatttgaatttgagcccaggtagtccagctctgggaccctgctgtgggccttcctgctgggccacctcaagggcattgaaagccagccccaccccactgggacacaagttcagagaagggcagagctggctgcctgtccagtgcttctttcactccaccacctacagctggccgctgagggagcattcacatgtgactctgtccccagggactccgatcttgccttaaagtcctccagggcctctgaggatgggggcacagccttcaccctcaccccctctaatccaacctctagtcaatagccaggatcagattctcagagaggggctgccctgcccagtgccacacagcttagtgctggagcctcagggtcaatgctgcaggggtggcccagtgtccaggactgtgttcaagacatcagtcagaggtcacaacatcccaggccctagactgagcctaggggtcaccatgttgataccttagaaatgtttgggaggttcaaggaagctggaaactgggttccagtcctggctctgtgcctctctgagtctcattgcaaaatagaggtcaccagaaggattactggatgaaaaatgaggtagcattgcagacgtgcatggcacgtacactctaggttgcttcctagacagaaagctcagttcgaggctggtggcatccatgctggcagcagccaactgtctgcgacagagtgaggaggggcatgccacgtgaaggaccagcatcagaatgacatgggaagaaactctcacaatagcagaagaaagagctccttcagcctaacatgtagaactcaagtcttcttgtcgcgcttctgtcccctcgcccctcctcccccactgagaactagcttttactgagcagttattacatgccagctacctcgggtgtgtcagctcatttaatcttgacaacagctccacgagacaccctcaatatcactgtccctgttttccagatgaggggacagattcctagggtgttatgtaagtggtccccggggctttagaggcaggtttgcaccaaggcccattctcccagagccggatccttctccttccctgggatacagcacctccaccctgccaggccacccatgtaaaggcagccaattcagagccacctcttatgcctgcatctccccaacaattcctgctgggaaaccactcctcgtatggtgtcatctacaccagtgggtttcaagcttgagaagaatcaagttctacagggctgcttaaaacacaggttgctgggtcctgtctctcagagtttttgactcagtcttggttgagaattttcagttctagaagctcctgggtaatgctaatcctcctgttctaggggccatagtcattgtccatactggtgctatccaatagaaacataatgtgagccaaataggtaatttaaaatctgcttgtagccatgttaaaaaagtaaaacaggtaaaattaa

SEQ ID NO: 489 - DNA, 2913 bp, Homo sapiens
  source 1..2913: mol_type = genomic DNA
gtaggcggcaagaggcctcggcacccgcgaactcataaataccggggcggcgctggtggcgggagaggcgcgtgcgggcagccggcgcccccgaggcacctggataaccacccatcttgaaggagacctccctgccctgcctctgttgtcccccagagcactgcctgatcatcctctgttccccatcctcccagcccttcctgctgtacctgtggggagctgatctcctcagtccccctgcttttccccggtctgccatcaccaccccaccaccatgcacccccttcctggctactggtcctgttactgtctactcctgctattctccttgggagtccaggggtccctgggggctcccagcgctgccccagagcaagtccatctgtcttacccaggtgagccaggctccatgactgtaacttggaccacatgggtcccaacccgctctgaagtgcaattcgggttgcagccgtcggggcccctgcccctccgcgcccagggcaccttcgtcccctttgtggacgggggcattctccggcggaagctctacatacaccgagtcacgcttcgcaagctgctgccaggggttcagtatgtttatcgctgtggcagtgcgcagggctggagccgtcggttccgcttcagggccctcaagaatggggcccactggagtccccgtctggctgtgtttggagacctgggggctgacaacccgaaggccgtcccccggctgcgcagggacacccagcagggcatgtatgacgccgttctccatgtgggagactttgcctacaacctggatcaggacaacgcccgtgttggggataggttcatgcggctcattgaacccgtggctgccagcctgccgtacatgacatgccctgggaatcatgaagaacgctacaacttctctaactacaaggctcgcttcagcatgccgggggataatgagggcctgtggtacagctgggatctgggtcccgcccacatcatctccttctccaccgaggtctatttctttctccattatggccgccacttggtacagaggcagtttcgctggctggagagcgacctccagaaagccaataagaaccgggcagcccggccgtggatcatcactatggggcaccggcccatgtactgctccaacgcagatctggacgactgcacacgacatgaaagcaaggtccgcaaaggcctccaaggcaagctgtacgggttggaggatcttttctacaaatatggagtggatctgcagctgtgggctcatgagcactcgtatgaacgactgtggccaatttacaactaccaggtatttaacggcagccgagagatgccctacaccaacccgcgagggcctgtccacatcatcacaggatctgctggctgtgaggagcggctgacgccctttgctgtcttcccgaggccctggagtgccgtgcgtgtgaaggagtacgggtatacgcggctgcacatcctcaacgggacccacatccacatccagcaggtgtcggacgaccaggatgggaagatcgtagatgatgtctgggtggtgagacccctgtttggccggaggatgtacctctagggatggcggcagctctcctccagaagcctaggttttgccgccttggctgctgtgaccagaaactgcccaggcctgggtggggagttgggtgggccctgactcccctgccctccagaggccccatgtagggtacatgcagccctatggagctggggcagctgttccctcctggagaggtgggagtcctggctggctgtggagggagggcaggtgtgcgggcacagagtgacacacggcaggtttctgctggcagggccccaccctcctgcatagctctgatcgggcgaggtgcccacggggcttcaggaatgaagaggcttaagctctggctccatggattctgcacatctgcgggggatgccgctgggcttcctcctctcctgcccacctggcaagggcatcgccaggtgggcacaaccgtcatgacactactcaccagcaggtggcgtcaggggctttttcttctgagcccggcactgagagttggtctgaagcctggctccttcttcactgctccaggactgctatgaagagtcccttcatgcctcagtttcccagcctggcaccatcttattcgggaagaggagacgtgttaacactcttgcctcctagctaggacagatgacaaaccgcaagagccacagacttgccagttccttccctctttccttcctttctttcccttcttttatttattgaatcataatttattgagcatctaccatgtgccaggctctgttctcagtgctggagagacagctgtgaatgagacagagatctcggccctcacagagctgacatcctaaccagagagttggacaaaaatcacgataaatgagttggttaaatagcgatttgtgagtagaaaacgcagggacggtgagagagcagtttcaattttcagggggatctcactgagagggcaacatttgatctgaaggaggtggggaaggagccaagtgggcagacatctgggggaagagcattccaggcagaggaacagccagtgcaaaggccctgagacagaaatgtgcctggccggctgggtacagtaactcacatctgtagtcccagcactttgggaggccgaggcgggcagatcacttgagcccaggagtttgagaccagcctgggcaacacagcgaaaccctttctctaccaaaaatatgaaatttagctgggcatggtggtgtgtgcctgtagtcccagctgctcaggaggctgaggcgggaggatggcttgagcccaggaggttgaggctgcagtgagccatgattgcgccactgcaccccagcctgggcaacagagcaagaccctgtctc

SEQ ID NO: 490 - DNA, 411 bp, Homo sapiens
  source 1..411: mol_type = genomic DNA
atggcccgtactaagcagactgcccgcaagtcgaccggcggcaaggccccgaggaagcagctggctaccaaagcggcccgcaagagcgcgccggccacgggcggggtgaagaagccgcaccgctaccggcccggcaccgtggctctgcgggagatccggcgctaccagaagtctacggagctgctgatccgcaagctgcccttccagcggctggtacgcgagatcgcgcaggactttaagacggacctgcgcttccagagctcggccgtgatggcgctgcaggaggccagcgaggcctacctggtggggctgttcgaagacacgaacctgtgcgccatccatgccaagcgcgtgaccatcatgcccaaggacatccagttggcccgccgcatccgcggggagcgggcctaa

SEQ ID NO: 491 - DNA, 1692 bp, Homo sapiens
  source 1..1692: mol_type = genomic DNA
ggtcgctgccggagctcgccggtcgcccctgcgctgcgcggaccgcagccacagccggactggtgggaacggcggcgacagacggattggctgacagtcccagccctcagaacagccccggcctcgaagcgttggcgtctgcgtccgcgtcagcgtccgcttgtcccggagccggggcaggtgcgcgcggggggcgctccagggaccgcgctgaggccgcagacgccgcccgccgagccccgccccctgctcgccgaactcagctccccgttcgccgtcggggcgtccccgggcccaggggcggcggcggagctgatgtgcgcccgctgagcgcccccggcccgccatggccgcgcgccccggaccgctctggcttctgggcctgacgttgtgcgcgctgggcgggggcggccccggcctgcgacccccgcccggctgtccccagcgacgtctgggcgcgcgcgagcgccgggacgtgcagcgcgagatcctggcggtgctcgggctacccgggcggccccggccccgcgcgccacccgccgcctcccggctgcccgcgtccgcgccgctcttcatgctggacctgtaccacgccatggctggcgacgacgacgaggacggcgcgcccgcggagcagcgcctgggccgcgccgacctggtcatgagcttcgtcaacatggtggagcgagaccgtgccctgggccaccaggagccccattggaaggagttccgctttgacctgacccagatcccggctggggaggcggtcacagctgcggagttccggatttacaaggtgcccagcatccacctgctcaacaggaccctccacgtcagcatgttccaggtggtccaggagcagtccaacagggagtctgacttgttctttttggatcttcagacgctccgagctggagacgagggctggctggtgctggatgtcacagcagccagtgactgctggttgctgaagcgtcacaaggacctgggactccgcctctatgtggagactgaggacgggcacagcgtggatcctggcctggccggcctgctgggtcaacgggccccacgctcccaacagcctttcgtggtcactttcttcagggccagtccgagtcccatccgcacccctcgggcagtgaggccactgaggaggaggcaaccgaagaaaagcaacgagctgccgcaggccaaccgactcccagggatctttgatgacgtccgcggctcccacggccggcaggtctgccgtcggcacgagctctacgtcagcttccaggaccttggctggctggactgggtcatcgccccccaaggctactcagcctattactgtgagggggagtgctccttcccgctggactcctgcatgaacgccaccaaccacgccatcctgcagtccctggtgcacctgatgaagccaaacgcagtccccaaggcgtgctgtgcacccaccaagctgagcgccacctctgtgctctactatgacagcagcaacaacgtcatcctgcgcaagcaccgcaacatggtggtcaaggcctgcggctgccactgagtcagcccgcccagccctactgcagccacccttctcatctggatcgggccctgcagaggcagaaaacccttaaatgctgtcacagctcaagcaggagtgtcaggggccctcactctcggtgcctacttcctgtcagg

SEQ ID NO: 492 - DNA, 1067 bp, Homo sapiens
  source 1..1067: mol_type = genomic DNA
gcaggcgcggggcgcggggcaggcagagcgggcgaaggcgcggagctcgcagtgcagcccgcgcttcccagcgtccgtgcccggccgcctgtgcctaccgtgcccgtggcgccatggccgctgccgccctcccgccccggccgctgctccttctgccgctagtgctgctgctgagcggccgccccacgcgcgccgacagtaaggtgtttggggacctggaccaggtgaggatgacctcggagggctccgactgccgttgcaagtgcatcatgcggcccctgagcaaggacgcgtgtagccgagtgcgcagtgggcgggcacgcgtggaggacttctacacggtggagactgtgagctcgggcactgactgccgctgctcctgtaccgcacctccctcctctctcaacccctgtgagaacgagtggaagatggagaaactcaaaaagcaggcgcccgagctcctcaagagcatcaaggccaacctgagccgggagaatgaggtggtgaaggacagcgtgcgccacctcagtgagcagttgaggcactatgagaatcactctgccatcatgctgggcatcaagaaggagctgtcccgcctgggcctccagctgctgcagaaggatgccgccgccgcccctgccacccctgccacgggcactggtagcaaggcccaggacacagctagaggaaaaggcaaggacatcagcaagtatggcagtgtgcagaaaagctttgcagacagaggcctcccaaaacctcccaaggagaagctgcttcaggtggagaagctgagaaaggagagcggcaagggcagtttcctccagcccacagccaagccccgcgccctggcccagcagcaggctgtgatccggggcttcacctactacaaggcaggcaagcaggaggtgaccgaggcggtggcagacaacaccctccagggcacttcctggctggagcaactgccgcccaaggtggagggcaggtccaactccgcagagcccaactccgcagagcaggatgaggctgagcccaggtcctccgagcgagtggacctggcttctggcacc

SEQ ID NO: 493 - DNA, 847 bp, Homo sapiens
  source 1..847: mol_type = genomic DNA
cgtcagtctagaaggataagagaaagaaagttaagcaactacaggaaatggctttgggagttccaatatcagtctatcttttattcaacgcaatgacagcactgaccgaagaggcagccgtgactgtaacacctccaatcacagcccagcaagctgacaacatagaaggacccatagccttgaagttctcacacctttgcctggaagatcataacagttactgcatcaacggtgcttgtgcattccaccatgagctagagaaagccatctgcaggtgttttactggttatactggagaaaggtgtgagcacttgactttaacttcatatgctgtggattcttatgaaaaatacattgcaattgggattggtgttggattactattaagtggttttcttgttattttttactgctatataagaaagaggtatgaaaaagacaaaatatgaagtcacttcatatgcaatcgtttgacaaatagttattcaggccctataatgtgtcaggcactgacatgtaaaatttttttaattaaaaaagagctgtaatctggcaaaaagtttctatgtaatatttttcatgccttttctcataaacccagacgagtggtaaaaatttgccttcagttgtaataggagagttcaaacgtacagtctcccttcaacctatctctgtctgcccatatcaaaattataaatgaggaggacagcaggccccaagaaagtagggactaagtatgtcttgttcaaaattgtatattcagtgacttacactatgcctagcacacaacacacactgagtaaatatttgttgagtgaaataaaatcaagaaacaagtaaaaactga

SEQ ID NO: 494 - DNA, 776 bp, Homo sapiens
  source 1..776: mol_type = genomic DNA
gcgggagcggagagcggaccccagagagccctgagcagccccaccgccgccgccggcctagttaccatcacaccccgggaggagccgcagctgccgcagccggccccagtcaccatcaccgcaaccatgagcagcgaggccgagacccagcagccgcccgccgccccccccgccgcccccgccctcagcgccgccgacaccaagcccggcactacgggcagcggcgcagggagcggtggcccgggcggcctcacatcggcggcgcctgccggcggggacaagaaggtcatcgcaacgaaggttttgggaacagtaaaatggttcaatgtaaggaacggatatggtttcatcaacaggaatgacaccaaggaagatgtatttgtacaccagggtgcggaggcagcaaatgttacaggtcctggtggtgttccagttcaaggcagtaaatatgcagcagaccgtaaccattatagacgctatccacgtcgtaggggtcctccacgcaattaccagcaaaattaccagaatagtgagagtggggaaaagaacgagggatcggagagtgctcccgaaggccaggcccaacaacgccggccctaccgcaggcgaaggttcccaccttactacatgcggagaccctatgggcgtcgaccacagtattccaaccctcctgtgcagggagaagtgatggagggtgctgacaaccagggtgcaggagaacaaggtagaccagtgaggcagaatatgtatcggggatatagaccacgattccgcag

SEQ ID NO: 495 - DNA, 756 bp, Homo sapiens
  source 1..756: mol_type = genomic DNA
aatgattggtctgcagaccagctctatttagagaccactgggaaaagccggaccctacaaagtgggctggccttgctttatggctttctcccagattttgactggaagaagatttatttcaggcaccagccaagtgcgctgttctgctctggaagctgctattgcccggtaagaaaccagtatctggaaaaggagcagcgtcgtcagtacctcctacgtttgaaaaacagccagctggagaagacctacggggagatggccaagatcgtggatgtccccaccaagcagcttagagctgccaaccccatagactccatgctctgccacttctgccacaatgtcagctttccctgtaccagaaatggctgtgttgacatggagcacttcaaggtaattaagacccatcagatcgaggatgaaagggaaagacgggagaagaaattgtacttcgggtattctctcctgggtgcccaccccatcctgaaccaaaccatcggccggatgcagcgtgccaccgagggcaggaaagaagagctctttgccctctactctgctcatgatgtcactctgtcaccagttctcagtgccttgggcctttcagaagccaggttcccaaggtttgcagccagagtgaacattccgtccggattctttacaatggcgtcgatgtcacattccacacctctttctgccaagaccaccacaagcgttctcccaagcccatgtgcccgcttgaaaacttggtccgctttgtga

SEQ ID NO: 496 - DNA, 4145 bp, Homo sapiens
  source 1..4145: mol_type = genomic DNA
ggatgtataaagcgcggccccctgcggggagtggtggtgagtccgagggtgccacagcggccctgcccctgcccctgcccctgccctgagtgggcgccgcgctacgggggaggggttaacccacccctcctccccggggcctcacgcgggtgggaagggacagtcccagcgacagaccaggcgcctggacgcgccgtggacccgcgtgcggacggcggggacaggctccggtgctgagcgcctccggtgtccccagcagcactgacccacttgcaggccccggagctgagccgccagccatggccgctccccgcgggagggccgcgccctggacgacggccctgctgctgctcctagcctcgcaggtcctgtctccgggaagctgcgcggacgaggaggaggtccccgaggagtgggtgctcctgcacgtcgtccagggccagataggcgccgggaactacagctacctgcggctgaaccacgagggcaagatagtcctcaggatgcgcagcctcaagggagatgcggatctgtacgtctccgccagcagcctgcaccccagcttcgacgactacgagctgcaatcggccacctgcggcccggacgccgtgtccatccccgcgcacttccggcgcccagtgggcatcggcgtctatggacacccctcccacctggagagcgagttcgagatgaaggtgtactacgacggcacggtcgagcagcacccgttcggcgaggccgcctaccccgccgacggcgcagatgccggccagaagcacgctggtgccccggaagacgcctcgcaagaggaggaatctgttctctggacgatattaattagcattttgaaactggtacttgaaattctcttttgagtcgttgaccacactctgggatataaaaccctccatctgtgaagctgattgcagtttgctgtgaaccttgctacttgtacttggttgaagttctaggtacctttagtcaagggatggaaaaataaagccatacgcagttttgttacctcagttaccccaaaaataggaaaagcagcaagcacagtattttaaagatcataattcctataaaaggactgtgcacaaagtgtttagactccattttcattaggcaggttgactaaaaatgattgcagtaacaggtttatataaaatagagcaacctttcatgctgtgacacaaatcaaaaggttgataactttgtaattttactctggagattctaaccgaagttggtgtaagttttcaagagttactaaaatcaagttggaaatgatttacgtacacttccctgagcctggactaaagcctcatgcctgtaccccaagtaggtgatggtacttttctatacaaaaaggatttcctggcaggcaggtatttacaaagtttgttcctgtaccagtccaataatgacaactctaaatccagctgcaccaaatcttagtgggccatttgtcatacctatgaaaattcttcagttattaaataactttgtcagtgctacctatggtaggccggaaacaatgtagattaggaagtttcatgaaaattaacttttggggctatggagaaacagttaagtatcttaagttactaaacatttccactgaatttttggagtgagccaaggttactataaaatactttggaagatgaattctctacctggagttagtttcgagagtaagcgtagcttttaacagaaataactgcagattttaagctcataatttgcaaaaaaaatcttttattggcatgaaaataatgttgtaaatggcaccaaatattccacttaaatgcatatacagtattagagtcaaaaactattttatccctctttgctgtttttcccccttctgcccactttcctgggtgttgggggggcccgctgacaacagtcacaaatccagcgacctaggaaaaaaattgttaatatagaatgaaaaattatctttacaggactgaattttaagcccatctaaactcttctgccttagctatcactaatgatattcctctctggattttgtggtgagaagggcactatgagttccttaatttaaggaaaaaatgtaaacttaatcaatgtaatcaatgccatgcaaaattcattgcaagtcaagggggatgggagagatgcaatgccatacggtgatacggacctttaagaaagtacaatctttcctgaaattcaaacactatcatacttcaaaaggtcaaaacccattccggaatttggcttttttaagactttttctctcctgctcactggcagctgtgtgtcttaacagcattctttcaagtcctggtgtactctgctgacagcactttaaaactttaacagcacaatgataacttgtactacatacttgatctgaattactacagaaaaataattatgttgcttgcttaatgattcccaggaaacttcgttgtaggcatatattttataagagtattatacagtgttaactatgcaagtaagttctaaaattacacaattatctgtgtaatgttttagtccaattactgtgatttattcaactctgttctaaagttatctggaattgtcatgctgcctcaatttacagaaatctataatagatttctatagaaatgtataaagacgtagcagtcattttgttgtttctaaatagataacatataaaaataaaggctttgttactttagtatttcagtagaaaaacaccagctcattctatagaactatacttccaaaacttagcaggggcattctggcctttcacttatcctttagttggaattgtctagggatgaaaagctggtggacatgacctgtataatcacagctttggtcatatttgcacataagagtccacaagctcttcatgtcatgatagcgtttatgcagccttttggagtgctgggagagtctcatcacccaaagataatgtttgctctttttttaatctttacctgatggaatagcaccaaggcccacacaaaaagtatgataacctctgtcacacatatcacagaacatcatttcttcttcatggtggggttgtccacatataatgcatgttttacattccatacactgccatgggtaggtcttaatcatagaaacaagctccattgtcatatccaggcaagaaggatggcctaaatcaaaaccagtattagtggtatctcacataagaaattttaacttaatatggcacataaaatactagtttgctttaggacttccagagaatggctataatgtcaaatcgccaaagagaaatgaatatacaatgtagaggaaaacacatgggctgtgtctatgcctcacaagctaccctgtgtatttaatttggtgactctttggttgaaatctgcctgaaactataaattctagtttttgaaccaataaatacggtggttaaaattttaaaaagacatttcaatacttaccactattctcacattgggagcagtgtataagtgattcagcctttcctttcttgttggactccttacccttcagacaaattccacatatagcatttggaatgacctttggctggaagggtagaagagggctataaattcatgccagaagagcttactatgggtttaaaaggaattctgttactttattgccctatttttacttttggtaacttgctaatgaggaccattttgaaagacaaaacttgacaggagtctgcctacaatgtaagactgcctactgaagaaagcattaatttcatcataaaatttggtaaacagcatgatctcgtaagattaaatgtagcattctatactccctacatgcacagtaagatttgtttaatgaatggaaggaaagactaaatacaatgtcaaatgtcactattaattggacaagaaaatccaagtagcaaatgaccattatgtgtaagacttactctaaaaagaccattttaaatagctcatatattaattttgtttaaaacctgctattttccaaaactgcaaaactagagctataaaatctaagttaaaaaatcagcttatcctcattggtatagtggtatttaaaaaaaaatcagtttaaacatttttaattgaaagatgtctcatgcatacattggcgtgtacataaacgtttgtggaaaactt

SEQ ID NO: 497 - DNA, 3796 bp, Homo sapiens
  source 1..3796: mol_type = genomic DNA
gcgccggccactccgcgggacgcagccgccgcgaagcgccaggcggccgggccagcgagctcgggggccgaaggggaccccgggaccctcggggcgggacccgggccgaccagcggcgggggcggcgcggcgctgcaggcggacacccggcggggggcaccgcgcggggccgggcagaggcgcgggggccgctatgggccgccgccgcctgctcgtctggctgtgcgccgtcgcggcgctgctctcgggggcgcaggccaggggcaccccgctcctggcgcggcctgcgccgcccggtgcctcccgctacagtctctacacgacgggatggcgcccgcggctgcgcccggggccgcacaaggccctctgtgcctatgtggtgcacaggaatgtgacctgcatcctacaggagggagcggagagctacgtaaaggctgaataccggcagtgtagatgggggcccaagtgccccgggacagtcacgtaccgcacagtactcagacccaaatacaaggttggctacaagacagtgacagacctcgcctggcgttgctgtcccggcttcactgggaaacgctgccctgagcacctcacggaccatggggctgcctcaccccagctggagcctgagcctcagattccttcagggcagctggacccaggccccaggcccccttcctacagcagagcagcccccagccctcatggaaggaaaggcccagggctgtttggtgagcggctggaacgcctggagggtgatgtccagcgcctggctcaaacatatggtaccctcagtggcctggtggctagccacgaggatcccaacaggatgactggtggccccagggctcctgctgtccctgtgggctttggggtcatccctgaggggcttgtgggcccaggagacagagccagagggccactaacacctcccttagacgagatcctaagcaaggtgacagaggtgagcaacactcttcagaccaaggtgcagcttctagacaaggtgcatgggctggcacttggccatgaggcccacctgcagcggctgcgggaagccccaccatccccgctcacctccctggccctgctggaggagtacgtggaccgacggctgcaccgactctgggggagcctgctggatggctttgagcagaagctgcaaggcgtccagagtgagtgtgacctgcgggtgcaggaggtacggcggcaatgtgaggagggtcaggccgccagccggaggctgcaccagagccttgatggccgggagctggccctgcgccaggagctgtcacagctgggcagccagctgcagggcctgagcgtgtctggcaggggcagctgctgtgggcaactagccttgatcaatgcccgtatggatggccttgagagggccctgcaggcagtcaccgagacccaaaggggccccggtgccccggccggggatgagcttacgaggctctctgctgccatgctcgagggaggtgtggacgggctgcttgagggtctggagacgctcaatgggacagagggtggagcaaggggatgctgtctgaggttggacatgggggggtggggagtgggcggctttgggaccatgctggaagagcgcgtgcagagcctcgaggagcgcctagcaacattggctggggagctaagccatgacagcgcctctccgggcaggtcagctcggccccttgtacagacagagctggctgtgctagagcaacggttggtctcactggagacttcgtgcaccccgagcaccacctcagccatcctggacagcctcgtggcagaggtgaaggcctggcagagccggagcgaggccctcctacgccaggtggccagccacgcagcactgctccagcagctcaatggcactgtggccgaggtccagggacagctggcagaagggacgggcagctcacttcaaggcgagatcactctgctcaaggtcaatctgaactcagtgagcaagtcgctcacaggcctcagtgactctgtcagccagtactctgatgccttcttggctgccaacacgtccctggatgagcgggaacgcaaggtggaagccgaagtccaggccatccaggagcaggtcagcagccaaggctccaggcttcaggctggccacaggcaggtcctgaacctgcgtggggagctggagcaactcaaggctggtgtggccaaggtggccagtgggctgagccgctgccaggacacagcccagaaacttcagcacacagtgggacactttgaccagcgggtggcacaagtggagggtgcgtgcaggaggctgggcctgctggccgcgggcctggacagcttgcccactgagccactgaggcccagagagggcctgtggagccatgtggaccagctgaatcgtacgctggcccagcacacgcaggacattgcccgcctccgggatgacctactggactgccaggcccagctggctgagcaggtgcggccagggcaagccaactagacaggctggccaggacccaacccctagatcccaccaactcggggaacatcaccccagagcccagccttatccagcagcgccttccagccttccctggctagcccaaatggcactaaggaggccactgagggaatcctccacgtggctgtcccagccaccaaaacccatgcacagtgctgcagaaactggacagttccggacagcggtcaaggcaaggatgtcatgcttgaaggccagggtagacttgagagagttcacattccactgtcagcaaatcagtgtctggacagccagctgcagggcctgagcatggctggcaggggcagctgctgtggcaaactggccttgatcagtgtccgtatgtaaggccttgagaggaccctgcaggcagtcagcaccagcctcagcaactgtgcagagacctacaggcccacagccagtggcctgtccgcattgccctgtgcccacaagcaacagtccacagcccttggtggcttctgttccttgtcccctcggcttctcttcgcagccatcaggactaggtttgtgcaggaaggtgatgcccactggaactctcctcacacctggcagcttcatggatgttgtatctgaactaaggaccagaggctgccagatgtttctggctcctcacgtgtccttcaggacagaacagaagcacaaagactcagccaagagttctctttattccctttgatcctcccccaaggtgagggcttaggcagctgtagaaccccaggaaagaacggaatccaggcaatctgtttagagaccccccactccaaatttatccttttcctttccttcccctaagatgtttccagggccctctggtgcccacactgtcctcttccttccacttgggggtggggaaatccttcctgcgaggtcagggcatttctctacaaagtggcctgaatgaggccaggccctgagaaggagccaccagctggaggaaaggggctccaagccttgcttttaacacccctgcaaaacccccaccctcccaagatgttcacaaaaggtgagaaattcaggtacgaaaccatcaatggacaacttgaaaatgcatgttcctcaggcctatgcagttcccagagactcttgacaccggtctctgctgaggctcccagcctcagtttcccccacagcagcacgggccccactgtgctgctcttcaggtccccacagccctgcctttggttcctggacatttggtattctgccctccactctggtactatcagagtagggcaggctctggattaaagcttttagccggtc

SEQ ID NO: 498 - DNA, 2671 bp, Homo sapiens
  source 1..2671: mol_type = genomic DNA
aaaaaccaagctccaacactggatgtagcacataagtcaaaagctgcgtcagaaggttctaacttttgtcatcactattaccagcattgtcatcgttatcgttatcttcgtcatcatcattaccaccgttatacctgatactgccataacaatcagaacattatgtacaggcacggcatatcttcccaaagatcttggccactatggactacgatctttatttttcttggagtggcggcaatcttgggagtaaccattggtcttcttgttcattttctggcagttgagaagacttactattatcaaggtgattttcatatttctggagtcacatacaatgataattgtgaaaacgcagcttcacaagccagcacaaatctaagcaaagatattgagactaagatgttaaatgcatttcaaaattccagtatatataaggaatatgtcaaatctgaggtcatcaaacttctgcctaatgccaatggttcaaatgtgcagttacagctgaaattcaagtttcctccagcagaaggagttagcatgaggactaaaatcaaggctaaattacatcagatgttgaaaaacaacatggcatcctggaatgcagttcctgcttccattaaactcatggaaatcagcaaggctgcttctgaaatgcttaccaacaactgttgtgggagacaagtagccaacagtatcataactggcaacaaaattgtgaatggaaaaagctccctggagggggcatggccatggcaggccagcatgcaatggaaaggccgtcactactgtggagcctctctgatcagcagcaggtggctattatctgcagctcactgctttgctaagaaaaataattcaaaagattggactgtcaactttggaattgtagtaaataaaccatatatgacacggaaagtccaaaacattatttttcatgaaaattatagcagtcctgggcttcatgatgatattgcccttgtgcagcttgctgaagaagtttcttttacagagtacattcgtaagatttgtcttcctgaagccaaaatgaagctctcagaaaatgacaatgttgtagttacaggttggggaacactttatatgaatggttcatttccagtgatacttcaagaagactttttgaagattattgacaacaaaatttgcaatgcctcatatgcatactctggctttgtgactgatacaatgttatgtgctggatttatgtcaggagaagctgatgcatgtcagaatgattctggtggaccactagcttaccctgattccagaaatatctggcatcttgttggaatagtaagctggggtgatggatgtggtaaaaagaataagccaggtgtctatactcgagtgacttcttatcgcaattggattacatccaagactggactctgaaaaaaaaggaattatacaaaggaacataaagaccactgtaggctatccttatctgtggctttgggatctttttattttgattgttggtaaactaatcattttattatatataaaaatataaatgtctttattaatattttattatatctaaaacactgtccatgcatttattaatcttttaaattaatgtaagagataggaagaggccaggtgtagtggctcatgcctgtaatcctagcactttgagaggccgagataggcggattgcttgagcccaggagtttgagggcagcctgggaaacatggctaaatccgtgttcaaaaaatacaaaaattagctaggcatggtggcgtgcacctatagtcccagctattcaggaggctgaggtgggaggattgcttgagcccagcaggttgaggctgtggtgatttgtgattgcgccaccactgcactccagcctgggcaacagagtgagaccctgtctcaaaaaaaaaaaaaaaaaaaggagagaagaaaataaagaaggctaatatataatttttcttaatagctgagttgtgattcattttaccattatattcagaattgaccttaatttgttttccagaatcaaaagaaaataaaatataaattttgaaactatgagaacatatataggggatttatcaaatgagttactttttattatatcaattataatttcattttattaactggaataagtgcgaaagtgtacattactttttaacttatatgtgaaatgattcatgtacctcacaaaatcatgcaatcttgcagtgaagaaggagtatcagagctccagctacactgagtctttcaatttacagatcaagaaactgaagaccagagaagagaaatgatttggttaaagtcactctccatcatctgtgataagttgacaaatttatccttacacaaatttgtcctcattgagttgacatccaaaatttgtcaggaattaaagaatgacttttgagtggcaattatttatataacattttccattgtcttcatattcaccttttgtcatttgtttgctttctcttgcagcaaaaataatatgaggtcatcaagggcagagaactgtgtggcatctccttatagtaaaagtgcaatcatatggatggctaactttgtaatctctacaaataatttaccttatgtaattttccaaatgtaaaagtcaccaaaaacttaaaggcattaaaataaactaaaaaagtactcatttcttca

SEQ ID NO: 499 - DNA, 862 bp, Homo sapiens
  source 1..862: mol_type = genomic DNA
gtaaaagcttgaagtgcagtttgctgctgagtacagaagacctttgcaaacagagaggggagattttctctgtaaggttgcaaacaaggtcctggaagataagattccccgccatgttatcctccgtggtgttttggggactaattgccctcattggcacttccaggggctcataccccttcagtcactcaatgaagcctcacctacatccacgcctgtaccacggctgctatggggacatcatgaccatgaagacctctggggccacttgtgatgcaaacagtgtgatgaactgcgggatccgtggttctgaaatgtttgctgagatggatttgagggccataaaaccttaccagactctgatcaaagaagtcgggcagagacattgcgtggaccctgctgtcatcgcagccatcatctccagggaaagccatggcggatctgtcctgcaagacggctgggaccacaggggacttaaatttggcttgatgcagcttgataaacaaacgtaccaccctgtcggtgcctgggatagcaaagagcacctttcacaggctactgggattctaacagagagaattaaggcaatccagaaaaaattccccacgtggagtgttgctcagcacctcaaaggtggtctctcagcttttaagtcaggaattgaagcgattgccaccccatcggacatagacaatgacttcgtcaatgatatcattgctcgagctaagttctataaaagacaaagcttctaggcaaagctctgtgggtgggccaggttggcagagtgctcagatggccgcctttgagagttttacgtgaatgtgttgtatacaacactggcaaagaaatgattaaaatcatg

SEQ ID NO: 500 - DNA, 616 bp, Homo sapiens
  source 1..616: mol_type = genomic DNA
ccctcgccgcagatataaggcggcccaggcggtggctgctccgagcccggacgccgccgcccaccagtcagccggcgtccccatggcccggtccgcgacactggcggccgccgccctggcgctgtgcctgctgctggcgccgcctggcctcgcgtggtacaagccagcggcggggcacagctcctactcggtgggccgcgccgcggggctgctgtccggcctccgcaggtccccgtacgcgcggcgctcccagccctacagaggggcggaacccccgggcggggccggcgcctccccggagctgcaactgcaccccaggctgcggagcctcgctgtgtgcgtccaggacgtcgccccaaacctgcagaggtgcgagcggctccccgacggccgcgggacctaccagtgcaaggcgaacgtcttcctgtccctgcgcgcagccgactgcctcgccgcctgagcccggacctctcctggcaccgctgggggccccccgcccccaccgtcccactcggtgaccccaggcccctccggcgcgggatggcgccccaggtctcccctactccgctcaccccgcagttaatggcaaacgaataaataaatgaggcggcctcgg

SEQ ID NO: 501 - DNA, 2614 bp, Homo sapiens
  source 1..2614: mol_type = genomic DNA
cggacggcgcccggagcgcggatctcgccttgtggaggacagcgcgtcggctgcggttctctctcgaccccttctgcccggcgcttcggcccgggccgctcaggtgcagagcatgaataatctttcatttagtgagctatgttgcctcttctgctgtccaccttgtccagggaagattgcttcaaaattagcgtttttgccacctgatccaacttacacactgatgtgtgatgaaagcggaagccgttggactttacatctgtctgaacgagcagactggcagtattcttctagagaaaaagatgctattgagtgtttcatgactagaaccagtaaaggcaacagaattgcttgtatgtttgtacgttgttcacccaatgcgaaatacactttactcttctcacatggaaatgctgttgatcttggtcaaatgagcagcttttacataggactaggatcacggattaattgtaatatattctcatatgattattctggatatggtgccagttccgggaaacccacagagaagaacctctatgcagacattgaagctgcttggcttgctcttaggacaagatatggcattcgccctgaaaatgtgattatatatggccaaagtatagggacagtaccgtctgtggatcttgctgctcgatatgagagtgctgctgttattcttcattctcctctgacttcgggaatgcgagttgcctttcctgataccaagaagacctactgttttgatgcattcccaaacattgacaaaatctctaagataacctctccagtattaataattcatgggactgaagatgaagtcattgacttttcacatggcctcgcattgtttgaacgttgccaaagacctgtggagcctctctgggttgaaggagcaggtcacaatgatgtggaactttatggacagtatcttgaaaggttgaaacagtttgtgtcacaggaactggtaaatttgtaaaatattctgtaaatttgctactgggttttcctttcttgctgaactgcactctttggtaaataacataaaacctgaaggttttgtttgcaaatcatgtcagttgccttcataaatgtacaggtaatgatttgttaacagacttaatgaaggttttaattaccagaactaaaaactggaaataacagtaccgtgcagtcaggctgtgtaatttatattttttctgtgaatttttttttaacatcaagatgagtactgtatgagattttaattctataaaatcaaatgctgtaaaagtattgccaaatgcttttgcatactagaaacaaatttataaatatttttaaaacatctcaatatattaaatcttatcctggaatacaactgtaatattttgaaaaaagctatgtatctaaagcaatttaagtactcataatggaatgaactgtaaaagagatttaaaaccatgcaagttcactagaattaacctaaaccctgttgtacagggatagaggtttaaagttattttattgtaaaatacattgaattttctgtatactctgattacatacatttatcctttaaaaaagatgtaaatcttaatttttatgccatctattaatttaccaatgagttaccttgtaaatgagaagtcatgatagcactgaattttaactagttttgacttctaagtttggtactgtgaggcaagtacttaaaattttcatgctggttacttaaaaggcatttagagatttcaagaatgattttgtatacgatgttttaaattttgactgatctcatagtcttcatagaattgcagtagtcttcattgtatgaaatcccgaaagtccatgagttgatcttaaagaccactaacagactggctatcagatcccttttcactttggctatttttttcattttttgagatggagtcttgctgtgtcactgaggctggagtgcagtggcgcgatcttgattcactgcaacctctgcctcccgggatcaagtgattctcctgcctcagcctcctgagtagctggtattacagatgcttgccaccacgcctggctaatttttgtatttttagtagagacagggttttgccatgttgatcaggctggtcttgaactcctgacctcatgatctgcccttggcctcccaaagtgtcggaattacaggcatgagccactgcgcctggcccactttagctatttttaaaaataggacctattgttttggattactatctgagaatttcatggattcactcctgggtataggagataagaatacgtttaattcataacttttatattaaccaatatagtaaaaaaataaagctcacacatacaaaaactaagttgcctttccttgaatgaaccctgtctgaataaaacaatgaaaaataaaaataaaattaatggtatgtagtctaatttgtaaatgaatgaatatggaaataatacacactgtggatatattttaaggccttatgtagttttaattgttctgctcgttccgtggttatgtttaagactatagtatatgactctcttcaaagtatatcaagtattgtgaatgctttggttcagatgtgtcaaattaacagtaaaacaacaaatataccactga

SEQ ID NO: 502 - DNA, 887 bp, Homo sapiens
  source 1..887: mol_type = genomic DNA
cgcggtcaggccaggccgggtccaattaggggactcacagcctgccccgctgtgcaccccgaggaggcccggcccctgtgtccaatccggaagtcgcagggaagtggggaggtcaggatggtggcgcccgcggctcgggtcttcctccgggcagtgcgcgcggctctcacttccacggtcccggacctgctctgcctcctggcccgaggctccccgcgtggcctcgcgtctggtcgcctacccctcgcggtccactccgcccagcatggacctggatccggggcgccttggttgcgaattgccaggagggccctgagatttgtgttgtcaaaacactggggggatgattgttacctgacaaaccgcctctggcaggacctgaagcctcccagtcacgtcgagaacgggcaggagctcaggttggcgccgccggtgcagtgggcattacaggtgcaagggaaccagttgcaaactgcagtgctgtgcttgaggatggctcctcctgagccggcaggctcccgccaaagaatttagaacgagtctacgtggacacgcaagtttcagcgagcggggatttcctgcgaggccgagcgcgaggaacagccggccccggaggctcgggctcggggtctccccggggacgcggccgactgagaaggccggggcgctcgccgggcgcggcgccgtcctccgtgtcgcggggacggaaggaggcgacgcaggccaggagtcgtgcgcgcgggcggcgagggggcgctgtggcccgtgtctgccggcccgagtcccggcaacggtgggcgcgacccacctcctcccccggcggcttaattcggggaagaagaaaaaacggcatcgaggcatttcaataaaacctaagcgactcctga

SEQ ID NO: 503 - DNA, 2173 bp, Homo sapiens
  source 1..2173: mol_type = genomic DNA
gggccgggcgaggccgggagcgcgcgcccccgcccccgcccgcccgcctcctgcccgccctccggccgcggagctggaaaccgggctccgcgcgtccggggcggctggcggcgcgggcaggcaggcggggaggacaggctgggggcggcgaccgcgaggggccgcgcgcggagggcgcctggtgcagcatgggcggcccgcgggcttgggcgctgctctgcctcgggctcctgctcccgggaggcggcgctgcgtggagcatcggggcagctccgttctccggacgcaggaactggtgctcctatgtggtgacccgcaccatctcatgccatgtgcagaatggcacctaccttcagcgagtgctgcagaactgcccctggcccatgagctgtccggggagcagctacagaactgtggtgagacccacatacaaggtgatgtacaagatagtgaccgcccgtgagtggaggtgctgccctgggcactcaggagtgagctgcgaggaagttgcagcttcctctgcctccttggagcccatgtggtcgggcagtaccatgcggcggatggcgcttcggcccacagccttctcaggttgtctcaactgcagcaaagtgtcagagctgacagagcggctgaaggtgctggaggccaagatgaccatgctgactgtcatagagcagccagtacctccaacaccagctacccctgaggaccctgccccgctctggggtccccctcctgcccagggcagccccggagatggaggcctccaggaccaagtcggtgcttgggggcttcccgggcccaccggccccaagggagatgccggcagtcggggcccaatggggatgagaggcccaccaggtccacagggccccccagggagccctggccgggctggagctgtgggcacccctggagagaggggacctcctgggccaccagggcctcctggcccccctgggcccccagcccctgttgggccaccccatgcccggatctcccagcatggagacccattgctgtccaacaccttcactgagaccaacaaccactggccccagggacccactgggcctccaggccctccagggcccatgggtccccctgggcctcctggccccacaggtgtccctgggagtcctggtcacataggacccccaggccccactggacccaaaggaatctctggccacccaggagagaagggcgagagaggactgcgtggggagcctggcccccaaggctctgctgggcagcggggggaacctggccctaagggagaccctggtgagaagagccactggggggaggggttgcaccagctacgcgaggctttgaagattttagctgagagggttttaatcttggaaacaatgattgggctctatgaaccagagctggggtctggggcgggccctgccggcacaggcacccccagcctccttcggggcaagaggggcggacatgcaaccaactaccggatcgtggcccccaggagccgggacgagagaggctgagggtggtggcggcccctgaggcagaccaggccaggcttcccctcctacctggactcggccagctgcctccagggaccgcccgtccatatttattaatgtcctcagggtcccttctgccatctaggccttaggggtaagcaggtctcagtcctggcaccatgcacatgtctgaggctgagcaagggctgagaggagaggcttgggcctcagtttccctctgtgaagtggggggaggcaggccttcaaggagggatagaggtacaaggcttcgtctcatctgctgtctgagcatccaggcccaaaggcactgagggagtcaggagctggggctcggcacatgcagagatgacagggcagggggcagtcttcctccccctccccgaccaaacctcggggagccctcctgtgcccctccctccttgttgtccagtgctgggctccccaccccgaggtcaggctgcccaatcctctgactggatcaccgggggcttcttgcctcagttcttccctctgagcccccaggccctcccgcatctcaggttggggatggggacatggagaggaaggggccgcctactcctgcaaatgcttgtgacagatgccaggaggtagatgtgtgctggccaataaaggcccctacctgattccccgca

SEQ ID NO: 504 - DNA, 2065 bp, Homo sapiens
  source 1..2065: mol_type = genomic DNA
ataccacccgcgcccgggagggaggggaggaaggttagggaggcggagagggaccgcgcccgcaggagagaggcgcgggccagggctctagcagggactggggccgcggcaggggtagcaaggtgagtcggtgcttgccaagaggcagagcgcaaaacctactaggagatcgcgcccggtgagcagcacccgcagctcagagcccgggacgtccggagcgcggggagcagtcccctctccatcagggagtggtctatctgggcagtctgggacccaggcaccgcgccatccctgagagagcagcagtctggagagcaggcatctcagatccctaagaaaccagccgtccgagaagccgcggatctcaggtgcccaggatcgttaggactgaacgggagggtactagaggaccactggctctggaccgtcgggagctgcccctgacgtaacccacgaggggcctccccttgacggacggcttggggagcggcaccgccgcggctggagcccgcagaggcagggtaaggggagcggggggcagccgtcgggggagtgcagacccaggcccaaggcgggtcaccgcctcctggcccgcggagagccccggccccggcagccattgcgcccaagagtgaggaagatttgctggccctggcagcgtcgcggctgagccgccgcaagagggtggcgggcgcggccgtcggagtggccatggtgctgctgctgctggtggccatcccgctgctggtgcacagctcccgcgggccagcgcactacgagatgctgggtcgctgccgcatggtgtgcgacccgcatgggccccgtggccctggtcccgacggcgcgcctgcttccgtgccccccttcccgccaggcgccaagggagaggtgggccggcgcgggaaagcaggcctgcgggggccccctggaccaccaggtccaagagggcccccaggagaacccggcaggccaggccccccgggccctcccggtccaggtccgggcggggtggcgcccgctgccggctacgtgcctcgcattgctttctacgcgggcctgcggcggccccacgagggttacgaggtgctgcgcttcgacgacgtggtgaccaacgtgggcaacgcctacgaggcagccagcggcaagtttacttgccccatgccaggcgtctacttcttcgcttaccacgtgctcatgcgcggcggcgacggcaccagcatgtgggccgacctcatgaagaacggacaggtccgggccagcgccattgctcaggacgcggaccagaactacgactacgccagcaacagcgtcattctgcacctggacgtgggcgacgaggtcttcatcaagctggacggcgggaaagtgcacggcggcaacaccaacaagtacagcaccttctccggcttcatcatctaccccgactgagccggccccgccccgtgcccccgctcgccccttctctcccgtcctcacccacctcctgcccgccccacccgaggcgccaccccaccctttgagagcctggcggtggggtggacccttccgttcccggaggcggcctaaatgggcgaactcttggtgctcaagggtataagtggccgggaagaggaggagacccggccagaggagcagagcgacttccggagggatcacccgcacccaagtgcgcgctggaccccataggggcagaggtcgtggctttctcttttgtacagagatggggagcagttttaatagcgggactcagaggcccagaaagccggagggaagcccccgcagcttgcgagggaaataacagaaacaggaggagcccatttaggcaagagaagacattaaaacagggtagtgcaggttctccgtcacaactttctctcgccaccctctcgtcccctcgtctccactttcaggctcaggctccagccttggcagccttcctgtgaactggaggaaccagtgaattctttcctggcatttaaaacgcattctgtacagtccccattcccccctatccggactaggccctggggctacagctgctgctgcctcttctaataaagtgagg

SEQ ID NO: 505 - DNA, 373 bp, Homo sapiens
  source 1..373: mol_type = genomic DNA
ggcacacagaccactggacaaagttctgctgcctctttctcttgggaagtctgtaaatatgaagctgtttctggttctcattattctgctgtttgaggtactcacagacggggcaagactcaaaaaatgcttcaataaagtaacaggctattgcaggaagaaatgcaaggtaggagaaagatatgaaataggatgtctaagtgggaaattatgttgtgctaatgatgaagaagagaaaaaacatgtgtcatttaagaagccacatcaacattctggtgagaagctgagtgtgctgcaggattacatcatcttacccaccatcaccattttcacagtctaatcctaaatctagcccttgtctcgctggtctcca

SEQ ID NO: 506 - DNA, 4829 bp, Homo sapiens
  source 1..4829: mol_type = genomic DNA
aaaaacgctgtccggcgccaggcgcccacctgcaagcccaagccggtgctcggccagttacaaaagaaatggtcaggatctggacaacgataatgatagtattaatcctcctattaagaatcggcccaaacaaaccctcgctgtcagggcgacaggcgcccgcccaagcccagacctcggacctggttccaagcctgttcccgctgggtctctgggcgcccggtttctgcacctggagctcgcccgatgaggacaaggtctggaggccggcctgggaacaggggccgaagggcgagccggaccctaggggattgaggccgaggaagccggttccggggacgggcaacagggactcagggaccagaaggcggctgcaggacgcgaccgagcaggaccccaggcccgggaacgacgtcgcgagcgctgagactgccgggcctcccagcccatctggcattcgagcgcaggaccgggcgccccggcaccgccgcgcgccacccgctaggatgccggtggccccagcgccctcagccgacggagagccgctgcaggaacagggaggaggccttttccaccgcacccggagcgtttacaacgggctggagctgaatacctggatgaaagtggagaggctgttcgtggagaagttccatcagtcgttttccttggacaattaacaagttaggcttccacagtgccagggcctggggatgctggacgtgggagagggttgtggtcgttagcctgggaaaatcattcttttaaacaatattcgccggaaaattagttttttcctaacatttctcaaacaaggcaattagggccgtcagaatcggtgctggaagacgaagtccccacagtgcaataatgaggttcccacggaaaatcagtacgttgtgttcgtaactgagataacagctagagaaggggctttgggctttttgagtctcccaatagtcagtctctctctctctctctctctctctcttcctctgactttctggctttggacactcccaatggtatatttctttgtggtgtttttatatttggatataagagaggaacttcttgttggatttttaagggaacacacttcgttttgacccttccaataaggaaaggggagctacaggaacagagagctctttagaaggttacttttaaatggaggcccccccattcatggtacccactcccacttggacctctgagacctccagaattaggcatcattctaaaatctggacattagaagtcacagactttgtatataaccacatattcataatttatcttttcaatgttttttattcatagatgaaaatcttgcaggcatagttaagaaaaatataattcctagaaagtacaagggaaggattatgctctgcagatacatgactaacaaggatagctggccatgcccagggctggtgttggttgaggaggtggtgatggtgcggggcatgtgtgtgtgtgtgtgtgtgtgcgcttgaggagttgtggaagtgttcatatctgtaaagtattatttcatggatgcagaccttaatgctaggttgaataactttgttgccatagaagaagaaccgcacgtcaggcttttttcattagcaaaccagtaagcactcactttgggcctctgaaatcacttccatcacctaacaccagagatacaaactgaagctagcccttaagagcctccccctaagatttagagagaatgatttctcaaccagttttcatctttgaaagtgccatttctccctttatcattgtgatttttattcaaatgcatgagtctctgattttctaccatatacaaagggtagagactacagtttcctatagaagaaacttcacatagtggccgaaggatcttatttctcaaaattcaggaactggtttcctctttctggaaattatgacattaacttgatttcatggtatctctttcatcttcctcaatgcctgtgctgtatgtatatttttattatatactgtaggtatatttttattaccaaaaaaaggagaatttgagcatgccacaatcttgaaaaatctgaggttgccctgctgtagaaccctttaactgccaggactttgtactgtttcccaagtgttaccagagccaggccgccagccttatgcagtctgtttaccttagctggaaccagggtgctgtgctgtgggttctatgaaactttctgtttcttcatatttggctttgtaattcctttcttatcagttttggaggcatttcctattattcctctgccatatgttttctgccaaattaattgccttaagattttccttaagcttttggaaatgtataatgtttgagaaaaaagaaaaagaatagactgagtggaatcgtatctagtttcagttaataacatgtttcagttgatgttactgttatagctactgggcataaagtctccttcccttttttgaatcctatttttgaggcattgaagctgtgtctgtaagagacaataggccagttgggttaaatcagtgacgagattgtccagtgcagattggtgcccagtgagtggatcttcactgctcacaggccggactggggtcagctcacacagcgaggtgacggtccgctcctcaagcagtggatggtgctcttcggccttgcagatgccgctccattttcctggcttcaaaattttccagatatttcagtgcccccagaatgacatgctaacattctgctggcatgggagcatgaggcagtttgtctctaaaacatgccagagaatctcttgtcactacctaggcaaagaaccagtggcaaggtggcagcctcccaaagagctcatccctaatgtgacatcctggaatcagatggcacggacaccggcccagccccttcccagctctgtgactaaggacaagtgacaccccccctcccccagcctcggtctcctcctgtgtacattcagaaggcagatgctgccatgaggccatgtgtgctatgtccatggtgcaaggtggcacgcatgccgagtcaccaggtgagactgccgctttgggaagggataggaaggatctccggtagccttcgtgggcaggatgcctcttatttgaatgtgcctttagccacctcacagagcctatttccacatccctgtggattcatccctgtggaaatcttgagaatcatttatcctatgctgtcatgaagcagcagcagaatggagaaggtttaaaaagactcatggacaggcaaagcggtcaaacacctcctggctcagacgcacttgccttcccacacacaagtctggaagctcaggatggtgttcacggaggcagatgctcggggccggggcctgagtttcctggggcacagcctccatatctggggttccctggactatgcccagatagctcataatgtcccagccttatttgtgatggagaaggacttggggaaaagccaccgggaagcagtaagtctaaccagggaagtgcactgacttgcatgctttgaagaagagaagggagaaaagatacaaaaccctcacctggtttgtctgtaacagttgttatttctcaggggagctgcattaatgggccaagcctgtgcagctgggtgtgtgaagcatgcattttgcaatggactgtctccaaaagcagagcgaggtcacccaagaaatctagagcaagggaaaatactcattagcaaaggaattttgctggagccttgtaacggccgactcattatttcctttccaagttattttaaatgaaattttaaaaaacatcttgctttccaagaaattttgcttgttggcatatgtttggtgttttgattcagtttggaggatgaactagttaatttccctgggagtacatgcctattaaaaatatagcatcctgcatctgaccaagatgctatcttactatcttattgtgcctatcttttatgcggagagagaaaggggggtgttgggaaggagaccagactgtggaaacattttctttattttttctctttttcttccttttatagtttgtttatttttcaacttgacatgggtagagaaagcgaatcgctagtatagaaagcacatctggaatccatccggcctcctctctctggctcaccctcctcccagcaatgtttctccttggaagttgggggaaggtaggcacctctgaccttggcagggtctaacttggggtcatccactgcatactcatcttccagaaggcgtcttattcctcctcgacaaaaaaaaaatgtgttggtattaaaatgctttgaggtaggctggatgaacccagcttagtgaggatgacatgaaaacccttagctaatggggtctttattgagtagaactcaggtaagttcagatgtaagcagtgtctctcagtaaacatgaaaagactgaagatgcagacaatcaaatacttaagtctcttgaagagctgggtggtgggcgggggtcttcccaggtggtcagggagatgtgttagtgtagcacttggaagagagtggaacgaccaggcaaggatgtgccgtggaggtgggcagtgggagcagcccagtgtcagcatctgtattggttagaagaccaccgctaatgaggaggagcgtctctaccctgcagctgtctgtactcctgtgtcttccgtaatgtgccaagctctctgaatatatgcaaaactagtctgcaaaaagccatatgtctcagcatctggctttatttctaagtgttcaggtggaatttaagccgcgatcaaatttacaatgtcactgccagctctggacacttacttttggaataaagcaaagagtgaacact

SEQ ID NO: 507 - DNA, 675 bp, Homo sapiens
  source 1..675: mol_type = genomic DNA
atgctgccttgcctcgccctgcttctcctgatggagctgtccgtgtgcactgtggcaggtgatggtggagaggaacagacactcagcactgaagcagagacctgggtaattgtggccttggaggaaggcgctggccccagcattcagctccagctgcaggaggtgaagacgggcaaggcaagccagttctttgggctgatggggaagcgagtgggaggaagacctctgatccagccaaggagaaaaaaagcatatcagctggaacacacgttccagggcctcctgggcaagagaagcctgttcacagaaggcagagaggatgaggcccaaggttcagagtaaaagcccccaccacagacttcccagaggacacggtgccgcttcttcctacctggatgtcacagctgacaagccggcaggccaactctcttctctgtgtctcctgtcctcatcgctggcacttcacacaaggcccacactgaacccactgggcttcttcctggactctcagtgtcaagcagcagtcctgcataaatgcacagcttcgccgtagcaagctgcactgactctgccctccctcacactcagagttggcatctcactgcacagcagtgaggagactcgcacactctgtatcctgtgcctagcacacagtaggcactcaataaatgagtg

SEQ ID NO: 508 - DNA, 1476 bp, Homo sapiens
  source 1..1476: mol_type = genomic DNA
ttcctgtgggtagaggtgatgcagtgctgaagacctgggcccctgctcagtgcctttgctctagaatgggtccagcttggctttggctactgggaacagggatcctggcctctgtccactgtcagccccttcttgcccatggagataaaagtctgcaggggcctcaaccccccaggcatcagctctcagagccagcccccgcctaccacagaatcacacccaccattaccaattttgctttgcgtttgtataaagagctggcagcagacgcccccggaaacatcttcttctcgccagtgagcatctccaccaccctggccctgctctctcttggggcccaagctaacacctcagctctgatcctggagggcctgggattcaacctcacagaaacccctgaagccgacatccaccagggcttccggagcctcctccacacccttgccctgcccagccccaaactcgaactaaaagtaggaaactccctgttcctagacaagcgactaaagcctcggcagcactatttggacagcatcaaggagctttatggagcttttgctttttctgccaacttcacagattctgttacaactgggaggcagattaatgactatttgagaaggcaaacatacgggcaagtcgtggactgcctcccggagttcagccaggacacgttcatggttcttgccaattacatcttcttcaaagccaagtggaagcaccctttcagtcgctaccagacccagaagcaggaaagtttctttgtggatgagaggacttctctccaggtccccatgatgcaccaaaaggaaatgcacagattcctctatgaccaggatttggcttgcaccgtcctccagatagaatacagaggaaatgccttggcgctgctggtcctccctgacccggggaaaatgaagcaggtggaggctgctctgcagccacagaccctgagaaaatggggccaattgctcctgcccagtctgttggatttgcacttgccaaggttttcaatttctggaacatataacctggaagacatacttccccaaattggtctcaccaacatactcaacttagaagctgacttctcaggagtcactgggcagctcaacaaaaccatctccaaggtgtcacacaaggcgatggtggacatgagtgagaaggggaccgaggccggggctgcttcaggcctcctctcccagcccccatctctgaacaccatgtcagacccacatgcccacttcaacaggcctttcctcttgctcctttgggaggtcaccacccagagcttactcttcctgggaaaagttgtcaacccagttgcagggtaaccatggtgggaggccaggagttatcttatctcatcctggaccaaacagataggccagaaccagcctgcatcctggggctgctatgtggttcagttaatcagtgtgccaagattctaataaagttgaccttgggttctgtgaa

SEQ ID NO: 509 - DNA, 330 bp, Homo sapiens
  source 1..330: mol_type = genomic DNA
ggtcttctcaaggaaatcccaatctctattccgaagagtcttccctaaaagatggccctgatcaggaagacattttattttctatttgctatgttcttcattttggttcaactgccatcagggtgccaggcaggacttgatttttcccaaccatttccatcaggtgagtttgctgtctgtgagtcgtgcaagcttggtcggggaaaatgcaggaaggagtgcttggagaatgagaagcccgatggaaattgcaggctgaactttctctgctgcagacagaggatctgacaaaccagaccagcacacttctggccttagaagcagacctgg

SEQ ID NO: 510 - DNA, 2258 bp, Homo sapiens
  source 1..2258: mol_type = genomic DNA
gggaaatggcggccgcgggcttggtcgctgtggcagcggctgccgagtactctggcacggtagcgtcgggaggtaacctccctggtgttcactgcggcccaagctccggggcaggccctggttttggcccgggctcgtggagccgctctctcgatcgagccctggaggaggcggcggtcactggggtgctgagcctgagcggccggaaactgagggagtttccccggggagcggccaaccacgacctgacggacaccacccgggcggacctgtcgcgaaatcgcctttcagaaattcctatagaagcatgtcactttgtttctctggaaaatctcaacttgtaccaaaattgtattcgttatattccagaggcaattttaaacctacaagctctaacattcttaaatattagtcggaaccaactgtcaacattgccggtacacttgtgtaatttgccattgaaagtcttaattgctagtaataacaaattggtgtcacttccagaagaaattggacaccttagacatttgatggaacttgatgtgagctgcaatgaaattcaaactataccttcccaaattggtaacctggaggccttgagagaccttaatgtaagaagaaatcacctagtacatttgcctgaagagctggcggagttgcctttgatacggttagacttctcatgcaataaaattaccacaatccctgtttgttatcggaacctcaggcacctacagacgatcaccctagataacaatccactacaatcacctcctgcacagatatgtataaaaggcaaagtccacatatttaaatacctgaacatacaagcttgtaagattgctccagatctgccggattatgataggagaccgttgggttttggctcctgccatgaagaactgtactcaagtcgcccttatggagcccttgattcaggcttcaatagtgtggacagtggtgataagagatggtcagggaatgaacctacagatgaattttcagatctgcctcttcgagtagcagagattactaaagaacaaagactacgaagagaaagccagtaccaagagaaccgcggcagtttggtagtaacaaacggcggagtggaacatgatctggatcagattgactacatagacagctgcaccgcagaggaagaggaggccgaggtgagacagcccaagggaccagacccagacagccttagttcacagtttatggcgtatattgaacagcggcgaatctctcatgagggttcaccagtaaagccagtagccattagggagtttcaaaaaacagaagatatgagaagatatttacatcaaaacagggttccagctgagccatcttccctcctgtcactatcagcaagtcacaatcagctgtcacacacagacctggaacttcatcagagaagggagcagttagtagagcgcactcggagagaggctcagcttgctgccctgcagtatgaggaggagaaaataaggaccaagcagatccagagagatgctgtcctggactttgtcaaacaaaaagcatcacaaagtccacaaaaacagcacccgctcctagatggcgtagatggtgagtgccccttcccatccagaaggtctcagcacactgatgatagtgccttgtgcatgtcgctgtcagggttgaatcaagtgggctgtgctgctaccctgcctcattcttctgccttcacgcctcttaagagtgatgacagacctaatgctctattaagttcacctgcaacagaaacagttcatcattcccctgcatattcttttcctgctgctatccagagaaatcagcctcagcgccctgaaagcttccttttccgagcaggtgtcagggcagaaaccaacaaaggtcatgcttcaccccttcctccatctgctgcacctaccactgattctacagattccataacaggacagaattcaagacagagagaagaagagctggaattaatagaccaactgcgtaaacatattgagtaccggttgaaagtgtctctaccttgtgatctcggagcagctctaactgacggtgttgttctttgccatttggccaatcatgtgcgacctcgatctgtcccaagcattcatgttccctcaccagctgtagtaagttgataatcctaaaaagccttggctattcatcagacatttgttaagcacagtggacagacatttcttaagcattgtgctagatattaaggatacagatataaagagtccagtctctac

SEQ ID NO: 511 - DNA, 213 bp, Homo sapiens
  source 1..213: mol_type = genomic DNA
atgagggtcttgttttttgtctttggagtcctttccttgatgttcacagttcctccagccagaagcttcatttctaatgatgaatgtccttcagaatattatcattgcagactgaagtgcaatgctgatgaacatgcaattagatactgtgctgacttcagcatctgctgcaaactgaagatcattgaaattgacggacaaaagaagtggtga

SEQ ID NO: 512 - DNA, 1946 bp, Homo sapiens
  source 1..1946: mol_type = genomic DNA
ttcctcccggcgtgctccgcggctcttggctcacagccgtcccttcgctggtgggaagaagccgagatggcggcagccagcgctggggcaacccggctgctcctgctcttgctgatggcggtagcagcgcccagtcgagcccggggcagcggctgccgggccgggactggtgcgcgaggggctggggcggaaggtcgagagggcgaggcctgtggcacggtggggctgctgctggagcactcatttgagatcgatgacagtgccaacttccggaagcggggctcactgctctggaaccagcaggatggtaccttgtccctgtcacagcggcagctcagcgaggaggagcggggccgactccgggatgtggcagccctgaatggcctgtaccgggtccggatcccaaggcgacccggggccctggatggcctggaagctggtggctatgtctcctcctttgtccctgcgtgctccctggtggagtcgcacctgtcggaccagctgaccctgcacgtggatgtggccggcaacgtggtgggcgtgtcggtggtgacgcaccccgggggctgccggggccatgaggtggaggacgtggacctggagctgttcaacacctcggtgcagctgcagccgcccaccacagccccaggccctgagacggcggccttcattgagcgcctggagatggaacaggcccagaaggccaagaacccccaggagcagaagtccttcttcgccaaatactggatgtacatcattcccgtcgtcctgttcctcatgatgtcaggagcgccagacaccgggggccagggtgggggtgggggtgggggtggtggtgggggtagtggccggtgagggcccaggctggtcagcgtcccgtcttgcacacccaggggcctccctttctgctggagtcccctgtgtcctcagccatcccaagaagggtttgctggtccctcctttccccccgtcccacgaggccacctgggccagccccttgtcctctgccttctgctggcagaggagcagctggactggggcctttggcacagcagccggtgtctcctgcgcccgcctcccccatggccccatgcagccccaggggcttcccccctgcccatggagtagagcccgagatcctggccactatgccagttctgacctcgcatccccctaccccgagcccatgcagtctgggaacatgccgccttctctccagcctctgtgcctttgttccaggtggtctcaccctcctgtccctggctgggctaggtggtcctgtccaggctcctgcagcgcccccctcactttgacactggactaggatgcagcctcccttctgtgtccccttgagggtaccctgggtcccctcatcaggggcagaggcatgaaagagtcggggctggatggccgggggcttctgggcccgacgcctagtgcagcccctggggtcgtggtttgacatttgtctgcctggtgcaaacaaggaatccttgcctttaaggtgacaggccctccacaggcttccagacttgaaggaaaaggtttaagaaagaaaacaaaaccaacagttagtggagtcaaagcccagacactgtaaatagaaccccctccaccaccccccgccgcccagcatcctacctggactgcggtgctacgagggcctgcgggcctttgctgtgtgccaccctccctgtaagtctatttaaaaacatcgacgatacattgaaatgtgtgaacgttttgaaaagctacagcttccagcagccaaaagcaactgttgttttggcaagacggtcctgatgtacaagcttgattgaaattcactgctcacttgatacgttattcagaaacccaaggaatggctgtccccatcctcatgtggctgtgtggagctcagctgtgttgtgtggcagtttattaaactgtcccccagatcgacacgc

SEQ ID NO: 513 - DNA, 704 bp, Homo sapiens
  source 1..704: mol_type = genomic DNA
atggacagctcccgggaaccgactctggggcgcttggacgccgctggcttctggcaggtctggcagcgctttgatgcggatggacacggtcatgaaagcaaatttgcacaaggtgaaacagcagtttatgactacccaagatgcctctaaagatggtcgcattcggatgaaagagcttgctggtatgttcttatctgaggatgaaaactttcttctgctctttcgccgggaaaacccactggacagcagcgtggagtttatgcagatttggcgcaaatatgacgctgacagcagtggctttatatcagctgctgagctccgcaacttcctccgagacctctttcttcaccacaaaaaggccatttctgaggctaaactggaagaatacactggcaccatggattctggctcttcaggaaaacttccttctccaatttaaaatggatgcttgttctactgaagaaaggaaaagggactttgagaaaatctttgcctactatgatgttagtaaaacaggagccctggaaggcccagaagtggatgggtttgtcaaagacatgatggagcttgtccagcccagcatcagcggggtggaccttgataagttccgcgagattctcctgcgtcactgcgacgtgaacaaggatggaaaaattcagaagtctgagctggctttgtgtcttgggctgaaaatcaacccataa

SEQ ID NO: 514 - DNA, 389 bp, Homo sapiens
  source 1..389: mol_type = genomic DNA
tcagggcagtagaacatattttaatcaatgccccttgataaaagagcttgattccagctactgcacttccttcatcagctctccactgatgcctggagccatgaaaatatttgtctttattttggctgctctcattcttcttgctcaaattttccaagccaggacagcaattcatagagcactaattagtaagagaatggaaggtcactgtgaagccgaatgtcttacctttgaagtaaagattgggggctgtagagctgaattagcaccattttgctgcaaaaacagaaagaaacattaaaaactaagcaccagctgcaagaaacaaagaggtgaagattctctggctgcgatatcagtgggataaatctctctggaccatctctctt

SEQ ID NO: 515 - DNA, 1048 bp, Homo sapiens
  source 1..1048: mol_type = genomic DNA
gtcggggaaaggcggggtctcggccggcgctgacgcagccatggcggaggcggctttggaagccgtgcggagcgagttacgagaattcccggccgctgcaagggagctctgcgtgcctcttgctgtgccctacctggacaaacccccaactccgctccacttctaccgggactgggtctgccccaacaggccgtgcattatccgcaacgctctgcagcactggccggccctccagaagtggtccctcccctatttcagagccacagtgggctccacagaggtgagtgtggccgtgaccccagatggttacgcggatgccgtgagaggggatcgcttcatgatgccagctgagcgccgcctgcccctgagcttcgtgctggatgtgctggagggccgggcccagcaccctggagtcctctatgtgcagaagcagtgctccaacctgcccagcgagctgccccagctgctgcctgatctggaatcccatgtgccctgggcctccgaagccctgggaaagatgcccgatgctgtgaacttctggctgggggaggcggctgcagtgacttctttgcacaaggaccactatgagaacctctactgcgtggtctcaggagagaagcatttcctgttccatccgcccagcgaccggcccttcatcccctatggcctgagagttccaggctgtttgcaattcccccacacccttctcccttgggctccagagctgtacacgccggcaacctaccagctaactgaagagggcacctttaaggtggtggatgaagaggccatggagaaggtgccctggatcccactggaccccttggcgccagacctagcacggtaccctagttacagtcaggcccaggcccttcgctgcacggtgcgggccggtgagatgctctatctgccggctctgtggttccaccacgtccagcagtcccagggctgcatcgcagtgaatttctggtatgacatggaatacgacctcaagtatagttacttccagctgctcgactccctcaccaaggcttcaggccttgactga

SEQ ID NO: 516 - DNA, 3398 bp, Homo sapiens
  source 1..3398: mol_type = genomic DNA
agctcaacccctgtgtcctgcccaatagaagtggcaccatggcccccaaactcatcaccgtcctgtgtctgggattctgcctgaaccagaagatctgcccacatgcgggtgctcaggacaagttctccctgtcagcctggccgagccctgtggttcccctaggaggacgtgtgactctctcctgtcattcccatcttcggtttgtcatatggacaatattccaaacaactgggacccgaagccatgagttgcacactggcctttccaacaacatcaccatcagccctgtgaccccagaacacgcagggacctacagatgtgttggaatttacaagcacgcctcaaagtggtcagctgagagcaactccctgaagatcatcgtcacaggcttgttcacaaaaccctccatctcagcgcacccaagctccctggtgcatgcaggagccagggtgagcctgcgctgtcactcagaactggcctttgatgaatttatcttatacaaagaggggcacatacagcattcccagcagcttgaccaggggatggaggctgggatccattacgtcgaggctgtcttttccatgggtcctgtaacgcctgcccatgcaggagcctacagatgctgtggttgtttcagtcactcccgctatgagtggtcggctcccagtgaccccctggacattgtgatcacaggaaaatacaaaaagccttctctctccacccaggtggaccccatgatgaggctgggagagaagttgaccctcttctgcagctctgaaatctcatttgaccagtaccatctgttcagacacggggttgctcatggacagtggctcagtggagggcagagacacagggaagcattccaggccaacttttctgtgggccgtgcaacgccagtccctggcgggacctatagatgctatggttccttcaatgactctccctataagcccccagtgacccgctgcaactttacaccacaggaaacactaagagtactcctctgtcattcacagaatccacccctgaatctgacaccaccatggcaaacacagagcccacggaaggccaacggacggatgaagaggagcctgcagcagaagagacacaggagatcatatatgcccagttaaaccaccaggccctctcacagacaggattccctcctgcctcccagtgtccccactacctctcggaggatcctagtatctacatcactgtccaccaagcccaggctgaggccagagctgcccccagtctttggcacaaagggcattaatacgcaaggacctggatctattcctaggaggattttttttccacggacattcttcctccttctggtaccatcttgacacctcgaagctggcaacagcagtgtctgaatgcttgtgggattatcttaaaattccagcactgctgaacagacaactagccattctacaattctattttgagcatccaaccatttaaggtgatttgactctacccacacactcatcctggatatctcattaatatcatctgagttatcctgaaactctacagacatgcttctggaaagccgatgtatatgctcagccagtttaatctctaaattactcaataaggtttttttaaaaaaatttttttaaagttctggggtacatgctcaggatgtgcaggtttgttacgtaggtaaacgtgtgccatggtggtttgctgcacctatcaaaccgtcacctaggtattaagcccagcaggcattagctctcttccctaatgctctccataccccctgccctcctctgacaggccccagtgaatgtgttcccctccctgtgtccatgtgttctcattgttcagctcccacttataagtgaaaacatgcggtgtctggttttctgttcctgcattagtttgctgaggataatgtcttctagcttcattcatgtctctgcaaatgatatgatctcattcctttttatgactgcgtagtattccgtggtgtatatgtacaactttatttttatccagtctatcattgatgggcatttgggttgattccacgtctttgctgttactcaacaaaattttgcagagatgaagtgtattctatatctgagtcatctaatatggtagccactagccaaatatggctttttaacttagaattagaatagatcaaattccatgaagtttaaaattcagttcctcagccacatggccacaatttgagttctcagagccacgtgtggctgctggctgtgggagagaatagcatgaacacaaaatgttttccttgtcagaggaagttctagctgttctagattaaaggtgcaaatttgaagatgcagagcctattttctcatgcagtgcaggctcctggaagagacctaatgtaacaaaacgataatatttcacatcaatggtgacatgtctttatcttacgaaatgcggggaacaagcagagttctcttgtggagtgtcttatcacctcttatcctcatgcaaatttctgccatagagattttctcccaaactttgagaaggtcacctctgtcaggcctctgagcccaagctaagccatcctatcccctgtgacctgcacgtacacatccagatggcctgaagcaactgaagattcacaaaagaagtgaaaatagccttaactgatgacattccaccactgtgacttgttcccgccccactaactgataccatatattctgccccgcccaagaaggtactttgtaatattcctcgcccccttaccccccaccgccctgcccccgctcgcccgccttaagaaggtactttgtaatattctcccccacaactttagaaggtactttgtaatattctcccccacaactttagaaggtactttgtaatattctcccccacaactttagaaggtactttgtaatattctcccccacaactttagaaggtactttgtaatattctcccccacaactttagaaggtactttgtaatattctcccccacaactttagaaggtactttgtaatattctcccccacaactttagaaggtactttgtaatattctcccctccccttaagaaggtacttcaaggctgggtgcggtggctcatgtctgtaatcccagcactctggggggccgaggtgggtggatcacgaggtcaggagatcgagaccatcctggctaatgtggtgaaaccccgtctctactaaaaaaatacaaaacacttagctgggcatggtggcgggtgcctgtagtcccagccacttgggagtctgaggcaggagaatggcgtgaacccaggaggcagagcttgcagtgagctgagatcgcgccactgcactccagcctgggcgatagagcaagactctgtctcaaaaaaaaaaaaaaaaaaaaaaaaaaaagaa

SEQ ID NO: 517 - DNA, 303 bp, Homo sapiens
  source 1..303: mol_type = genomic DNA
cagtcatgaggactttcctctttctctttgccgtgctcttctttctgaccccagccaagaatgcattttttgatgagaaatgcaacaaacttaaagggacatgcaagaacaattgcgggaaaaatgaagaacttattgctctctgccagaagtctctgaaatgctgtcggaccatccagccatgtgggagcattatagattaatgcagaagatttaggtttccagagaagcatacataacctagcttctttttactcttgcctctgctgtaggcagacactttaataaaaataaatgactgtc

SEQ ID NO: 518 - DNA, 316 bp, Homo sapiens
  source 1..316: mol_type = genomic DNA
ctcaagacccacccagtcatgaggactttcctctttctctttgccgtgctcttctttctgaccccagccaagaatgcattttttgatgagaaatgcaacaaacttaaagggacatgcaagaacaattgcgggaaaaatgaagaacttattgctctctgccagaagtctctgaaatgctgtcggaccatccagccatgtgggagcattatagattaatgcagaagatttaggtttccagagaagcatacataacctagcttctttttactcttgcctctgctgtaggcagacactttaataaaaataaatgactgtc

SEQ ID NO: 519 - DNA, 331 bp, Homo sapiens
  source 1..331: mol_type = genomic DNA
gggtcttctcaaggaaatcccaatctctattccgaagagtcttccctaaaagatggccctgatcaggaagacattttattttctatttgctatgttcttcattttggttcaactgccatcagggtgccaggcaggacttgatttttcccaaccatttccatcaggtgagtttgctgtctgtgagtcgtgcaagcttggtcggggaaaatgcaggaaggagtgcttggagaatgagaagcccgatggaaattgcaggctgaactttctctgctgcagacagaggatctgacaaaccagaccagcacacttctggccttagaagcagacctgg

SEQ ID NO: 520 - DNA, 3640 bp, Homo sapiens
  source 1..3640: mol_type = genomic DNA
agtcagcgcttcgcaggaagccgactcccaaaccggggcagggggtgtgggccgagggcgaaaccccgcccccaggggtccctgatctttgcccccgccccgggctccgcgcctctcggagaggcatcagcaggcgggcggcgttgcctttgtgtgtttcgcttcgaggtgccagagaccctccccacaatcgtccgccgcgtcccctcgcggccctcggcccctcctctcggcgtcccaagcccccctgctcagctctgcgtgccatttcggggatcgctggttcgctccccacggcgccaggaggaggggcgagggccggcagccccctctcccgcgcgcggcgcaggagccgagcccagcccgggggacccgccgccgccggtcatgtgggccggactgctccttcgggccgcctgtgtcgcgctcctgctgccgggggcaccagcccgaggctacaccgggaggaagccgcccgggcacttcgcggccgagagacgccgactgggcccccacgtctgcctctctgggtttgggagtggctgctgccctggctgggcgccctctatgggtggtgggcactgcaccctgcccctctgctccttcggctgtgggagtggcatctgcatcgctcccaatgtctgctcctgccaggatggagagcaaggggccacctgcccagaaacccatggaccatgtggggagtacggctgtgaccttacctgcaaccatggaggctgtcaggaggtggcccgagtgtgccccgtgggcttctcgatgacggagacagctgttggcatcaggtgtacagacattgacgaatgtgtaacctcctcctgcgagggccactgtgtgaacacagaaggtgggtttgtgtgcgagtgtgggccgggcatgcagctgtctgccgaccgccacagctgccaagacactgacgaatgcctagggactccctgtcagcagagatgtaaaaacagcattggcagctacaagtgttcctgtcgaactggcttccaccttcatggcaaccggcactcctgtgtagatgtaaacgagtgtcggaggccattggagaggcgagtctgtcaccattcctgccacaacaccgtgggcagcttcctatgcacatgccgacctggcttcaggctccgagctgaccgcgtgtcctgtgaagctttcccgaaagccgtgctggccccatctgccatcctgcaaccccggcaacacccgtccaagatgcttctgttgcttcctgaggccggccggcctgccctgtccccaggacatagccctccttctggggctccagggcccccagccggagtcaggaccacccgcctgccatctcccaccccacgactacccacatcctccccttctgcccctgtgtggctgctgtccaccctgctggccaccccagtgcctactgcctccctgctggggaacctcagacccccctcactccttcagggggaggtgatggggaccccttcctcacccaggggccctgagtccccccgactggcagcagggccctctccctgctggcacctgggagccatgcatgaatcaaggagtcgctggacagagcctgggtgttcccagtgctggtgcgaggacgggaaggtgacctgtgaaaaggtgaggtgtgaagctgcttgttcccacccaattccctccagagatggtgggtgctgcccatcgtgcacaggctgttttcacagtggtgtcgtccgagctgaaggggatgtgttttcacctcccaatgagaactgcaccgtctgtgtctgtctggctggaaacgtgtcctgcatctctcctgagtgtccttctggcccctgtcagacccccccacagacggattgctgtacttgtgttccagtgagatgctatttccacggccggtggtacgcagacggggctgtgttcagtgggggtggtgacgagtgtaccacctgtgtttgccagaatggggaggtggagtgctccttcatgccctgccctgagctggcctgcccccgagaagagtggcggctgggccctgggcagtgttgcttcacctgccaggagcccacaccctcgacaggctgctctcttgacgacaacggggttgagtttccgattggacagatctggtcgcctggtgacccctgtgagttatgcatctgccaggcagatggctcggtgagctgcaagaggacagactgtgtggactcctgccctcacccgatccggatccctggacagtgctgcccagactgttcagcaggctgcacctacacaggcagaatcttctataacaacgagaccttcccgtctgtgctggacccatgtctgagctgcatctgcctgctgggctcagtggcctgttcccccgtggactgccccatcacctgtacctaccctttccaccctgacggggagtgctgccccgtgtgccgagactgcaactacgagggaaggaaggtggcgaatggccaggtgttcaccttggatgatgaaccctgcacccggtgcacgtgccagctgggagaggtgagctgtgagaaggttccctgccagcgggcctgtgccgaccctgccctgcttcctggggactgctgctcttcctgtccagattccctgtctcctctggaagaaaagcaggggctctcccctcacggaaatgtggcattcagcaaagctggtcggagcctgcatggagacactgaggcccctgtcaactgtagctcctgtcctgggcccccgacagcatcaccctcgaggccggtgcttcatctcctccagctccttttaagaacgaacttgatgaaaacacagactttacctacaagcccggcaggagctcatggtccacactcactcgctttggggctgacagccactttcccaggggagcctggggcctcccctcgactctcaccagggccttcgacccctccaggagcccccactctacctctagcttccccaggggctcctcagccacctcctgtgactccagagcgctcgttctcagcctctggggcccagatagtgtccaggtggcctcctctgcctggcaccctcctgacggaagcttcagcactttccatgatggaccccagcccctcgaagacccccatcaccctcctcgggcctcgcgtgctttctcccaccacctctagactctccacagcccttgcagccaccacccaccctggcccccagcagcccccagtgggggcttctcggggggaagagtccaccatgtaaggaggtcactgtgtccgggagactctggagagaggacctctgccagtggcccagggtgtgtgcagggcagctccaaggatgaacctggtggggatgcctgggctccctcctgcaggggccctggtgaggatggaagacccccaaggctggatgtaaccttgttcccaagaagtgtttggaatgtgctgtaagaatggaggaagtcgtttccactgtcagcatcctccctggaccgcgtggctggctcatcttttgagaagggttgggactgccaagttctcctggaggaagagttgcgtccggctgggattccactcactgggactgtaccgccaggtgtcatgcgtctctctgaggtttcctgattaaaggttgtctcggtttc

SEQ ID NO: 521 - DNA, 475 bp, Homo sapiens
  source 1..475: mol_type = genomic DNA
agagcccaagaacactggtggccaaaggatggtgtcttgtgaaaggagggcaagcaaaagtgtaggacaaattttgctttgggattttggttacacctgcagactatcccacagaaggaggaacagcactgaaatcctttctcgcaatcttcctgcattgtacacaggaatcaaggtctgtgagaagcgacccagcatagatctatgcatccaccactgttcatatttccaaaagtgtgaaacaaataagatatgctgttcagccttctgtgggaacatttgtatgagcatcctatgagtgggagagtgggctgggatgtgcatcctgctccctgaacccttccatccgagactgtgcccacatccgaagcacaaggacatcaaatcatcagcacaagaacatcaacaggaatgccaccctccccagtgtctgaactccctgtccctgtcaaataaaccagaacaaatgcccatg

SEQ ID NO: 522 - DNA, 2046 bp, Homo sapiens
  source 1..2046: mol_type = genomic DNA
aaaaaggagcatgtcttcatccatgagaggcctcgaaaaatcaatggtatttgcatttctcccaagaaggttgcttgccaaaacctttcggccattttctgctttcagagtgagacaaagttcaaaatgacagtctgtcagctcattgaaggcacaagataccctgcctgcaggtaccactattcccccacagaggggtttgttcttgtcacttgtgatgacttgaggccagatagtttccttggctatgttaaataactcaagatcagctcccgagtctgagatctcttctctcaatggcattggagctggctgtgcctgaggcagacctggaccgtggacatggggcaatgccttgagcggaaggggaagccactgaattttgggtgtcaccaggtaaacagagccctcagcatctgaatagaaactgaacaggaacagaagagattacactacatctgagatggagacctttcctctgctgctgctcagcctgggcctggttcttgcagaagcatcagaaagcacaatgaagataattaaagaagaatttacagacgaagagatgcaatatgacatggcaaaaagtggccaagaaaaacagaccattgagatattaatgaacccgatcctgttagttaaaaataccagcctcagcatgtccaaggatgatatgtcttccacattactgacattcagaagtttacattataatgaccccaagggaaacagttcgggtaatgacaaagagtgttgcaatgacatgacagtctggagaaaagtttcagaagcaaacggatcgtgcaagtggagcaataacttcatccgcagctccacagaagtgatgcgcagggtccacagggcccccagctgcaagtttgtacagaatcctggcataagctgctgtgagagcctagaactggaaaatacagtgtgccagttcactacaggcaaacaattccccaggtgccaataccatagtgttacctcattagagaagatattgacagtgctgacaggtcattctctgatgagctggttagtttgtggctctaagttgtaaatcccacagagctttaggactagggtcttactaaagaaggacctcttcttgttcattcttgtttaaacctttccttaatatctactctttagcactatagtgaactcctgattatttattctaactggaggagtgaaaaatccaaaattgtggataattcaattaaaagttatgactgatactggcgtgcagattcttctctctctatctctctctctgtgtggggggagggtggggagggtgtaaaacaaactgaatttcatcctagctcagctataaagccaagaaacagaatccacctaactaggcagaattaaggaaacaaggactaaagccaatatggacaatgaaaagctaattgtactgccaatgatactattcagaaaaatagtgaatgagtgtgacatatattattatcactactctcttcaaagggtatgtgctcacacttgtgtgaattgatgtatgcacataacaaagagtctgcctgtccttcaggaaatgccagaggaaaaagattctttggctgagctgatgctctcagtgtcaatagctccagccctatgcaatctccattcttccacccccatctctatttcacaggttgctgtaaagagaagaaaattcttattgtaatctttattcaagccaagtcttgataccctggggctgtgggagaggaatggcaagccatggaagaatagaggagccagaaagatgggaatagaaagtctgtgctaagtaccaggcaggactggtcttcaaccttgatgtcttatgatactgtagttaattttgttcactaccagctatttatttgcaaacgttcgtggttcaacattctgcttaaagtatggacagttatcttcttcatcgatgtgtggccatatgtttctattcctctccttaaatcctccctccatcctgagaccactctttcttaatgttctaattttaactaaatgcatgtaaatgtatgtaaa

SEQ ID NO: 523 - DNA, 1370 bp, Homo sapiens
  source 1..1370: mol_type = genomic DNA
aacgagctcgggcctcacccggatggcggctgcgacgcgcggctgccggccctggggctcgctcctcgggctgctcgggctggtctcggccgcggccgccgcctgggacctggcttccctgcgctgcaccttgggcgccttttgcgaatgcgacttccggcccgacttgccgggtctggagtgtgacctggctcagcacctggccggccagcatctggccaaggcgctggtggtgaaggcgctgaaggcctttgtgcgggacccagcccccaccaagccgctggtcctctccctgcacggctggaccggcaccggcaaatcctatgtcagctccctgctggcgcactacctcttccagggcggcctccgcagcccccgcgtgcaccacttttctcccgtcctccacttcccccaccccagccacatcgagcgctacaagaaggatctgaagagctgggtccaagggaacctcactgcctgtggccgctccctcttcctcttcgatgagatggacaagatgcccccaggcctgatggaagtcctgcggcctttcctgggctcctcctgggtggtatacgggaccaattaccgcaaagccatcttcatcttcatcagatggcttctcaaactcgggcatcatggaagagcgcctcctagacgcagtggtgcccttcctcccgctccagcggcaccacgtccggcactgcgtgctcaacgagctggcccagctgggcctggagccaagggatgaggttgtccaggctgtgctggacagcaccaccttcttccctgaagacgagcagctcttctcctccaacggctgcaagaccgtggcctcccgaatcgccttcttcctctgactctctgagtggtgtcctcggcccccctgatggccaggccatgcaggaaaggccaggggcctctgtcacaggaacccagagcaccaagtgagatgaacggagtgtcggctaggccacgggacagatggccaggaagggccctggcctctaaactggctcgagagcatcttggccccggccaccttccccagggaaacccctggtcaccccagaacctcactgagccttgacctccccctgcagcctgagccttcttactgtgaattataactcagggactgtggctcgtggcggtgctccctcctcagtctgccacccttgccccttgcctccttggtcgggcaccatacctcctcccctccaccccacaccctgtgtccatatcaagccaggtggagccttctcagtttccagaaatggagggactcaagctgccacttgggcctggttttagatgtttttaattttgtaaaagaaaacaagtataataaactcagctgtgggaccaga

SEQ ID NO: 524 - DNA, 2259 bp, Homo sapiens
  source 1..2259: mol_type = genomic DNA
ctcggccgccctcgcgctgtggttcgctccgggcgcgctgcgctcgtgagttcccaggaggcctggcgggcaccgtaaccagcgccgcggacaccggcaccggcgccacggactccgcaggaccccgcgcccgccgccgccgctatgctggggctgctggtggcgttgctggccctggggctcgctgtctttgcgctgctggacgtctggtacctggtgcgccttccgtgcgccgtgctgcgcgcgcgcctgctgcagccgcgcgtccgtgacctgctagctgagcagcgcttcccgggccgcgtgctgccctcggacttggacctgctgctgcacatgaacaacgcgcgctacctgcgcgaggccgactttgcgcgcgtcgcgcacctgacccgctgcggggtgctcggggcgctgagggagttgcgggcgcacacggtgctggcggcctcgtgcgcgcgccaccgccgctcgctgcgcctgctggagcccttcgaggtgcgcacccgcctgctgggctgggacgaccgcgcgttctacctggaggcgcgctttgtcagcctgcgggacggcttcgtgtgcgcgctgctgcgcttccggcagcacctgctgggcacctcacccgagcgcgtcgtgcagcacctgtgccagcgcagggtggagccccctgagctgcccgctgatctgcagcactggatctcctacaacgaggccagcagccagctgctccgcatggagagtgggctcagtgatgtcaccaaggaccagtgaccgccaccttcacaccgtctgccctggccaccatcctgggcctgggggctgcccacagatgggcagtctcagccatactctgttccagctggagtagcctcctgaccagcctggcccaccctgctccacccactgggcccccccagttattgatacccctctgtgctgggctccacgctaggcagaaggaggagtggcattggcatcctgacccagctctgccctcaaggtggggatggatgggcaaaggagagtcctgcctggccctacgatgaggccactcatgtgggcctaggtaggggaggatggtgcctggagcagagggacccacaagtgcctcccgagcctagatcctggctcggaccactgcaagggccgaggcagggccagaccagagcatcctgggtacaggcctgggctctccagggcctgggcctgattcaggtgcagtgggcactcctgaagggtcagagcggcatctgccaggcagcccctctggcttccgctgaggtggttgcaggcctggggcagagcctgggtggtcagaggccggggctagaggcagatggaagggaggcatttgctgacagaggacggggcacccgggctccccactgcagtcggccttgcctcctcctcctcctctacctccagtcaggctggacgggagggtagccttgtggctgagaggggtcagactaggtggcacaggggctcctggaaagacagcaggcttcctgctgggcgttcccttgttggagggaatagagtgggggtgggactctgcaggggtgtccttgtccactcgcacccctcgccgcccaccagggccatgctctgtgacttgggctgatccccaccctttctgggcctacagcaccacaggccgctgtacccccttagagctgcccctctctggcctggccggcaggcgtcttcttaactcctctgtcctctatattcagcatgttccttgtcagctgctgggccggccctgccttgcgctagcagagcctctcctggcagcttctcaggtctccctaatggagacaccaggctactaggacactggctggggccaccccctcctgcctaatgcctcaccttacagctggggaaactgaggcctggaatggcccagagtcaccaaggcaaagttggggctggtcccagcctgaggctccagctgatgccctcagctcccagagagggggtgccccatctagctgggtgcaggggtcactgcttgtcagctcagggccctgtgcccgcttgcctgttcccctacatctgtgcctgcacatccagaactgcctccttgccgctgcctccaggaagcccaccttgagccagagtcaagggctgcagcactgcccgatagaacacgcccgccctcactgctgttcttgccttacagccaccatgggaaagctgcaacctttctgttttatttaaagaaagcccaacattaaagggttttcattgcaa

SEQ ID NO: 525 - DNA, 1339 bp, Homo sapiens
  source 1..1339: mol_type = genomic DNA
aattgctctcgctgcgtcagggttccagataaccagaaccgcaaatgcaggcgggggtgtcccagagtcggctccgcctgcaccccagggcgctggggccgggcatggggcggggggtgatataagaggacggcccagcagagggatgaagattttggagcccagctgtgtgccagcccaagtcggaacttggatcacatcagatcctctcgagctccagcaggagaggcccttcctcgcctggcagcccctgagcggctcagcagggcaccatggcaagatcccttctcctgcccctgcagatcttactgctatccttagccttggaaactgcaggagaagaagtgagtacaccgtgcacctgggcagtgatacgctgggcgacaggagagctcagaggatcaaggcctcgaagtcattccgccaccccggctactccacacagacccatgttaatgacctcatgctcgtgaagctcaatagccaggccaggctgtcatccatggtgaagaaagtcaggctgccctcccgctgcgaaccccctggaaccacctgtactgtctccggctggggcactaccacgagcccagatgtgacctttccctctgacctcatgtgcgtggatgtcaagctcatctccccccaggactgcacgaaggtttacaaggacttactggaaaattccatgctgtgcgctggcatccccgactccaagaaaaacgcctgcaatggtgactcagggggaccgttggtgtgcagaggtaccctgcaaggtctggtgtcctggggaactttcccttgcggccaacccaatgacccaggagtctacactcaagtgtgcaagttcaccaagtggataaatgacaccatgaaaaagcatcgctaacgccacactgagttaattaactgtgtgcttccaacagaaaatgcacaggagtgaggacgccgatgacctatgaagtcaaatttgactttacctttcctcaaagatatatttaaaccaacctcatgccctgttgataaaccaatcaaattggtaaagacctaaaaccaaaacaaataaagaaacacaaaaccctcagtgctggagaagagtcagtgagaccagcactctcaaacactggaactggacgttcgtacagtctttacggaagacacttggtcaacgtacaccgagacccttattcaccacctttgacccagtaactctaatcttaggaagaacctactgaaacaaaaaaaatccaaaatgtagaacaagacttgaatttaccatgatattatttatcacagaaatgaagtgaaaccatcaaacatgttccaaaagtaccagatggct

SEQ ID NO: 526 - DNA, 1217 bp, Homo sapiens
  source 1..1217: mol_type = genomic DNA
acagatgatgaaaccaaggttcagagagggtcagaattcagaccaagtcagaattcaaaatctaaactggctccggggtaagtgatactaattgctgtataatactaccacctagaggaacttccaaacatggattcctcaacaaggccaaaaagaccgcattggcttacatcagtggcccacaatggtgtgattttgccttccaggggacctttgcagtgcctggagacattttcagttgttacaatcaggggtgctactggattctgatgggaagaggcctgggatgctgctaaacatcctacaatccccagttcagccccccaaacaaagaattatccagcccaaatatcaccagtggttgagaaattctgccttagatgggatggagctggggggtgggaatagagggaggagaggtcactggggagtggtgggggtgtaggcagtagggaaatgagtgaggctgccctgaggaaaagaactcctgggggcaagcaaactgaaagcaaacttccctgactctctagaattgccttgtgtctggcaaagtggggagacactatgctctctaaggcacacgggtgtaaaaccgctctttccctagggagatgtcccaaaatcagagaagaatgtgaattccaagaaagggatgtgtgtacaaaggacagacaatgccaggacaacaagaagtgttgtgtcttcagctgcggaaaaaaatgtttagatctcaaacaagatgtatgcgaaatgccaaaagaaactggcccctgcctggcttattttcttcattggtggtatgacaagaaagataatacttgctccatgtttgtctatggtggctgccagggaaacaataacaacttccaatccaaagccaactgcctgaacacctgcaagaataaacgctttccctgattggataaggatgcactggaagaactgccagaatgtggctcatgctctgagtactgttcctgtacctgacggatgctccagactggcttccagtttcactctcagcattccaagatcttagcccttcccagaacagaacgcttgcatctacctcctcttcctccatctttggctcttttgatgcacaatatccatccgttttgatttcatctttatgtcccctttatctccaacttctagaactcccagtttatacctgtgtcactctcaattttttccagtaaagtacttgatgtagt

SEQ ID NO: 527 - DNA, 3071 bp, Homo sapiens
  source 1..3071: mol_type = genomic DNA
gacaactgagacggctgcagaccatggggcagggagcatatggagcacggatatgccagacagagggatgattcatatcccaggcaggatggagcagggcagtgtgctatttcatcgtgctactcagaacttatgaattgtttatttctggaatttcccatttaatatttttggactgtggttgatcgagggtaaatgaaattgcagaaagcaaaaatacagataagggggactgcttgctgtacaaagatagagacaagaggaaggagctgtcctcaagggccttttgtgtgaagacatctggcacacagatacgctgcatgcaggtggcttgagagaacatgcatccaggccctgaggaggcgggaagtggccgctatggaccccgttatatcaccgacatgggagctggtgaggatgatgaaggatttgaagacgacttagatttggatatttcctttgaggaggttaaaccacttcctgctaccaaaggagggaataagaaatttttggtggaaagcaagaagatgtctatatctaacccaaagaccatttctaggctcatcccccctacctcagcatctctccctgtgaccacggtggctccccagcccattcccatacagagaaaggggaagaatggtgtggccataatgtcaaggctctttgacatgccttgtgatgaaactctctgctctgctgacagcttctgtgtcaatgactacacctgggggggctcgcgatgccagtgcaccctgggcaaaggtggtgagagctgctcagaagatattgttatccagtatcctcagttctttggccactcctatgtaacgtttgaacctctgaagaattcttatcaggcatttcaaattactcttgaatttagggcggaggcagaggatggcttactgctctactgtggggagaacgaacacgggaggggggatttcatgtccctggctatcatccgacgctccctgcagttcaggtttaattgtggaactggggttgccatcatcgtaagtgagaccaaaatcaaactagggggttggcacacggttatgctctacagagatgggctgaacgggctgctgcagctgaacaatggcaccccagtgacaggccagtctcagggccaatacagtaaaattactttccggacacctctctatcttggtggcgctcccagcgcttactggttggttagagcaacagggacaaaccgaggctttcaaggctgtgtgcagtcgctcgctgtgaatgggaggagaattgacatgaggccctggcccctgggaaaagcactcagtggggctgatgtgggggaatgcagcagtggaatctgtgatgaggcctcgtgcatccatggtggcacctgcacagcaatcaaagccgactcctacatttgcctctgtccccttgggtttaaaggtcgacactgtgaagatgctttcaccttgaccattcctcagttcagagagtctctgagatcttacgctgcaactccctggccactggagccccagcattacctttccttcatggaatttgagatcacatttcggccagactcaggagatggtgtcctcctgtacagctatgacacaggcagcaaagacttcctgtccatcaacttggcagggggccacgtggagttccgctttgactgtggctctgggaccggtgtcctcaggagtgaagatcccctcaccctgggcaactggcacgagcttcgtgtatctcgcacagcaaagaatggaatcttacaggtggataagcagaagatagtggagggaatggcagagggaggcttcacacagattaagtgcaacacagacattttcattggcggagtccccaattatgatgatgtgaagaagaactcgggtgtcctgaagcctttcagcgggagcatccagaagatcatcctgaatgaccgaaccatccatgtgaagcatgacttcacctccggagtgaatgtggagaatgcggcccacccctgtgtgagagccccttgtgcccatgggggcagctgccggcccaggaaggagggctatgactgtgactgccccttgggctttgaggggcttcactgccagaaagcgatcatagaagccattgagatcccgcagtttatcggccgcagttacctgacgtatgacaacccagatatcttgaagagggtgtcaggatcaagatcaaatgtgttcatgaggtttaaaacaactgccaaggatggccttttgctgtggaggggagacagccccatgagacccaacagcgacttcatttccttgggccttcgggatggagccctcgtgttcagctataacctgggcagtggtgtggcatccatcatggtgaatggctccttcaacgatggtcggtggcaccgagttaaggccgttagggatggccagtcaggaaagataaccgtggatgactatggagccagaacaggcaaatccccaggcatgatgcggcagcttaacatcaatggagctctgtatgtgggtggaatgaaggaaattgctctgcacactaacaggcaatatatgagagggctcgtgggctgtatctctcacttcaccctgtccaccgattaccacatttccctcgtggaagatgccgtggatgggaaaaacatcaacacttgtggagccaagtaacaccagctggccttgtccaagggacagagccttctattctgagaatcccaggggccctcagaccctgcctgatgctatatgcagaggcccagggaccaggtgtgtttcctctcaccaagaagaaagtacacactgatgagaaactgagaaccaagacaggcatccctgggtggcctttcctgctgacactccacgagctgacccagcagaattctctgtgtaggaagcatcggactttgtccattgaatatgtagcggctgccagagatcacacatcaatgcaaattccagagcctgtctgctatagctcagtgactgtgttgtgattcatagtacattaaaaagagagagagagagaaagaatcccacagggcactattaaaatacttctctccttccctg

SEQ ID NO: 528 - DNA, 1533 bp, Homo sapiens
  source 1..1533: mol_type = genomic DNA
gcgtttgtggccgtccggcctccctgacatgcagatttccacccagaagacagagaaggagccagtggtcatggaatgggctggggtcaaagactgggtgcctgggagctgaggcagccaccgtttcagcctggccagccctctggaccccgaggttggaccctactgtgacacacctaccatgcggacactcttcaacctcctctggcttgccctggcctgcagccctgttcacactaccctgtcaaagtcagatgccaaaaaagccgcctcaaagacgctgctggagaaggtgaagttttgctcttgttgcccaggctggagcgcaatggcgcgatcttggctcaccgcaacctctgccacccagagtcagttttcagataagccggtgcaagaccggggtttggtcgtgacggacctcaaagctgagagtgtggttcttgagcatcgcagctactgctcggcaaaggcccgggacagacactttgctggggatgtactgggctatgtcactccatggaacagccatggctacgatgtcaccaaggtctttgggagcaagttcacacagatctcacccgtctggctgcagctgaagagacgtggccgtgagatgtttgaggtcacgggcctccacgacgtggaccaagggtggatgcgagctgtcaggaagcatgccaagggcctgcacatagtgcctcggctcctgtttgaggactggacttacgatgatttccggaacgtcttagacagtgaggatgagatagaggagctgagcaagaccgtggtccaggtggcaaagaaccagcatttcgatggcttcgtggtggaggtctggaaccagctgctaagccagaagcgcgtgggcctcatccacatgctcacccacttggccgaggctctgcaccaggcccggctgctggccctcctggtcatcccgcctgccatcacccccgggaccgaccagctgggcatgttcacgcacaaggagtttgagcagctggcccccgtgctggatggtttcagcctcatgacctacgactactctacagcgcatcagcctggccctaatgcacccctgtcctgggttcgagcctgcgtccaggtcctggacccgaagtccaagtggcgaagcaaaatcctcctggggctcaacttctatggtatggactacgcgacctccaaggatgcccgtgagcctgttgtcggggccaggtacatccagacactgaaggaccacaggccccggatggtgtgggacagccaggcctcagagcacttcttcgagtacaagaagagccgcagtgggaggcacgtcgtcttctacccaaccctgaagtccctgcaggtgcggctggagctggcccgggagctgggcgttggggtctctatctgggagctgggccagggcctggactacttctacgacctgctctaggtgggcattgcggcctccgcggtggacgtgttcttttctaagccatggagtgagtgagcaggtgtgaaatacaggcctccactccgtttgctgtg

SEQ ID NO: 529 - DNA, 897 bp, Homo sapiens
  source 1..897: mol_type = genomic DNA
tcctatcatcgcaaaactcatgatgctccggctgctcagttccctcctccttgtggccgttgcctcaggctatggcccaccttcctctcgcccttccagccgcgttgtcaatggtgaggatgcggtcccctacagctggccctggcaggtttccctgcagtatgagaaaagcggaagcttctaccacacctgtggcggtagcctcatcgcccccgactgggttgtgactgccggccactgcatctcgagctcccggacctaccaggtggtgttgggcgagtacgaccgtgctgtgaaggagggccccgagcaggtgatccccatcaactctggggacctctttgtgcatccactctggaaccgctcgtgtgtggcctgtggcaatgacatcgccctcatcaagctctcacgcagcgcccagctgggagacgccgtccagctcgcctcactccctccggctggtgacatccttcccaacgagacaccctgctacatcaccggctggggccgtctctataccaacgggccactcccagacaagctgcaggaggccctgctgccggtggtggactatgaacactgctccaggtggaactggtggggttcctccgtgaagaagaccatggtgtgtgctggaggggacatccgctccggctgcaatggtgactctggaggacccctcaactgccccacagaggatggtggctggcaggtccatggcgtgaccagctttgtttctgcctttggctgcaacacccgcaggaagcccacggtgttcactcgagtctccgccttcattgactggattgaggagaccatagcaagccactagaaccaaggcccagctggcagtgctgatcgatcccacatcctgaataaagaataaagatctctcag

SEQ ID NO: 530 - DNA, 1606 bp, Homo sapiens
  source 1..1606: mol_type = genomic DNA
tttcctgtggtgggttcacacgcagctagacacagctaacttgagtcttggagctcctagagggaagcttctggaaaggaaggctcttcaggacctcttaggagccagtgcctaggaaagttgtccccttgaatgtcagtgtgaaggtgaaggaggaagcagatgcctgttcatatggaaacaaagacctggctgtgaagaggggaggcggacaccaaagtcctgacacttgggcgggacagaattgatctaagcagctctggtgctgaagagagcactgcctccctgtgtgactggagaagaggacgttgtcacagataaagagccaggctcaccagctcctgacgcatgcatcatgaccatgagacacaactggacaccagacctcagccctttgtgggtcctgctcctgtgtgcccacgtcgtcactctcctggtcagagccacacctgtctcgcagaccaccacagctgccactgcctcagttagaagcacaaaggacccctgcccctcccagcccccagtgttcccagcagctaagcagtgtccagcattggaagtgacctggccagaggtggaagtgccactgaatggaacgctgagcttatcctgtgtggcctgcagccgcttccccaacttcagcatcctctactggctgggcaatggttccttcattgagcacctcccaggccgactgtgggaggggagcaccagccgggaacgtgggagcacaggtacgcagctgtgcaaggccttggtgctggagcagctgacccctgccctgcacagcaccaacttctcctgtgtgctcgtggaccctgaacaggttgtccagcgtcacgtcgtcctggcccagctctgggctgggctgagggcaaccttgccccccacccaagaagccctgccctccagccacagcagtccacagcagcagggttaagactcagcacagggccagcagcagcacaaccttgaccagagcttgggtcctacctgtctacctggagtgaacagtccctgactgcctgtaggctgcgtggatgcgcaacacaccccctccttctctgctttgggtcccttctctcaccaaattcaaactccattcccacctacctagaaaatcacagcctccttataatgcctcctcctcctgccattctctctccacctatccattagccttcctaacgtcctactcctcacactgctctactgctcagaaaccaccaagactgttgatgccttagccttgcactccagggccctacctgcatttcccacatgactttctggaagcctcccaactattcttgcttttcccagacagctcccactcccatgtctctgctcatttagtcccgtcttcctcaccgccccagcaggggaacgctcaagcctggttgaaatgctgcctcttcagtgaagtcatcctctttcagctctggccgcattctgcagacttcctatcttcgtgctgtatgttttttttttcccccttcactctaatggactgttccagggaagggatgggggcagcagctgcttcggatccacactgtatctgtgtcatccccacatgggtcctcataaaggattattcaatgga

SEQ ID NO: 531 - DNA, 1755 bp, Homo sapiens
  source 1..1755: mol_type = genomic DNA
cagctggagggagaggagagattaaagtgaggagagagctacaaccaagtaagcaagtgtcagggctcaccaaccatgcaaggacagggcaggagaagaggaacctgcaaagacatattttgttccaaaatggcatcttacctttatggagtactctttgctgttggcctctgtgctccaatctactgtgtgtccccggccaatgcccccagtgcatacccccgcccttcctccacaaagagcacccctgcctcacaggtgtattccctcaacaccgactttgccttccgcctataccgcaggctggttttggagaccccgagtcagaacatcttcttctcccctgtgagtgtctccacttccctggccatgctctcccttggggcccactcagtcaccaagacccagattctccagggcctgggcttcaacctcacacacacaccagagtctgccatccaccagggcttccagcacctggttcactcactgactgttcccagcaaagacctgaccttgaagatgggaagtgccctcttcgtcaagaaggagctgcagctgcaggcaaatttcttgggcaatgtcaagaggctgtatgaagcagaagtcttttctacagatttctccaacccctccattgcccaggcgaggatcaacagccatgtgaaaaagaagacccaagggaaggttgtagacataatccaaggccttgaccttctgacggccatggttctggtgaaccacattttctttaaagccaagtgggagaagccctttcaccctgaatatacaagaaagaacttcccattcctggtgggcgagcaggtcactgtgcatgtccccatgatgcaccagaaagagcagttcgcttttggggtggatacagagctgaactgctttgtgctgcagatggattacaagggagatgccgtggccttctttgtcctccctagcaagggcaagatgaggcaactggaacaggccttgtcagccagaacactgagaaagtggagccactcactccagaaaaggtggatagaggtgttcatccccagattttccatttctgcctcctacaatctggaaaccatcctcccgaagatgggcatccaaaatgtctttgacaaaaatgctgatttttctggaattgcaaagagagactccctgcaggtttctaaagcaacccacaaggctgtgctggatgtcagtgaagagggcactgaggccacagcagctaccaccaccaagttcatagtccgatcgaaggatggcccctcttacttcactgtctccttcaataggaccttcctgatgatgattacaaataaagccacagacggtattctctttctagggaaagtggaaaatcccactaaatcctaggtgggaaatggcctgttaactgatggcacattgctaatgcacaagaaataacaaaccacatccctctttctgttctgagggtgcatttgaccccagtggagctggattcgctggcagggatgccacttccaaggctcaatcaccaaaccatcaacagggaccccagtcacaagccaacacccattaaccccagtcagtgcccttttccacaaattctcccaggtaactagcttcatgggatgttgctgggttaccatatttccattccttggggctcccaggaatggaaatacgccaacccaggttaggcacctctattgcagaattacaataacacattcaataaaactaaaatatgaattcatctgtcaa

SEQ ID NO: 532 - DNA, 2313 bp, Homo sapiens
  source 1..2313: mol_type = genomic DNA
gggtgtgcgggcggcgcgctcgccctccagctgcagcccgcgccgagcgcgcagggccagcgagcgccggcgcctccagcatggagtgggaactcaacttgctgctctacctggcgctcttcttcttcctgctcttcttacttttcctcctgctcttcgtggtcatcaagcagctgaagaactccgtggccaacacggccggggcgctccagcccgggcgcctctcggtgcaccgcgagccttggggcttctcccgagagcaagcggtgtgacccgagtgcgggcactggcgggagggcaccgagctgcgcgggcgctgggctgggtctccgcctcgattctccgtcctcgcggcctcccagcttccagagccgagctgctgcccttgactggtgctcaggggaccacagctgcaatgacagtttgggcctgcaaaaagaaggctggaacaacgggagatggaagctttctgcaaatgcagcaccactggtatccatgaatttaacctgcccatcattcttcctaaacaagagactattgaaaagtcagggtgttcaaaatggcttcagatcttatcaggacaatcttggctgttgcactaatttccaaacttggcacagctgtagatgcagaactgatgccatctggtgcgattctacagaataagagagaaaatttacccagagtgtgccatgcactggcttttctgggaatggcaaggtgccaggatttgtttttggttcgcttgcaggggtggaaacttggaactaggttccaagatggtccccgcagcaccccacaagaagaaggaggaagcccacagagaaaacggggcatgccagttcaaatccacttccttttaaagagcttcctcagcagcccaataacttttgccttcatctcattggccagaactgtgtcattggctactgctatctgcaagattgtctgagaaatgtagtttttgtagctggatatataactgcctttgacaaaaatccagtttctcttgatgaagaagaagatgatggtggatcttgggaggacaactaacattttatgccctggctacagaatacagttgcagaggagcataaagttcaaaaagatcaaaactctagttccttcacaactgtcaaagctccaagcagcactgctcccctctgacagagtgagcagagtgaaggcatgtcaggtgttctcacaaaactcttgacagggctgacctctctcagtcaatatccttgtcccacatcaggattttctagagggccctgggtacctgtgcacttccttggtggccgtaacctctttgtggagggttggtgtaggataaagaatgttctattacgctgctccctcatctgtatcatttctctcctctctaattttcctgtcagttatattttggtggagtctgggtttgtgtatttgattcctatagaaagaccatcgctttcatgcatggaggaggggaatctacgcaaagaaaggctaccttactcctttctgtgactccaccaccagtctaggaatatcctgggagaagaattgcctctcaaagctgcttctataagcagcctacatcctagctaagcaaagaagaaacacttcccacatctagggctgtctaaaagaactttctgtgatgacagaaatgttctatatctgcagtgtccaatatggtaaccatataggcacatgtggctagtgaacacttgaaatgtggctagtgtgactgaggaaggaaaatttaaattttgtttaattgtaattaatttaaattcagatagccaaatggggctactagctattgtgttagatagcacggtatactttattctctttcttgtgttgtagaaccagctgggagaggtgtgggtcagtcatgggcttggtatcccctggtcttcactattctagcttgccattgaatttgtctcccagaggaaaagaaagaatggtatttggaattaaattcaagatgttaacttgacatctatatattgcacatattcctgtatagtgaatggatgacctcctgggaatagttcctgtgactgattttagtgataattgatcatgaagaaatggcagtactgctccacttcaccttcctagtgactattatgtgttcctagtcagagtgactcagcagagattattttgttctcttgtgcaatttattctgtgtcattttatttttgtaatattgtggcagctaaatgattattctgtgtatgtttttcaaaatattaggtggcttatattttttaaaaggctatgaaataaaaataaactatacgtaacaca

SEQ ID NO: 533 - DNA, 2934 bp, Homo sapiens
  source 1..2934: mol_type = genomic DNA
ccctcctctgctgggcctgggggtctgggccagcaacaagttagtattgcagacatgggccaaggagccagaggccatgcagtggctcagggtccgtgagtcgcctggggaggccacaggacacagggtcaccatggggacagccgccctgggtcccgtctgggcagcgctcctgctctttctcctgatgtgtgagatccctatggtggagctcacctttgacagagctgtggccagcggctgccaacggtgctgtgactctgaggaccccctggatcctgcccatgtatcctcagcctcttcctccggccgcccccacgccctgcctgagatcagaccctacattaatatcaccatcctgaagggtgacaaaggggacccaggcccaatgggcctgccagggtacatgggcagggagggtccccaaggggagcctggccctcagggcagcaagggtgacaagggggagatgggcagccccggcgccccgtgccagaagcgcttcttcgccttctcagtgggccgcaagacggccctgcacagcggcgaggacttccagacgctgctcttcgaaagggtctttgtgaaccttgatgggtgctttgacatggcgaccggccagtttgctgctcccctgcgtggcatctacttcttcagcctcaatgtgcacagctggaattacaaggagacgtacgtgcacattatgcataaccagaaagaggctgtcatcctgtacgcgcagcccagcgagcgcagcatcatgcagagccagagtgtgatgctggacctggcctacggggaccgcgtctgggtgcggctcttcaagcgccagcgcgagaacgccatctacagcaacgacttcgacacctacatcaccttcagcggccacctcatcaaggccgaggacgactgagggcctctgggccaccctcccggctggagagctcaggtgctggtcccgtcccctgcagggctcagtttgcactgctgtgaagcaggaaggccagggaggtccccggggacctggcattctggggagaccctgcttctatcttggctgccatcatccctcccagcctatttctgctcctctcttctctcttggacctattttaagaagcttgctaacctaaatattctagaactttcccagcctcgtagcccagcacttctcaaacttggaaatgcatgcgaatcacccggggttcgtgttaaatgcagattctgactcagcaggtctgagtgggtccaggattctgtgtttctcatatgttcctgggtgatgctgatggggtcagtctatgaaccacactggagcaaccaggttctaggactttctcaatattctagtactttctgaacattctggaatcctccccacattctagaattctcccaacatttttttttcttgagacagagtcttgctctgttgcccaggctagagtgcagtggtgcaatctcagttcactgcaacctctgcctcccgggttcaagcgattcttctgcctcagcctccctagtggctgggattacaggcgcctgctaccatgcctggctaatttttgtatttttagtagagatggggtttcaccatattggccaggctggtcttgaactcctgacttcaggtgacccacccgcctcggcctctcaaaatgctgggattacaggtgtgagccaccgtgcctggccaattccaacattcttaaattctctcatccctccagggctccccgtgctatgttctctttaccccttccccctcttctcttgctcaggcctgcaccactgcagccaccgttcatttattcattcattaaacactgagcactcactctgtgctgggtcccgggaagggtgagggggtcagacacaggccctgcccctgccctcagtgactggccagtccagcccaggcggggagagatgtgtacataggttttaaagcagacccagagctcatgggggcctgtgttctgggtgttcaggtgctgctggtcctccattacccactgctccccaaggctggtgggacggggtcccggtggcaggggcaggtatctccttcccgttcctcatccacctgcccagtgctcatcgttacagcaaaccccagggggccttggccaggtcaagggttctgtgaggagaggacccaggagtgtgggggcatttggggggtgaagtggcccccgaagaatggaacccacacccatagctctccccacagctgatacggcatcctgcgagaagacctgccctcctcactgggatccccttcctgcctcctcccagggctctgccagggccttgctcagtcccttccaccaaagtcatctgaacttccgtttccccagggcctccagctgccctcagacactgatgtctgtccccaggtgctctctgcccctcatgcccctctcaccggcccagtgccccgactctccaggctttatcaaggtgctaaggcccgggtgggcagctcctcgtctcagagccctcctccggcctggtgctgcctttacaaacacctgcaggagaagggccacggaagccccaggctttagagccctcagcaggtctggggagctagagcaaaggagggacctcaggccttccgtttcttcttccagggtggggtggcctggtgttcccctagccttccaaacccaggtggcctgcccttctccccagagggaggcggcctccgcccattggtgctcatgcagactctggggctgaggtgccccggggggtgatctctggtgctcacagccgaggagccgtggctccatggccagatgacggaaacagggtctgaccaagtgccaggaagacctgtgctataaaccaccctgcctgatcctgcccctgcctgaccccgccacgccctgccgtccagcatgattaaagaatgctgtctcctcttgg

SEQ ID NO: 534 - DNA, 1961 bp, Homo sapiens
  source 1..1961: mol_type = genomic DNA
ccggggcctgccgggggcggggggtgttgggaggggcgccccgaggggcggggccgggccgccgtcggttcccacggcaaccgactcaacagtaaggccccgcgggcgtcctggccgccatgtgcaccgtagtggaccctcgcattgtccggagatacctactcaggcggcagctcgggcagggggcctatggcattgtgtggaaggcagtggaccggaggactggtgaggtcgtggccatcaagaaaatctttgatgcttttagggataagacagatgcccagagaacattccgggaaatcacgctcctccaggagtttggggaccatcccaacatcatcagcctccttgacgtgatccgggcagagaacgacagggacatttacctggtgtttgagtttatggacactgacctgaacgcagtcatccggaagggcggcctgctgcaggacgtccacgtgcgctccatcttctaccagctcctgcgggccacccggttcctccactcggggcacgttgtgcaccgggaccagaagccgtccaatgtgctcctggatgccaactgcacagtgaagctgtgtgactttggcctggcccgctccctgggcgacctccccgaggggcctgaggaccaggccgtgacagagtacgtggccacacgctggtaccgagcaccggaggtgctgctctcttcgcaccgatacacccttggggtggacatgtggagtctgggctgtatcctgggggagatgctgcgggggagacccctgttccccggcacgtccaccctccaccagctggagctgatcctggagaccatcccaccgccatctgaggaggacctcctggctctcggctcaggctgccgtgcctctgtgctgcaccagctggggtcccggccacgacagacgctggatgccctcctaccgccagacacctccccagaggccttggacctccttaggcgactcctggtgttcgccccggacaagcggttaagcgcgacccaggcactgcagcacccctacgtgcagaggttccactgccccagcgacgagtgggcacgagaggcagatgtgcggccccgggcacacgaaggggtccagctctctgtgcctgagtaccgcagccgcgtctatcagatgatcctggagtgtggaggcagcagcggcacctcgagagagaagggcccggagggtgtctccccaagccaggcacacctgcacaaacccagagccgaccctcagctgccttctaggacacctgtgcagggtcccagacccaggccccagagcagcccaggccatgaccctgccgagcacgagtccccccgtgcagccaagaacgttcccaggcagaactccgctcccctgctccaaactgctctcctagggaatggggaaaggccccctggggcgaaggaagcgccccccttgacactctcgctggtgaagccaagcgggaggggagctgcgccctccctgacctcccaggctgcggctcaggtggccaaccaggccctgatccggggtgactggaaccggggcggtggggtgagggtggccagcgtacaacaggtccctccccggcttcctccggaggcccggcccggccggaggatgttcagcacctctgccttgcagggtgcccaggggggtgccagggctttgcttggaggctactcccaagcctacgggactgtctgccactcggcactgggccacctgcccctgctggaggggcaccatgtgtgagccgccctactcccttcacctggccctctgttcctgccccagccccttccccagacccctctccagtctcctgcaccccttagccctccctgctttgcctggcccgttgaagttccagggagcttgcccgggtctcctcgggggagcagatgagggccctgcccccgccccactgacttcctccaataaagtcatgtctgcccccaa

SEQ ID NO: 535 - DNA, 596 bp, Homo sapiens
  source 1..596: mol_type = genomic DNA
agagtcactcctgccttcaccatgaagtccagcggcctcttccccttcctggtgctgcttgccctgggaactctggcaccttgggctgtggaaggctctggaaagtccttcaaagctggagtctgtcctcctaagaaatctgcccagtgccttagatacaagaaacctgagtgccagagtgactggcagtgtccagggaagaagagatgttgtcctgacacttgtggcatcaaatgcctggatcctgttgacaccccaaacccaacaaggaggaagcctgggaagtgcccagtgacttatggccaatgtttgatgcttaacccccccaatttctgtgagatggatggccagtgcaagcgtgacttgaagtgttgcatgggcatgtgtgggaaatcctgcgtttcccctgtgaaagcttgattcctgccatatggaggaggctctggagtcctgctctgtgtggtccaggtcctttccaccctgagacttggctccaccactgatatcctcctttggggaaaggcttggcacacagcaggctttcaagaagtgccagttgatcaatgaataaataaacgagcctatttctctttgca

SEQ ID NO: 536 - DNA, 1862 bp, Homo sapiens
  source 1..1862: mol_type = genomic DNA
agaaaaacgaaggtccttccagaagctggtggcaacttcactggggagatattgcaaataacagcgggaacatgaagccgccactcttggtgtttattgtgtgtctgctgtggttgaaagacagtcactgcgcacccacttggaaggacaaaactgctatcagtgaaaacctgaagagtttttctgaggtgggggagatagatgcagatgaagaggtgaagaaggctttgactggtattaagcaaatgaaaatcatgatggaaagaaaagagaaggaacacaccaatctaatgagcaccctgaagaaatgcagagaagaaaagcaggaggccctgaaacttctgaatgaagttcaagaacatctggaggaagaagaaaggctatgccgggagtctttggcagattcctggggtgaatgcaggtcttgcctggaaaataactgcatgagaatttatacaacctgccaacctagctggtcctctgtgaaaaataagattgaacggtttttcaggaagatatatcaatttctatttcctttccatgaagataatgaaaaagatctccccatcagtgaaaagctcattgaggaagatgcacaattgacccaaatggaggatgtgttcagccagttgactgtggatgtgaattctctctttaacaggagttttaacgtcttcagacagatgcagcaagagtttgaccagacttttcaatcacatttcatatcagatacagacctaactgagccttacttttttccagctttctctaaagagccgatgacaaaagcagatcttgagcaatgttgggacattcccaacttcttccagctgttttgtaatttcagtgtctctatttatgaaagtgtcagtgaaacaattactaagatgctgaaggcaatagaagatttaccaaaacaagacaaagctcctgaccacggaggcctgatttcaaagatgttacctgggcaggacagaggactgtgtggggaacttgaccagaatttgtcaagatgtttcaaatttcatgaaaaatgccaaaaatgtcaggctcacctatctgaagactgtcctgatgtacctgctctgcacacagaattagacgaggcgatcaggttggtcaatgtatccaatcagcagtatggccagattctccagatgacccggaagcacttggaggacaccgcctatctggtggagaagatgagagggcaatttggctgggtgtctgaactggcaaaccaggccccagaaacagagatcatctttaattcaatacaggtagttccaaggattcatgaaggaaatatttccaaacaagatgaaacaatgatgacagacttaagcattctgccttcctctaatttcacactcaagatccctcttgaagaaagtgctgagagttctaacttcattggctacgtagtggcaaaagctctacagcattttaaggaacattttaaaacctggtaagaagatctaatgcatcctatatccagtaagtagaattatctcttcatctgggacctggaaatcctgaaataaaaaaggataatgcaataaacacagttgcaggaaagtatgttagctatatactatgaagtactcttagtttacttatgttgaatggcttagctattaatactcaaattgagttaaaatgaaaattcctccttaaaaaatcaaacgtaatatgtattacatttcatggtacattagtagttctttgtatattgaataaatactaaatcacctaggtgtctatgttctatcacatctacaaacatgtcacttcctaattaacaaaatgttcttcctttagtttgcttttgcacttaaaatatatataattgacttttttgg

SEQ ID NO: 537 - DNA, 1800 bp, Homo sapiens
  source 1..1800: mol_type = genomic DNA
gtgctcaaaaacagagtctctctgtggaaggccagttccccaatcccagagagcgtcaaatgaagagaggtaccgactcctgtcccacccaggacgcagccttcagcctccagccttctgaggcagagtaggcatttctgcacgtctgcaaaaggaagggagggaagcactccatcatctcactgggaagaacggcacgggcatacctgcagctactggggttccactgggcttgagggtcgatttttcaccttttgaaggacaagatgcattggaagatgttgctgcttctgctgttgtattacaatgctgaggcttctatgtgccacaggtggagcagggctgtgctcttccctgccgcccaccggccaaagaggtcctcatcactgccattgaacccagtcctgcagacctccctggaggaggtggagctgctctacgagttcctgctggccgaacttgagatcagccctgacctgcagatctccatcaaggacgaggagctggcctccttgcggaaggcctcagacttccgcaccgtctgcaacaacgtcatccccaagagcatcccagacatccgccggctcagcgccagcctctccagccaccctggcatcctcaagaaagaagactttgaaaggacagtgctgaccctggcctacacagcctaccgcacagccctgtcccacggccatcagaaggacatctgggcgcagtccctcgttagcctcttccaggccctgaggcacgacttgatgcgctcctcacagccgggagtacctccctgagagactggcccacaccaggacctcagagcagggaccagcacagtaatccagaaagtcttcattctctactccatttacagagaccagcaacaaaactcttaccgctgacacagagcagcagagatcaaacagtaaccccgatgctcttttctccttgtagtttcctggaagacacatctgattcatgccatcatgtgacctgggctggaagaaagggctggaatggtcattcaagacgcctccatgggcagaatggtttgcctatggcaggcagaattctgatatgcttcaacccagagcagtggccacacactcaagagtgagaacaggcgtgagccaccgtgcctggcccaggatctaaaaactttctaagtttcctccatcgttggcatcctcacagctatctccaatgtcactcaagagacatcaacagacatttaactgctgcagacttcattgctctgtcacctcaccttgaatctaacaaatcaaagtatttctgcaggtccaatggtctaaaatcaaatgcttgttaaatgactttttacaacaccccttactttcctaatccatttcaatcttattttttttattgtggtaaaaaacacatcaggtaaaatgtaccatcttaaccatttttaagcatatggtacagcagtgttaactccatgcatgttgtgaaacagacccccggaactttctcatcttgtaattctgaagttctatacccaccgaacaactcctcttttccccttccccctgcctgccccagctcttggcaccattattctgctttctgtttttgagagtctgactacttaagatacctcatacaagcgggatctggcttacatttcttgagcattgtattctggaaaagtgtttccttcctctgaaaaatgggtagagttctgaaggagaactactggtcttattgtacacttgctgtacctatttttatttaacaaatattcatctatggtataataaagatgtcatgattgagttgctc

SEQ ID NO: 538 - DNA, 1905 bp, Homo sapiens
  source 1..1905: mol_type = genomic DNA
cttcgggcggcctcggcccagctcgggcgtcctcttcgggccccgcttcgggctccgcgaccggcgcttcgggcggtcccggacggcgccttcgggaaggctcggcggagtccggatggaggactcggactcggcggcaaagcagctgggcctggctgaggcggcggcggtggcggccgcggccgctgtggcggcggcggccgcggccgcggcaggaggcgaggcggaggagccggtgctgagcagggacgaggactcggaggaggacgcagactcggaggcggagcgggagacgccgcgggtcacggcagtggcggtgatggcggcggagcccgggcacatggacatgggcgccgaggccctgcccggccccgacgaggccgccgctgccgcagccttcgcagaggtgaccacagtgacagtggccaacgtgggggctgctgcagacaatgtcttcaccacgtctgtggcgaacgcggcatccatctcaggacatgttctgtctggtaggacggcccttcagatcggggacagcctgaacaccgaaaaagcgacactgattgtcgtccacacagatgggagcatcgtggagaccaccgggctgaaaggcccggcagctcccctcaccccaggtcctcagtctcctccaacccctctggctcccggccaagaaaaaggtggaactaaatacaactgggacccttctgtgtacgacagtgagctgcccgtacggtgccggaacatcagcggcactctgtacaagaacaggctcggctcaggatgggatcttaaaccctcacgctgcctcttgcacctgtgctgcctgctgcgacgacatgaccttatcaccgtgaccccctcgggacagatcacgacctcgggggcactgacctttgaccgagcgtccacggtagaggccactgctgtcatatcagagagtccggcccagggcgacgtcttcgcaggggccacagtccaagaggccagcgtgcagcccccatgcagggccagccaccctgagcctcactaccccggctatcaggacagctgccagatcgcaccgtttccagaagctgcgttgccaacgtcacatcccaaaatagtgttgacatccctgcctgcgctggcggtcccacccccgactcccaccaaagcggcacctcccgcgttggtcaatgggctggagctgtcagagccgcggagctggctgtacctagaagagatggtcaactccttgctcaacacagcgcagcagctgaagacgctgtttgagcaagccaagcatgccagcacctaccgagaagctgccacaaaccaggccaagatccacgctgacgcagagcggaaggaggtgatccacccgcctcggctgcccaaagtcctgggattacagcagtcctgcgttaactgcggccgggaggctatgagcgagtgcaccggctgccacaaggtcaactactgctccaccttctgccaacgcaaggactggaaggatcaccagcacatatgcggccagtcagcagctgtcaccgtccaggcagacgaagtccacgtggctgaaagcgtgatggagaaggtgaccgtgtgaggctccatcggccgccctgggagctggggcccctcgcactcctgtgaggcttttgcaggtcgaaggcccccctgaggactctggggggacgttgagaagaggggtgtgggaaggtaaagaaacttgctggacaagtcattaacacactttaagcgaatggtgccctgggaagcgcactccccctgcccgggccccctgcccgctcgcggacagattttttatccctgggatcatgagcgtccggtcttgcccacagggcctgtgctgcgacgcacatacatacgtgttgtgtctgtcaataaagtgtaaataaggtc

SEQ ID NO: 539 - DNA, 2150 bp, Homo sapiens
  source 1..2150: mol_type = genomic DNA
atgccatccacagtgttgccatccacagtgttgccatcactcctgcccacagcaggagctggctggagcatgaggtggattctgtgctggagcctcaccctctgcctgatggcgcagacggccttgggtgccttgcacaccaagaggcctcaagtggtcaccaaatatggaaccctgcaaggaaaacagatgcatgtggggaagacacccatccaagtctttttaggagtccccttctccagacctcctctaggtatcctcaggtttgcacctccagaacccccggagccctggaaaggaatcagagatgctaccacctacccgcctgggtgcctgcaggagtcctggggccagctggcctcgatgtacgtcagcacgcgggaacggtacaagtggctgcgcttcagcgaggactgtctgtacctgaacgtgtacgcgccggcgcgcgcgcccggggatccccagctgccagtgatggtctggttcccgggaggcgccttcatcgtgggcgctgcttcttcgtacgagggctctgacttggccgcccgcgagaaagtggtgctggtgtttctgcagcacaggctcggcatcttcggcttcctgagcacggacgacagccacgcgcgcgggaactgggggctgctggaccagatggcggctctgcgctgggtgcaggagaacatcgcagccttcgggggagacccaggaaatgtgaccctgttcggccagtcggcgggggccatgagcatctcaggactgatgatgtcacccctagcctcgggtctcttccatcgggccatttcccagagtggcaccgcgttattcagacttttcatcactagtaacccactgaaagtggccaagaaggttgcccacctggctggatgcaaccacaacagcacacagatcctggtaaactgcctgagggcactatcagggaccaaggtgatgcgtgtgtccaacaagatgagattcctccaactgaacttccagagagacccggaagagattatctggtccatgagccctgtggtggatggtgtggtgatcccagatgaccctttggtgctcctgacccaggggaaggtttcatctgtgccctaccttctaggtgtcaacaacctggaattcaattggctcttgccttatatcatgaagttcccgctaaaccggcaggcgatgagaaaggaaaccatcactaagatgctctggagtacccgcaccctgttgaatatcaccaaggagcaggtaccacttgtggtggaggagtacctggacaatgtcaatgagcatgactggaagatgctacgaaaccgtatgatggacatagttcaagatgccactttcgtgtatgccacactgcagactgctcactaccaccgagaaaccccaatgatgggaatctgccctgctggccacgctacaacaaggatgaaaagtacctgcagctggattttaccacaagagtgggcatgaagctcaaggagaagaagatggctttttggatgagtctgtaccagtctcaaagacctgagaagcagaggcaattctaagggtggctatgcaggaaggagccaaagaggggtttgcccccaccatccaggccctggggagactagccatggacatacctggggacaagagttctacccaccccagtttagaactgcaggagctccctgctgcctccaggccaaagctagagcttttgcctgttgtgtgggacctgcactgccctttccagcctgacatcccatgatgcccctctacttcactgttgacatccagttaggccaggccctgtcaacaccacactgtgctcagctctccagcctcaggacaacctctttttttcccttcttcaaatcctcccacccttcaatgtctccttgtgactccttcttatgggaggtcgacccagactgccactgcccctgtcactgcacccagcttggcatttaccatccatcctgctcaaccttgtgcctgtctgttcacattggcctggaggcctagggcaggttgtgacatggagcaaacttttggtagtttgggatcttctctcccacccacacttatctcccccagggccactccaaagtctatacacaggggtggtctcttcaataaagaagtgttgattagacctg

SEQ ID NO: 540 - DNA, 1971 bp, Homo sapiens
  source 1..1971: mol_type = genomic DNA
ccgagggtcttccaccctcgccctgaccctggacactgcccagcttggccccccatcctgctcctggcacaatgccctctagccagccaaccttccctcccccaaccctggggccgccccagggttcctgcgcactgcctgttcctcctgggtgtcactggcagccctgtccttcctagagggactggaacctaattctcctgaggctgagggagggtggagggtctcaaggcaacgctggccccacgacggagtgccaggagcactaacagtacccttagcttgctttcctcctccctcctttttattttcaagttcctttttatttctccttgcgtaacaaccttcttcccttctgcaccactgcccgtacccttacccgccccgccacctccttgctaccccactcttgaaaccacagctgttggcagggtccccagctcatgccagcctcatctcctttcttgctagcccccaaagggcctccaggcaacatggggggcccagtcagagagccggcactctcagttgccctctggttgagttggggggcagctctgggggccgtggcttgtgccatggctctgctgacccaacaaacagagctgcagagcctcaggagagaggtgagccggctgcaggggacaggaggcccctcccagaatggggaagggtatccctggcagagtctcccggagcagagttccgatgccctggaagcctgggagaatggggagagatcccggaaaaggagagcagtgctcacccaaaaacagaagaagcagcactctgtcctgcacctggttcccattaacgccacctccaaggatgactccgatgtgacagaggtgatgtggcaaccagctcttaggcgtgggagaggcctacaggcccaaggatatggtgtccgaatccaggatgctggagtttatctgctgtatagccaggtcctgtttcaagacgtgactttcaccatgggtcaggtggtgtctcgagaaggccaaggaaggcaggagactctattccgatgtataagaagtatgccctcccacccggaccgggcctacaacagctgctatagcgcaggtgtcttccatttacaccaaggggatattctgagtgtcataattccccgggcaagggcgaaacttaacctctctccacatggaaccttcctggggtttgtgaaactgtgattgtgttataaaaagtggctcccagcttggaagaccagggtgggtacatactggagacagccaagagctgagtatataaaggagagggaatgtgcaggaacagaggcgtcttcctgggtttggctccccgttcctcacttttcccttttcattcccaccccctagactttgattttacggatatcttgcttctgttccccatggagctccgaattcttgcgtgtgtgtagatgaggggcgggggacgggcgccaggcattgtccagacctggtcggggcccactggaagcatccagaacagcaccaccatctagcggccgctcgagggaagcacccgccggttggccgaagtccacgaagccgccctctgctagggaaaacccctggttctccatgccacacctctctccaggtgccctctgcctcttcaccccacaagaagccttatcctacgtccttctctccatctatcggaccccagtttccatcactatctccagagatgtagctattatgcgcccgtctacagggggtgcccgacgatgacggtgccttcgcagtcaaattactcttcgggtcccaaggtttggctttcacgcgctccattgccccggcgtggcaggccattccaagcccttccgggctggaactggtgtcggaggagcctcgggtgtatcgtacgccctggtgttggtgttgcctcactcctctgagctcttctttctgatcaagccctgcttaaagttaaataaaatagaatgaatgataccccggc

SEQ ID NO: 541 - DNA, 2189 bp, Homo sapiens
  source 1..2189: mol_type = genomic DNA
atgagtcctccactgctgaagcttggcgctgtgcttagtaccatggcaatgatctcaaactggatgtcccaaactctcccatccttggtgggactgaacaccacgaggctgtcgactccggataccttaactcagattagtcctaaagaagggtggcaggtgtacagctcagctcaggatcctgatgggcggtgcatttgcacagttgttgctccagaacaaaacctgtgttcccgggatgccaaaagcaggcaacttcgccaactactggaaaaggttcagaacatgtcccagtctattgaagtcttaaacttgagaactcagagagatttccaatatgttttaaaaatggaaacccaaatgaaagggctgaaggcaaaatttcggcagattgaagatgatcgaaagacacttatgaccaagcattttcaggagttgaaagagaaaatggacgagctcctgcctttgatccccgtgctggaacagtacaaaacagatgctaagttaatcacccagttcaaggaggaaataaggaatctgtctgctgtcctcactggtattcaggaggaaattggtgcctatgactacgaggaactacaccaaagagtgctgagcttggaaacaagacttcgtgactgcatgaaaaagctaacatgtggcaaactgatgaaaatcacaggcccagttacagtcaagacatctggaacccgatttggtgcttggatgacagaccctttagcatctgagaaaaacaacagagtctggtacatggacagttatactaacaataaaattgttcgtgaatacaaatcaattgcagactttgtcagtggggctgaatcaaggacatacaaccttcctttcaagtgggcaggaactaaccatgttgtctacaatggctcactctattttaacaagtatcagagtaatatcatcatcaaatacagctttgatatggggagagtgcttgcccaacgaagcctggagtatgctggttttcataatgtttacccctacacatggggtggattctctgacatcgacctaatggctgatgaaatcgggctgtgggctgtgtatgcaactaaccagaatgcaggcaatattgtcatcagccaacttaaccaagataccttggaggtgatgaagagctggagcactggctaccccaagagaagtgcaggggaatctttcatgatctgtgggacactgtatgtcaccaactcccacttaactggagccaaggtgtattattcctattccaccaaaacctccacatatgagtacacagacattcccttccataaccaatactttcacatatccatgcttgactacaatgcaagagatcgagctctctatgcctggaacaatggccaccaggtgctgttcaatgtcacccttttccatatcatcaagacagaggatgacacataggcaaatgtgacatgttttcattgatttaaacagtgtgatttgtgataaactctataagaccccttccgtttttttcttcactattatttttcatcatttctccaaagcaaagcatttttattgtaaagttggtgtttcaaaaacatagctgagcttgtctaacttaccatgttggaaacacatcttaacttctaaatttacaaggcctatcatgtccttgtcatgaaaagcactaaaaaaaaaaagagtttaagtggctaaagtcatagttttgcaagagattaatgatctgccttatattagagtcagagactaatggtggcttaaatgcacgaatgtctttttttttaaaactgtcattttttactgtcttttgctccatatcaggaaatattttggtaggaattaggagaacaaaaagcacttttatcccatttatttctttaaaaaatgtaaggatttcatttatattgaaaaataatattaatcattttgctgttaacacaattctctgatgcggtgctgtacagtcatttttaaatctcttgctaacattttattggcagtatgtatttctaccattgtaaccaccattgtgctattgtatctcttcacttctgtgaaagtaatattttttataaaatacactgaaatttaacctcagtaattgagtccattttcaagtgtggtcaagaataatcttcttggcttacccctttacataagcattataaactaaaatgaaaaccaaa

SEQ ID NO: 542 - DNA, 1119 bp, Homo sapiens
  source 1..1119: mol_type = genomic DNA
atggcccgggagaggccgcccgggaggggctgcggcgtcctgcgccggtgtctactcggggctgtgctgttgttcggcctgcggctctgcgcagagctgcggcgcgccgggcccgggtcccccacccgcagcgccccgccgggcccggcctggcggccacctgggccgcacctgccgcccgcgccgggccagccgcgcggcgccagcaggaggcaggtgacctacgtgcgcagcggtcgccgggcgccgccggggggcggcgggagcgggacgccggagcctggctgctgtgccccgcgcgggcgcccccgccggaagggtccccggtggcatatagatctccagccttgggcaggctctgctcagtccctggatgaagaagcctggaggttcctgagatatatcagcaccacccagattgcatgcaatcacatgaatacagacagcctggctactgactctagtcctacacacaagccctggtcagtgtgtcttgacgacaggttcaatttagctcatcaaatccgcaacaagcagtgccgcctctactccttagggctaggaagtgatgatacccattttgaggttagcatggccaacaacggatgtgaagtgcatcgttttgatcctagtgtcaagtcagctcacattctggagagtcagcacctttggtatcaccgcttgtccattgactggcgggatccccatccagctgttgctgcccaaaaaccacatagcaacaccagaaaactgggaagcattttgaatgaatttggacatcacaagattgacgttctcaaggcagatctggaaagtgcagaatggaaagttttggaaaatcttattctggaagatgttcttgagcagattggacagctcatctttgagatccatctccactggcctgggtttgaggtcagtggcagtgacagcagcgttgtgcggttctggtacagccttctcaaagagttagaacaaaaggatttcaggctttttcacagttacaaagacttatctaaacctcagctattcttgaagaaagacattttcaatgcaagtagctgttatactctgagttgggtgaatacaagatggaaataggatgcaggatgtcatcaa

SEQ ID NO: 543 - DNA, 491 bp, Homo sapiens
  source 1..491: mol_type = genomic DNA
gggaccccatttctgtgctcatctgcctccttggcaatataaagagcaagcactgaggccccgcctcagagcaccccaaacttgacgccatgaagatcccggtccttcctgccgtggtgctcctctccctcctggtgctccactctgcccagggagccaccctgggtggtcctgaggaagaaagcaccattgagaattatgcgtcacgacccgaggcctttaacaccccgttcctgaacatcgacaaattgcgatctgcgtttaaggctgatgagttcctgaactggcacgccctctttgagtctatcaaaaggaaacttcctttcctcaactgggatgcctttcctaagctgaaaggactgaggagcgcaactcctgatgcccagtgaccatgacctccactggaagagggggctagcgtgagcgctgattctcaacctaccataactctttcctgcctcaggaactccaataaaacattttccatccaa

SEQ ID NO: 544 - DNA, 1049 bp, Homo sapiens
  source 1..1049: mol_type = genomic DNA
gctctacctcttggacttccaacttctgtgagtcaacatagtgcctcttgcatttaagtgtctgcaggaaaaatgatgagaactctcatcaccacacacccactgcccctgcttctattgccgcagcagctgctgcagctggtgcagtttcaagaggtggatacagattttgatttcccagaagaagataaaaaagaagaatttgaagagtgtttggaaaaattttttagtacagggcccgccagaccacctaccaaagaaaaagtcaaaagacgtgtccttattgaacctggaatgccactaaatcatatagagtactgtaaccatgaaatcatgggaaaaaatgtttactacaaacaccgttgggtggcagaacattacttccttcttatgcaatatgacgagctccaaaaaatctgttacaacagatttgtgccatgtaagaatggaattaggaaatgtaacaggagcaaaggtcttgtagaaggagtgtattgtaatttaacagaagcatttgaaataccagcgtgtaaatacgaatcactttataggaagggctacgtccttatcacttgttcatggcaaaatgaaatgcaaaaacgtattcctcatactataaatgatctcgtggagccacctgaacacagaagtttcctcagtgaggatggtgtctttgtcatatcgccctagcagagcgttctctgagagcttagggtgggaggaatatttctctccatactgatccttatagatcaaagttgagaatggtaattttgcttccattcactttaatcacccaccttcctttcttcctttcccaacacctcacaaaagcaccttaggctaggttcacagacggtgctctgagatgtggtctcatgcaggtcccctaagttagcatgccttgaatgtgttacggatacagatgcctgcagtggaaggatgaccagcaccaagaggaaaaggaaatggttgcctgaagtgtgctccaaagacacatccatgtgattctctagttcagcagaaagaataaaaattgcttcaatcta

SEQ ID NO: 545 - DNA, 402 bp, Homo sapiens
  source 1..402: mol_type = genomic DNA
atgctggactggagattggcaagtgcacatttcatcctggctgtgacactgacactgtggagctcaggaaaagtcctctcagtagatgtaacaacaacagaggcctttgattctggagtcatagatgtgcagtcaacacccacagtcagggaagagaaatcagccactgacctgacagcaaaactcttgcttcttgatgaattggtgtccctagaaaatgatgtgattgagacaaagaagaaaaggagtttctctggttttgggtctccccttgacagactctcagctggctctgtagatcacaaaggtaaacagaggaaagtagtagatcatccaaaaaggcgatttggtatccccatggatcggattggtagaaaccggctttcaaattccagaggctaa

SEQ ID NO: 546 - DNA, 2885 bp, Homo sapiens
  source 1..2885: mol_type = genomic DNA
acatctggctgggcttcgctccttgcgcgtctgtcccactttctccctctcttcctttactttcgagaaaccgcgcttccgcttctggtcgcagagacctcggagaccgcgccggggagacggaggtgctgtgggtgggggggacctgtggctgctcgtaccgccccccaccctcctcttctgcactgccgtcctccggaagaccttttcccctgctctgtttccttcaccgagtctgtgcatcgccccggacctggccgggaggaggcttggccggcgggagatgctctacgggcggcgcgggaggagcggccggcgggacggagggcccggcaggaagatgggctcccgtggacagggactcttgctggcgtactgcctgctccttgcctttgcctctggcctggtcctgagtcgtgtgccccatgtccagggggaacagcaggagtgggaggggactgaggagctgccgtcgcctccggaccatgccgagagggctgaagaacaacatgaaaaatacaggcccagtcaggaccaggggctccctgcttcccggtgcttgcgctgctgtgaccccggtacctccatgtacccggcgaccgccgtgccccagatcaacatcactatcttgaaaggggagaagggtgaccgcggagatcgaggcctccaagggaaatatggcaaaacaggctcagcaggggccaggggccacactggacccaaagggcagaagggctccatgggggcccctggggagcggtgcaagagccactacgccgccttttcggtgggccggaagaagcccatgcacagcaaccactactaccagacggtgatcttcgacacggagttcgtgaacctctacgaccacttcaacatgttcaccggcaagttctactgctacgtgcccggcctctacttcttcagcctcaacgtgcacacctggaaccagaaggagacctacctgcacatcatgaagaacgaggaggaggtggtgatcttgttcgcgcaggtgggcgaccgcagcatcatgcaaagccagagcctgatgctggagctgcgagagcaggaccaggtgtgggtacgcctctacaagggcgaacgtgagaacgccatcttcagcgaggagctggacacctacatcaccttcagtggctacctggtcaagcacgccaccgagccctagctggccggccacctcctttcctctcgccaccttccacccctgcgctgtgctgaccccaccgcctcttccccgatccctggactccgactccctggctttggcattcagtgagacgccctgcacacacagaaagccaaagcgatcggtgctcccagatcccgcagcctctggagagagctgacggcagatgaaatcaccagggcggggcacccgcgagaaccctctgggaccttccgcggccctctctgcacacatcctcaagtgaccccgcacggcgagacgcgggtggcggcagggcgtcccagggtgcggcaccgcggctccagtccttggaaataattaggcaaattctaaaggtctcaaaaggagcaaagtaaaccgtggaggacaaagaaaagggttgttatttttgtctttccagccagcctgctggctcccaagagagaggccttttcagttgagactctgcttaagagaagatccaaagttaaagctctggggtcaggggaggggccgggggcaggaaactacctctggcttaattcttttaagccacgtaggaactttcttgagggataggtggaccctgacatccctgtggccttgcccaagggctctgctggtctttctgagtcacagctgcgaggtgatgggggctggggccccaggcgtcagcctcccagagggacagctgagccccctgccttggctccaggttggtagaagcagccgaagggctcctgacagtggccagggacccctgggtcccccaggcctgcagatgtttctatgaggggcagagctcctggtacatccatgtgtggctctgctccacccctgtgccaccccagagccctggggggtggtctccatgcctgccaccctggcatcggctttctgtgccgcctcccacacaaatcagccccagaaggccccggggccttggcttctgttttttataaaacacctcaagcagcactgcagtctcccatctcctcgtgggctaagcatcaccgcttccacgtgtgttgtgttggttggcagcaaggctgatccagaccccttctgcccccactgccctcatccaggcctctgaccagtagcctgagaggggctttttctaggcttcagagcaggggagagctggaaggggctagaaagctcccgcttgtctgtttctcaggctcctgtgagcctcagtcctgagaccagagtcaagaggaagtacacgtcccaatcacccgtgtcaggattcactctcaggagctgggtggcaggagaggcaatagcccctgtggcaattgcaggaccagctggagcagggttgcggtgtctccacggtgctctcgccctgcccatggccaccccagactctgatctccaggaaccccatagcccctctccacctcaccccatgttgatgcccagggtcactcttgctacccgctgggcccccaaacccccgctgcctctcttccttccccccatcccccacctggttttgactaatcctgcttccctctctgggcctggctgccgggatctggggtccctaagtccctctctttaaagaacttctgcgggtcagactctgaagccgagttgctgtgggcgtgcccggaagcagagcgccacactcgctgcttaagctcccccagctctttccagaaaacattaaactcagaattgtgttttcagc

SEQ ID NO: 547 - DNA, 484 bp, Homo sapiens
  source 1..484: mol_type = genomic DNA
gcccacagccctgctgataaaagcaaagctcatctctgccgtgctgcagggaaccctatttccttcccctgcagctcagccacctcctcctctcaggtctgccagccatgaaacttctttacctgtttcttgccatccttctggccatagaagaaccagtgatatcagctctggtgaggacagtgggatgctgcctggatactgccaggcaaacgccacatccttcgatgcatgggtaacagtggaatttgtagggcctcttgcaaaaagaacgaacagccctacctctattgcagaaattgtcagtcctgctgcctccagtcctacatgaggataagcatttctggcaaagaggaaaataccgactggtcttatgagaagcagtggccaagactaccttgagtgctggtgattaccattctcaagctctctgggcacagagacctgctgtcaacccccctcattaaaattcatgtgcctgcta

SEQ ID NO: 548 - DNA, 1659 bp, Homo sapiens
  source 1..1659: mol_type = genomic DNA
cgacgctccggcgctgggtccccgaggcccggcccctccccgggaggaggtgggcttcgagtcacgtgacccgtgccctacgggagggggtgcggtcggggacccggcaggaggcggccgagaagagaggaccgtgggggcgttcgcgtggctcccagcccgggaccccacccccgctggacagtgggggaaactgaggcctgagcgggcccacacaggaccatgaaggtgcttctcctcacagggctgggggccctgttcttcgcctattattgggatgacaacttcgacccagccagcctccagggagcgcgagtgctgctgacaggggccaacgctggtgttggtgaggagctggcctatcactacgcgcgtctgggctcccacctggtgctcactgcccacactgaggctctcctgcagaaggtggtagggaactgccggaagctgggcgcccccaaggtcttctacatcgcggcggacatggcctcccctgaggcgcccgagagcgtggtgcagtttgcgctggacaagctgggcgggctggactacctcgtgctgaaccacatcggcggcgccccggccggcacgcgagcccgcagcccccaggcaactcgctggctcatgcaggtaaactttgtgagctacgtgcaactgacgtcgcgggcgctgcccagcctgacggacagcaagggctccctggtggtggtgtcctcgctgctcggccgcgtgcccacgtcgttctccactccctactcggcggccaagtttgcgctggacggcttcttcggctccctgcggcgggagctggacgtgcaggacgtgaacgtggccatcaccatgtgcgtcctgggcctccgagatcgcgcctccgccgccgaggcagtcaggggagtcacgagggtcaaggcggccccggggcccaaggcagccctggccgtgatccgcggcggcgccacgcgcgcggccggcgtcttctacccgtggcgtttccgcctgctgtgcttgctccggcgctggctaccgcgcccgcgggcctggtttatccgccaggagctcaacgtcacggccgcggcagcctgagcaccggggggtgcccctccagtcccagacggcaatgttcctccctccaactgtccctggagccagaacactcacagagacacccctgagagggtggccacagcccaagatgaagtcatcaagacagaaaagcaaaaccgagaaaaacgacgggcacctggaaccagtcacggcttgggaggtgcaggtgccccgtgttaggcgcctttgtcggggacttgcaaggcctcacctgtttggccatgattgatgacgtgactgcttccattttgcagatgaggaaactaaggctcagagaggccacgccacccttgagccacccatggacccctctccatctcctgcctgcgcctttaagtccctgatttattctttccattcattccatctgggaggaacccccccaactcctgccagcttcccctagctggggtctctggtactcttcacacctgcaggggcgtctacactgttcgtctacctggtggcagggtctgagcgggaggaggagggaaagagtgtgttctgagctggacccagcctcttgttcgagaataaaaactcttcttctcttgc

SEQ ID NO: 549 - DNA, 1963 bp, Homo sapiens
  source 1..1963: mol_type = genomic DNA
gtgcacagcattagtataacgtgagggctgaatgcagcccattctctggagaacttcctcacacaccgcagcaaagagaagactgaaagacaaacctgggtgcagccagagaggtccagatagatgagcttgtggcatccattccccaagttcagcctagggactccacgtaccccagctgggtctcattgttccagaactgcattagttaagattacccagacttggatttcaaaggaatactttcattgttccgtctgtaacacgaagtaattggggccagctggatgtcaggatgcgtgtggttaccattgtaatcttgctctgcttttgcaaagcggctgagctgcgcaaagcaagcccaggcagtgtgagaagccgagtgaatcatggccgggcgggtggaggccggagaggctccaacccggtcaaacgctacgcaccaggcctcccgtgtgacgtgtacacatatctccatgagaaatacttagattgtcaagaaagaaaattagtttatgtgctgcctggttggcctcaggatttgctgcacatgctgctagcaagaaacaagatccgcacattgaagaacaacatgttttccaagtttaaaaagctgaaaagcctggatctgcagcagaatgagatctctaaaattgagagtgaggcgttctttggtttaaacaaactcaccaccctcttactgcagcacaaccagatcaaagtcttgacggaggaagtgttcatttacacacctctcttgagctacctgcgtctttatgacaacccctggcactgtacttgtgagatagaaacgcttatttcaatgttgcagattcccaggaaccggaatttggggaactacgccaagtgtgaaagtccacaagaacaaaaaaataaaaaactgcggcagataaaatctgaacagttgtgtaatgaagaagaaaaggaacaattggacccgaaaccccaagtgtcagggagacccccagtcatcaagcctgaggtggactcaactttttgccacaattatgtgtttcccatacaaacactggactgcaaaaggaaagagttgaaaaaagtgccaaacaacatccctccagatattgttaaacttgacttgtcatacaataaaatcaaccaacttcgacccaaggaatttgaagatgttcatgagctgaagaaattaaacctcagcagcaatggcattgaattcatcgatcctgccgcttttttagggctcacacatttagaagaattagatttatcaaacaacagtctgcaaaactttgactatggcgtattagaagacttgtattttttgaaactcttgtggctcagagataacccttggagatgtgactacaacattcactacctctactactggttaaagcaccactacaatgtccattttaatggcctggaatgcaaaacgcctgaagaatacaaaggatggtctgtgggaaaatatattagaagttactatgaagaatgccccaaagacaagttaccagcatatcctgagtcatttgaccaagacacagaagatgatgaatgggaaaaaaaacatagagatcacaccgcaaagaagcaaagcgtaataattactatagtaggataaggtagaaattgttctgattgtaattagttttgtattttctatactggtgttagaaaacatatgtttacatttgattaactgtgttgcctatttatgcagggtaatccagctaaaggaagctttctttaattataagtattattgtgactattatagtaatcaagagaatgctatcatcctgcttgcctgtccatttgtggaacagcatctggtgatatgcaattccacactggtaacctgcagcagttgggtcctaatgatggcattagactttcataatgtcctgtataaatgtttttactgcttttagaaaataaagaaaaaaaacttggttcatgttta

SEQ ID NO: 550 - DNA, 3331 bp, Homo sapiens
  source 1..3331: mol_type = genomic DNA
aggctggctgaggttacgaaagcagagatggggtggttgttgggggggaccaaggggacgggctggcctgtcctcaccaccccatccggccgcctgcccgtcctccccagggcggggaagggggtgggccagctcccccaaagccccgggagaacaggctgttgtggggggtggcatgggtctggagatggggggcggtggtggccacagcagaggctccaggaggtgaccgcctggtttccattaggaagtcctggtcagcagcttgggcgagatggcagagtcagggctggccatgtggccgagcctgctgctgctcctgctgttgccggggcccccgcccgtcgccggcttggaagacgctgccttcccccacctgggggagagcttgcagcccctgccccgggcctgtcccctgcgctgctcctgcccccgagtcgacactgtggactgtgatggcttggaccttcgagtgttcccggacaacatcaccagagccgctcagcacctctccctgcagaacaaccagctccaggaactcccctacaatgagctgtcccgcctcagtggcctgcgaaccctcaacctccacaacaacctcatctcctccgaaggcctgcctgacgaggccttcgagtccctcacccagctgcagcacctctgcgtggctcacaacaagctctcagtggcccctcagtttctgccccggtccctccgtgtcgcggatctggctgccaaccaagtgatggagatcttccccctcacctttggggagaagccggcactcaggtccgtgtacctccacaacaaccagctgagcaacgctggcctgccccccgacgccttccgcggctccgaggccatcgccaccctcagcctctccaacaaccagctcagctacctgccgcccagcctgccgccctcactcgagcggctccacctgcagaacaatctcatctccaaggtgccccgaggagccctgagccgccagactcaactccgtgagctctacctccagcacaaccagctgacagacagtggcctggatgccaccaccttcagcaagctgcatagccttgaatacctggatctctcccacaaccagctgaccacagtgcccgccggcctgccccggaccctggctatcctgcacctgggccgcaaccgcatccggcaggtggaggcggctcggctgcacggggcgcgtggtctgcgctatttgttgctgcagcacaaccagctggggagctcagggctgcccgccggggctctgcggccgctgcggggcctgcacacgctgcacctctatggcaatgggctggaccgcgtgcctccagccctgccccgccgcctgcgtgccctggtgctgccccacaaccacgtggccgcgctgggtgcccgtgacctggtcgccacaccgggcctgacggagcttaacctggcctataaccgcctggccagcgcccgtgtgcaccaccgggccttccgccggttgcgtgccctgcgcagcctcgacctggcagggaatcagctaacccggctgcccatgggcctgcccactggcctgcgcaccctgcagctgcaacgcaaccagctgcggatgctcgagcccgagcctctggccggcctggaccaactgcgggagctcagcctggcgcacaaccggctccgggtcggcgacatcgggccaggcacctggcatgagctccaagccctccaggtcaggcacaggctggttagccacactgtccccagggcccctccatccccctgcctgccctgccacgtcccaaacattctagttagctggtaaagcaatcagaacaagaaaatgataagagtgggttagaaggtgatgaggaggctgggtgaggtggctcatgcctgtaatcccagcactttggggagccaaggcaggagaatcgctttaggctatgggtttgagaccagcctggcaacacagcaagaccctatctctaccaaaaaaacatagccaagcgtggtggcacatgcctgtagtcccagctattcaggaggctgaggcaggaggatcgcttgagcccagaagtttgaggctgcaatgagccgtgatcgggccactgccctctagactgggcaacagagcaagaccctgtctcttgaaaaaaaaagtgatgaaagaggtatggtgcgattcaatgactgactcatttaatcaagtggggacctgtctgtctgtgccttcctgggaagggccttagtttacctctgcagaagggaggaatttggcaatcatggggggtggggggcagaagggccaggctggtatgaagggggcaggggactctcagagaggttgggggctggctgagctgagtggcccaggcctggggctgccacgatgccatctataaccccctgcccagatgctggacctcagccacaatgagctgtcctttgtgcccccggacctgcctgaggccctagaggagctgcacctcgagggcaaccgcatcggccacgtgggccccgaggccttcctcagcacaccccgcctgcgtgccctcttcctcaggtgccccgagggtgaccggaggggtggaggtgggcaggggagggcctgggagggtcatgaccgcctctctgtgcagggccaacaggcttcacatgacgagcatcgcggctgaggccttcctggggctcccaaacctgcgtgtggtggacacggcagggaatccggagcaggtcctgatccggctgcctcccaccaccccacgtgggccacgggcagggggcccctgatcctagagaggcccagcagagcagctcagactcctgggactccgctgggccgtggactgaggagacaacgcccaccaggggcccttggtctggctctcctgggcctccagggctgggcctgctctgcctgccactggccgagacacagaggcacacagctggcatactccaggctcacagaccacgccggcctggcgggacacaccctaccccaaactcccaacacagatggaggcagcaacaataaagccaaacccttccagcactcagcacggaccaggcaccctttgggggctctgtccacggactcctccccacaaccagtccagctggggaaactgaggctctgggatgctaagtgggtcaggactgaattttgaggtcttgaggcacacactggggtcaccaaacagcaccctgtgcgacctagccacgtgtgattgcagggacgcccaaggccacccactgaaaaaacactgggtgacagatatagggaccctcacatgtatccccccccacagcaagcatgggaatgaaatgcatccttcaa

SEQ ID NO: 551 - DNA, 2888 bp, Homo sapiens
  source 1..2888: mol_type = genomic DNA
atgaaggaaggccctgaggaggcgggaagtggccgctatggaccccgttatatcaccgacatgggagctggtgaggatgatgaaggatttgaagacgacttagatttggatatttcctttgaggaggttaaaccacttcctgctaccaaaggagggaataagaaatttttggtggaaagcaagaagatgtctatatctaacccaaagaccatttctaggctcatcccccctacctcagcatctctccctgtgaccacggtggctccccagcccattcccatacagagaaaggggaagaatggtgtggccataatgtcaaggctctttgacatgccttgtgatgaaactctctgctctgctgacagcttctgtgtcaatgactacacctgggggggctcgcgatgccagtgcaccctgggcaaaggtggtgagagctgctcagaagatattgttatccagtatcctcagttctttggccactcctatgtaacgtttgaacctctgaagaattcttatcaggcatttcaaattactcttgaatttagggcggaggcagaggatggcttactgctctactgtggggagaacgaacacgggaggggggatttcatgtccctggctatcatccgacgctccctgcagttcaggtttaattgtggaactggggttgccatcatcgtaagtgagaccaaaatcaaactagggggttggcacacggttatgctctacagagatgggctgaacgggctgctgcagctgaacaatggcaccccagtgacaggccagtctcagggccaatacagtaaaattactttccggacacctctctatcttggtggcgctcccagcgcttactggttggttagagcaacagggacaaaccgaggctttcaaggctgtgtgcagtcgctcgctgtgaatgggaggagaattgacatgaggccctggcccctgggaaaagcactcagtggggctgatgtgggggaatgcagcagtggaatctgtgatgaggcctcgtgcatccatggtggcacctgcacagcaatcaaagccgactcctacatttgcctctgtccccttgggtttaaaggtcgacactgtgaagatgctttcaccttgaccattcctcagttcagagagtctctgagatcttacgctgcaactccctggccactggagccccagcattacctttccttcatggaatttgagatcacatttcggccagactcaggagatggtgtcctcctgtacagctatgacacaggcagcaaagacttcctgtccatcaacttggcagggggccacgtggagttccgctttgactgtggctctgggaccggtgtcctcaggagtgaagatcccctcaccctgggcaactggcacgagcttcgtgtatctcgcacagcaaagaatggaatcttacaggtggataagcagaagatagtggagggaatggcagagggaggcttcacacagattaagtgcaacacagacattttcattggcggagtccccaattatgatgatgtgaagaagaactcgggtgtcctgaagcctttcagcgggagcatccagaagatcatcctgaatgaccgaaccatccatgtgaagcatgacttcacctccggagtgaatgtggagaatgcggcccacccctgtgtgagagccccttgtgcccatgggggcagctgccggcccaggaaggagggctatgactgtgactgccccttgggctttgaggggcttcactgccagaaagcgatcatagaagccattgagatcccgcagtttatcggccgcagttacctgacgtatgacaacccagatatcttgaagagggtgtcaggatcaagatcaaatgtgttcatgaggtttaaaacaactgccaaggatggccttttgctgtggaggggagacagccccatgagacccaacagcgacttcatttccttgggccttcgggatggagccctcgtgttcagctataacctgggcagtggtgtggcatccatcatggtgaatggctccttcaacgatggtcggtggcaccgagttaaggccgttagggatggccagtcaggaaagataaccgtggatgactatggagccagaacaggcaaatccccaggcatgatgcggcagcttaacatcaatggagctctgtatgtgggtggaatgaaggaaattgctctgcacactaacaggcaatatatgagagggctcgtgggctgtatctctcacttcaccctgtccaccgattaccacatttccctcgtggaagatgccgtggatgggaaaaacatcaacacttgtggagccaagtaacaccagctggccttgtccaagggacagagccttctattctgagaatcccaggggccctcagaccctgcctgatgctatatgcagaggcccagggaccaggtgtgtttcctctcaccaagaagaaagtacacactgatgagaaactgagaaccaagacaggcatccctgggtggcctttcctgctgacactccacgagctgacccagcagaattctctgtgtaggaagcatcggactttgtccattgaatatgtagcggctgccagagatcacacatcaatgcaaattccagagcctgtctgctatagctcagtgactgtgttgtgattcatagtacattaaaaagagagagagagagaaagaatcccacagggcactattaaaatacttctctccttccctgactcatgacactcttcctgacagcagaatgactgtgtgaccttgaacttcacatttcccacattggcccttggattgttcggattaaccccttccactcctcactggctggttcactgtgttctgactagtccataaaaataaagatggaaggagatc

SEQ ID NO: 552 - DNA, 1927 bp, Homo sapiens
  source 1..1927: mol_type = genomic DNA
tctgagaagcccaggcagttgaggacaggagagagaaggctgcagacccagagggagggaggacagggagtcggaaggaggaggacagaggagggcacagagacgcagagcaagggcggcaaggaggagaccctggtgggaggaagacactctggagagagagggggctgggcagagatgaagttccaggggcccctggcctgcctcctgctggccctctgcctgggcagtggggaggctggccccctgcagagcggagaggaaagcactgggacaaatattggggaggcccttggacatggcctgggagacgccctgagcgaaggggtgggaaaggccattggcaaagaggccggaggggcagctggctctaaagtcagtgaggcccttggccaagggaccagagaagcagttggcactggagtcaggcaggttccaggctttggcgtagcagatgctttgggcaacagggtcggggaagcagcccatgctctgggaaacactgggcacgagattggcagacaggcagaagatgtcattcgacacggagcagatgctgtccgcggctcctggcagggggtgcctggccacaatggtgcttgggaaacttctggaggccatggcatctttggctctcaaggtggccttggaggccagggccagggcaatcctggaggtctggggactccgtgggtccacggataccccggaaactcagcaggcagctttggaatgaatcctcagggagctccctggggtcaaggaggcaatggagggccaccaaactttgggaccaacactcagggagctgtggcccagcctggctatggttcagtgagagccagcaaccagaatgaagggtgcacgaatcccccaccatctggctcaggtggaggctccagcaactctgggggaggcagcggctcacagtcgggcagcagtggcagtggcagcaatggtgacaacaacaatggcagcagcagtggtggcagcagcagtggcagcagcagtggcggcagcagtggcggcagcagtggtggcagcagtggcaacagtggtggcagcagaggtgacagcggcagtgagtcctcctggggatccagcaccggctcctcctccggcaaccacggtgggagcggcggaggaaatggacataaacccgggtgtgaaaagccagggaatgaagcccgcgggagcggggaatctgggattcagaactctgagacgtctcctgggatgtttaactttgacactttctggaagaattttaaatccaagctgggtttcatcaactgggatgccataaacaagaaccaggtcccgccccccagcacccgagccctcctctacttcagccgactctgggaggatttcaaacagaacactcctttcctcaactggaaagcaattattgagggtgcggacgcgtcatcactgcagaaacgtgcaggcagagacgatcagaactacaattacaaccagcatgcgtatcccactgcctatggtgggaagtactcagtcaagacccctgcaaaggggggagtctcaccttcttcctcggcttcccgggtgcaacctggcctgctgcagtgggtgaagttttggtaggcaatttcttgcaaccaccaccgaggccccgaaaagcactggtcgtcagggagctcctccccttggcccccagcctgtgccagccctggcccggctgccacacctctgtttcctaggctggggacccagcttgtctctccttgtttcttcccactgcactgtggtgcttcagtggccaccagcctcgtcacatacaccagcatctttctgtacctcctccctttggtgacctgaagtcactgtgacagttctccaggaaggaggagcttcctacttttgagtttctctgtggaaataaaacatgaatcttgtttcccta

SEQ ID NO: 553 - DNA, 3155 bp, Homo sapiens
  source 1..3155: mol_type = genomic DNA
agccccgcccccgcttgcgcgaggcctagggctgcaggcgcggagccgcgagccccagccaatgagcgccggcgggccggttgcccaggcgaccagtgcgcggctccgccccccgcggcgaggctcccgcgcgcggctgagtgcggactggagtgggaacccgggtccccgcgcttagagaacacgcgatgaccacgtggagcctccggcggaggccggcccgcacgctgggactcctgctgctggtcgtcttgggcttcctggtgctccgcaggctggactggagcaccctggtccctctgcggctccgccatcgacagctggggctgcaggccaagggctggaacttcatgctggaggattccaccttctggatcttcgggggctccatccactatttccgtgtgcccagggagtactggagggaccgcctgctgaagatgaaggcctgtggcttgaacaccctcaccacctatgttccgtggaacctgcatgagccagaaagaggcaaatttgacttctctgggaacctggacctggaggccttcgtcctgatggccgcagagatcgggctgtgggtgattctgcgtccaggcccctacatctgcagtgagatggacctcgggggcttgcccagctggctactccaagaccctggcatgaggctgaggacaacttacaagggcttcaccgaagcagtggacctttattttgaccacctgatgtccagggtggtgccactccagtacaagcgtgggggacctatcattgccgtgcaggtggagaatgaatatggttcctataataaagaccccgcatacatgccctacgtcaagaaggcactggaggaccgtggcattgtggaactgctcctgacttcagacaacaaggatgggctgagcaaggggattgtccagggagtcttggccaccatcaacttgcagtcaacacacgagctgcagctactgaccacctttctcttcaacgtccaggggactcagcccaagatggtgatggagtactggacggggtggtttgactcgtggggaggccctcacaatatcttggattcttctgaggttttgaaaaccgtgtctgccattgtggacgccggctcctccatcaacctctacatgttccacggaggcaccaactttggcttcatgaatggagccatgcacttccatgactacaagtcagatgtcaccagctatgactatgatgctgtgctgacagaagccggcgattacacggccaagtacatgaagcttcgagacttcttcggctccatctcaggcatccctctccctcccccacctgaccttcttcccaagatgccgtatgagcccttaacgccagtcttgtacctgtctctgtgggacgccctcaagtacctgggggagccaatcaagtctgaaaagcccatcaacatggagaacctgccagtcaatgggggaaatggacagtccttcgggtacattctctatgagaccagcatcacctcgtctggcatcctcagtggccacgtgcatgatcgggggcaggtgtttgtgaacacagtatccataggattcttggactacaagacaacgaagattgctgtccccctgatccagggttacaccgtgctgaggatcttggtggagaatcgtgggcgagtcaactatggggagaatattgatgaccagcgcaaaggcttaattggaaatctctatctgaatgattcacccctgaaaaacttcagaatctatagcctggatatgaagaagagcttctttcagaggttcggcctggacaaatggagttccctcccagaaacacccacattacctgctttcttcttgggtagcttgtccatcagctccaccccttgtgacacctttctgaagctggagggctgggagaagggggttgtattcatcaatggccagaaccttggacgttactggaacattggaccccagaagacgctttacctcccaggtccctggttgagcagcggaatcaaccaggtcatcgtttttgaggagacgatggcgggccctgcattacagttcacggaaaccccccacctgggcaggaaccagtacattaagtgagcggtggcaccccctcctgctggtgccagtgggagactgccgcctcctcttgacctgaagcctggtggctgctgccccacccctcactgcaaaagcatctccttaagtagcaacctcagggactgggggctacagtctgcccctgtctcagctcaaaaccctaagcctgcagggaaaggtgggatggctctgggcctggctttgttgatgatggctttcctacagccctgctcttgtgccgaggctgtcgggctgtctctagggtgggagcagctaatcagatcgcccagcctttggccctcagaaaaagtgctgaaacgtgcccttgcactggacgtcacagccctgcgagcatctgctggactcaggcgtgctctttgctggttcctgggaggcttggccacatccctcatggccccattttatccccgaaatcctgggtgtgtcaccagtgtagagggtggggaaggggtgtctcacctgagctgactttgttcttccttcacaaccttctgagccttctttgggattctggaaggaactcggcgtgagaaacatgtgacttcccctttcccttcccactcgctgcttcccacagggtgacaggctgggctggagaaacagaaatcctcaccctgcgtcttcccaagttagcaggtgtctctggtgttcagtgaggaggacatgtgagtcctggcagaagccatggcccatgtctgcacatccagggaggaggacagaaggcccagctcacatgtgagtcctggcagaagccatggcccatgtctgcacatccagggaggaggacagaaggcccagctcacatgtgagtcctggcagaagccatggcccatgtctgcacatccagggaggaggacagaaggcccagctcagtggcccccgccccccaccccccacgcccgaacagcaggggcagagcagccctccttcgaagtgtgtccaagtccgcatttgagccttgttctggggcccagcccaacacctggcttgggctcactgtcctgagttgcagtaaagctataaccttgaatcaca

SEQ ID NO: 554 - DNA, 1052 bp, Homo sapiens
  source 1..1052: mol_type = genomic DNA
cactgatgaagaaccctcctttgagaagctgcctttgtgtcctacagacaggctggggccaaagccattcaaccaatccccagataatccagagctcttgggagcagaaccttaaagagagatcgtggagagagccagggcccagaagaactctctcaaagagaagagggcagccaagatgacccgatggtccagttacctgttgggatggacaaccttccttctctattcctatgagtcaagtggagggatgcatgaggaatgtgtctttcctttcacctacaagggatctgtttacttcacttgcacccatattcatagcttatccccttggtgtgccaccagagccgtgtacaacggccagtggaagtactgccagagtgaagattacccacgctgtatcttccctttcatctatcgaggaaaggcttataacagctgcatctcccagggcagcttcttaggcagtctgtggtgctcagtcacctctgtcttcgatgagaaacagcagtggaaattctgtgaaacgaatgagtatgggggaaattctctcaggaagccctgcatcttcccctccatctacagaaataatgtggtctctgattgcatggaggatgaaagcaacaagctctggtgcccaaccacagagaacatggataaggatggaaagtggagtttctgtgccgacaccagaatttccgcgttggtccctggctttccttgtcactttccgttcaactataaaaacaagaattattttaactgcactaacgaaggatcaaaggagaaccttgtgtggtgtgcaacttcttacaactacgaccaagaccacacctgggtgtattgctgatgctgaggaaaggagaaatatcttcagaggaagactgccgccatactgaggctgagcacagatttgtctttttcattgcatctgtcaagcttaaataaccacctttagaaataccctctgcaccacctgcttcaatcagctggtcctttgtgaagaacgtagagagaatgcggcataaccaccaataaaggagtcttgattt

SEQ ID NO: 555 - DNA, 2016 bp, Homo sapiens
  source 1..2016: mol_type = genomic DNA
tctgcctgctgtcgggggcgggctggccaggccgaggccggagcaggcaggcatccccgggagttgtctcttttcatgccagcgccaacaggaggctgtctggacacactgattactcactcaccagcctccttcttttgttcaccagcccccctcttttgtccaccagcccagcctgactcctggagattgtgaatagctccatccagcctgagaaacaagccgggtggctgagccaggctgtgcacggagcgcctgacgggcccaacagacccatgctgcatccagagacctcccctggccgggggcatctcctggctgtgctcctggccctccttggcaccacctgggcagaggtgtggccaccccagctgcaggagcaggctccgatggccggagccctgaacaggaaggagagtttcttgctcctctccctgcacaaccgcctgcgcagctgggtccagccccctgcggctgacatgcggaggctggactggagtgacagcctggcccaactggctcaagccagggcagccctctgtggaatcccaaccccgagcctggcgtccggcctgtggcgcaccctgcaagtgggctggaacatgcagctgctgcccgcgggcttggcgtcctttgttgaagtggtcagcctgtggtttgcagaggggcagcggtacagccacgcggcaggagagtgtgctcgcaacgccacctgcacccactacacgcagctcgtgtgggccacctcaagccagctgggctgtgggcggcacctgtgctctgcaggccagacagcgatagaagcctttgtctgtgcctactcccccggaggcaactgggaggtcaacgggaagacaatcatcccctataagaagggtgcctggtgttcgctctgcacagccagtgtctcaggctgcttcaaagcctgggaccatgcaggggggctctgtgaggtccccaggaatccttgtcgcatgagctgccagaaccatggacgtctcaacatcagcacctgccactgccactgtccccctggctacacgggcagatactgccaagtgaggtgcagcctgcagtgtgtgcacggccggttccgggaggaggagtgctcgtgcgtctgtgacatcggctacgggggagcccagtgtgccaccaaggtgcattttcccttccacacctgtgacctgaggatcgacggagactgcttcatggtgtcttcagaggcagacacctattacagagccaggatgaaatgtcagaggaaaggcggggtgctggcccagatcaagagccagaaagtgcaggacatcctcgccttctatctgggccgcctggagaccaccaacgaggtgattgacagtgacttcgagaccaggaacttctggatcgggctcacctacaagaccgccaaggactccttccgctgggccacaggggagcaccaggccttcaccagttttgcctttgggcagcctgacaaccacgggctggtgtggctgagtgctgccatggggtttggcaactgcgtggagctgcaggcttcagctgccttcaactggaacgaccagcgctgcaaaacccgaaaccgttacatctgccagtttgcccaggagcacatctcccggtggggcccagggtcctgaggcctgaccacatggctccctcgcctgccctgggagcaccggctctgcttacctgtctgcccacctgtctggaacaagggccaggttaagaccacatgcctcatgtccaaagaggtctcagaccttgcacaatgccagaagttgggcagagagaggcagggaggccagtgagggccagggagtgagtgttagaagaagctggggcccttcgcctgcttttgattgggaagatgggcttcaattagatggcgaaggagaggacaccgccagtggtccaaaaaggctgctctcttccacctggcccagaccctgtggggcagcggagcttccctgtggcatgaaccccacggggtattaaattatgaatcagctg

SEQ ID NO: 556 - DNA, 2592 bp, Homo sapiens
  source 1..2592: mol_type = genomic DNA
gaagcggagagcggctgatcgcagtccggaggtgaggcggaactctgaggtggtccattatggctgacatgcaaaatctggtagaaagattggagagggcagtgggccgcctggaggcagtatctcatacctctgacatgcaccgtgggtatgcagacagtccttcaaaaggagcagctccatatgtgcaggcatttgactcgctgcttgctggtcctgtggcagagtacttgaagatcagtaaagagattgggggagacgtgcagaaacatgcggagatggtccacacaggtttgaagttggagcgagctctgttggttacagcttctcagtgtcaacagccagcagaaaataagctttccgatttgttggcacccatctcagagcagatcaaagaagtgataacctttcgggagaagaaccgaggcagcaagttgtttaatcacctgtcagctgtcagcgaaagtatccaggccctgggctgggtggctatggctcccaagcctggcccttatgtgaaagaaatgaatgatgccgccatgttttatacaaaccgagtcctcaaagagtacaaagatgtggataagaagcatgtagactgggtcaaagcttatttaagtatatggacagagctgcaggcttacattaaggagttccataccaccggactggcctggagcaaaacggggcctgtggcaaaagaactgagcggactgccatctggaccctctgccggatcatgtcctcctccccctccaccatgcccccctcctcccccagtctctaccatttcatgctcatatgagtctgcttcccgctcatcactgttcgcgcagattaatcagggggagagcattacacatgccctgaaacatgtatctgatgacatgaagactcacaagaaccctgccctgaaggctcagagtggtccagtacgcagtggccccaaaccattctctgcacctaaaccccaaaccagcccatcccccaaacgagccacaaagaaggagccagctgtacttgaactggagggcaagaagtggagagtggaaaatcaggaaaatgtttccaacctggtgattgaggacacagagctgaaacaggtggcttacatatacaagtgtgtcaacacgacattgcaaatcaagggcaaaattaactccattacagtagataactgtaagaaacttggcctggtattcgatgacgtggtgggcattgtggagataatcaacagtaaggatgtcaaagttcaggtaatgggtaaagtgccaaccatatccatcaacaaaacagatggctgccatgcttacctgagcaagaattccctggattgtgaaatagtcagtgccaaatcttccgagatgaatgtcctcattcctacagaaggcggtgactttaatgaattcccagttcctgagcagttcaagaccctatggaacgggcagaagttggtcaccacagtgacagaaattgctggataagcgaagtgccactgggttctttgccctcccttcacaccatgggataaatctgtatcaagacggttcttttctagatttcctctacctttttgctcttaaaactgcttctctgctctgagaagcacagctacctgccttcactgaaatatacctcaggctgaaatttggggtgggatagcaggtcagttgatcttctgcaggaaggtgcagcttttccatatcagctcaaccacgccgccagtccattcttaaggaactgccgactaggactgatgatgcattttagctttgagcttttgggggttattctaccaacaaacagtccattggaaagaaaacagtccctggaattaacagatcagaatgttcacactggttaatctttttttaacaatgagcatgaaggtagcagaagctggtgtgtttccagatggttcttctaaccaaactaatttttcactgttgacaagcgaggcaagggttgcactggaccaaaggctgaggcttggccatctagcattccatacaaaattgtttcctataagcattccttttattctctattctatcctgggtctgcctcaaccgtgagataggagagtctctggtactagctgctgtagcagtgcccttcatccagggcagttaatggagtcttggaccctttctttctctgggatccctgcccagcaccttcctatagagatgactttaaaaggaaaaaaaaaaaaaaaaaaacccacatgatttcaaggagtctggcattcctgaatccttcttccctgccaggtgcctgtcacctgtcttcactgcctccttttccctgtcatgctcatcagcttatggcttctgtctaagcacctgaacagaggactgaaacctccactgcaggctggttttaggtcttgaattatgtaagaatcttgcacagcactgctaatgtaaatttcagttgtttttccctctaggacaaacacttaccaaaatatgcaacttttttttggtgggaagagagattgtcctgtgatttctacccatttcctgaggcctgtggaaataaacctttatgtacttaaagttatacagaaaatagaataaagttaatacc

SEQ ID NO: 557 - DNA, 2395 bp, Homo sapiens
  source 1..2395: mol_type = genomic DNA
aactcaaggcataaggcgatccagcacctaagatctcagcaaaaaaaagctaggtcctgaggcagctagtggaaaaacaagagaagggaagtcaaaaggctacttgctgtcagctaaagccagacaacctctcctgtttcatctcctggcaacagaatgcatcctccttttgggaaactgcctctttccccactcctcagagtaaatcttgctgctgctcactctttgggtctgcactgcccataagagctgtagcactcaccgcgaaggtctgcagcttcactcttgaaaccagagagaccacgaacctaccgggagaaatgaacaaattccggacgcaccatctttaagaactgtaacactcactgcgaggatctgcggcttcattctttaagtctgtgagaccaagaacccaccaattccggcacactaatatgctgttggaaactggctatatggaaaggctatgtggaagaaaacaaacaccccagccaacataatggagctcccagctgacagctgacatctagctgattgccaaccactttggaaactgatcttcaaaacccacttgagctatgtcaagagaagccacctgtgacacagaagcagaaggatccaagtcaaaggagtttatttgggaggaaatagcacgagagaatgatcattcgtaactgaggcacacttgccttttgcaactaagctctactgaattccaaagctatagaaatatccatcttgacctggaaagtctgtttctttgctagtccagaaggttttttttaacatgaacaagatcctctcaagcactgtttgctttggactcctaactttgttatccgtgttgagttttttacaatctgtgcatggacgaccatatcttacccaaggaaatgaaatatttccagataaaaaatatacaaatcgtgaggaactattgctggctctactgaataaaaattttgatttccaaagacctttcaacactgacctagccttacctaacaaactggaagaacttaaccagctggaaaagctaaaagaacagctagtggaggagaaggattctgagacgtcctatgctgtagatggtctattctcttctcatcctagcaaacgagcttgcttttggaaatactgtgtttaaagctttttctctggatgcaaaaaaagataagaatatcaggaaaatatatgtatctactcactctgctgtaggcagaccccctgaaactattgctgtggaataaaagatgaaatgctcctgattattgtaaatacaaaattgcatgcgggattgtgtaaagacaatgccaggttggactgccagaatgagccaacagcacttgcttccccctgtagagagcctatgaatggacgtgcagtcagggaggtttcatatcaccaagattcctatcccagaaaagcagatgttcatagctctgggaatggaatgcgcccctcgtggagagcctataaacggatgcatggaaggcgcctgtccatatggataagatagggttgtaaacgtcctcatcttgccatggctcttctaggcctctttagggttaaggcatatttccttctgagaatttctggtctaagcggttgtctagcttcatgtcctgtttccatggattgtttgtaaccagcttttgttacaattgttactgctgattaatatcttgctaatcataggttatggaaagattgtgtttctgttttaaggctctgttagaaattacacacacagtatattgtaaattcttatctctgtatactgtacttctacatacaaatgtactgtacttctacatacaaatgttatgttaaagaattacttcatccccatgtgaccatctcacctcataatcaaatgaccctaaatccctcattaacctacccctgcccttgctaaacttaataataaatgctggtatatccagtgcattgttggcaccatgggaccagaaggtggtgacccccctggacccagctttcactatcttgtgtgtgtctgttatttctcaacctgctgatccgcctgggaacaaagagccccgttgcattgcgggctactggccagatcccgcaatactctgctatttaaaattgtagctgtttcaatcataaagaaactggcatttattatgcatatgattttttcaccttgttcttgttactaagtcaattatgataagcttaaggtttatgttgtgaataatcactaatcagttgcacttttgaaggtatgtcactatcaaaatggttttgtagagctagagttgaaaatgctgtatctattgtatgctttccataaattcattgcttatgtaaagttttgtcctgttgtgactatgctgttgaactattaattaaaacattttgaaaagca

SEQ ID NO: 558 - DNA, 5834 bp, Homo sapiens
  source 1..5834: mol_type = genomic DNA
gcgttccttgcggcccggccgacctcgcgggcttgggcctgggcgggcaccgacggagcggccctggctgcagcctcccggcgccagcgaagacaggctgagatgcggctgctcctgctcgtgccgctgctgctggctccagcgcccgggtcctcggctcccaaggtgaggcggcagagtgacacctggggaccctggagccagtggagcccctgcagccggacctgtggagggggtgtcagcttccgggagcgcccctgctactcccagaggagagatggaggctccagctgcgtgggccccgcccggagccaccgctcttgtcgcacggagagctgccccgacggcgcccgggacttccgggccgagcagtgcgcggagttcgacggagcggagttccaggggcggcggtatcggtggctgccctactacagcgccccaaacaagtgtgaactgaactgcattcccaagggggagaacttctactacaagcacagggaggctgtggttgatgggacgccctgcgagcctggcaagagggatgtctgtgtggatggcagctgccgggttgtcggctgtgatcacgagctggactcgtccaagcaggaggacaagtgtctgcggtgtgggggtgacggcacgacctgctaccccgtcgcaggcacctttgacgctaatgacctcagccgagctgtgaagaatgttcgtggggaatactacctcaatgggcactggaccatcgaggcggcccgggccctgccagcagccagcaccatcctgcattacgagcggggtgctgagggggacctggcccctgagcgactccatgcccggggccccacctcggagcccctggtcatcgagctcatcagccaggagcccaaccccggtgtgcactatgagtaccacctgcccctgcgccgccccagccccggcttcagctggagccacggctcatggagtgactgcagcgcggagtgtggcggaggtcaccagtcccgcctggtgttctgcaccatcgaccatgaggcctaccccgaccacatgtgccagcgccagccacggccagctgaccggcgttcctgcaatcttcacccttgcccggagaccaagcgctggaaggcagggccatgggcaccctgctcagcctcctgtggaggaggctcccagtcccgctccgtgtactgcatctcgtctgacggggccggcatccaggaggccgtggaggaggctgagtgtgccgggctgcctgggaagccccctgccattcaggcctgtaacctgcagcgctgtgcagcctggagcccggagccctggggagagtgttctgtcagttgtggcgttggcgtccggaagcggagcgttacttgccggggtgaaaggggttctttgctccataccgcagcgtgctccttggaagaccggccacctctgactgagccctgtgtgcatgaggactgccccctcctcagtgaccaggcctggcatgttggcacctggggtctatgctccaagagctgcagctcgggcactcggaggcgacaggtcatctgtgccattgggccgcccagccactgcgggagcctgcagcactccaagcctgtggatgtggagccttgtaacacgcagccctgtcatctcccccaggaggtccccagcatgcaggatgtgcacacccctgccagcaacccctggatgccgttgggccctcaggagtcccctgcctcagactccagaggccagtggtgggcagcccaggaacacccctcagccaggggtgaccacaggggagaacgaggtgaccccaggggcgaccaaggcacccacctgtcagccctgggccccgctccctctctgcagcagcccccataccagcaacccctgcggtcgggctcagggccccacgactgcagacacagtcctcacgggtgctgccccgatggccacacggcatctctcgggcctcagtggcaaggctgccctggggccccctgtcagcagagcaggtacgggtgctgccctgacagggtatctgtcgctgaggggccccatcacgctggctgcacaaagtcgtatggtggtgacagcaccgggggcatgcccaggtcaagggcagtggcttctacagtccacaacacccaccagccccaggcccagcagaatgagcccagtgagtgccggggctcccagtttggctgttgctatgacaacgtggccactgcagccggtcctcttggggaaggctgtgtgggccagcccagccatgcctaccccgtgcggtgcctgctgcccagtgcccatggctcttgcgcagactgggctgcccgctggtacttcgttgcctctgtgggccaatgtaaccgcttctggtatggcggctgccatggcaatgccaataactttgcctcggagcaagagtgcatgagcagctgccagggatctctccatgggccccgtcgtccccagcctggggcttctggaaggagcacccacacggatggtggcggcagcagtcctgcaggcgagcaggaacccagccagcacaggacaggggccgcggtgcagagaaagccctggccttctggtggtctctggcggcaagaccaacagcctgggccaggggaggccccccacacccaggcctttggagaatggccatgggggcaggagcttgggtccagggcccctggactgggtggagatgccggatcaccagcgccacccttccacagctcctcctacaggattagcttggcaggtgtggagccctcgttggtgcaggcagccctggggcagttggtgcggctctcctgctcagacgacactgccccggaatcccaggctgcctggcagaaagatggccagcccatctcctctgacaggcacaggctgcagttcgacggatccctgatcatccaccccctgcaggcagaggacgcgggcacctacagctgtggcagcacccggccaggccgcgactcccagaagatccaacttcgcatcatagggggtgacatggccgtgctgtctgaggctgagctgagccgcttccctcagcccagggacccagctcaggactttggccaagcgggggctgctgggcccctgggggccatcccctcttcacacccacagcctgcaaacaggctgcgtttggaccagaaccagccccgggtggtggatgccagtccaggccagcggatccggatgacctgccgtgccgaaggcttcccgcccccagccatcgagtggcagagagatgggcagcctgtctcttctcccagacaccagctgcagcctgatggctccctggtcattagccgagtggctgtagaagatggcggcttctacacctgtgtcgctttcaatgggcaggaccgagaccagcgatgggtccagctcagagttctgggggagctgacaatctcaggactgccccctactgtgacagtgccagagggtgatacggccaggctattgtgtgtggtagcaggagaaagtgtgaacatcaggtggtccaggaacgggctacctgtgcaggctgatggccaccgtgtccaccagtccccagatggcacgctgctcatttacaacttgcgggccagggatgagggctcctacacgtgcagtgcctaccaggggagccaggcagtcagccgcagcaccgaggtgaaggtggtctcaccagcacccaccgcccagcccagggaccctggcagggactgcgtcgaccagccagagctggccaactgtgatttgatcctgcaggcccagctttgtggcaatgagtattactccagcttctgctgtgccagctgttcacgtttccagcctcacgctcagcccatctggcagtagggatgaaggctagttccagccccagtccaaaatagttcatagggctagggagaaaggaagatggactcttggcttcctctctctggctggcaaagggagttatcttctggaatacattagctctttcaaaaacccacccagtgtttagcctcaacggcagccagttaccagcttctctctgtagccttcagcagtgtttgcatctctgacataaccacaggctgctgttttcaagaagagcaatctgtttggataagaaaaacctttactttacagcttccctttataatttgttacacaggaatagttaaatgcatttgtttgtttgttttttgagacagagtttcactcttgttgcccaggctggagggcaatggcgcgatctcagctcactgcaacctccgtctcctgggttcttgattctcctgtgtcagccttctgagtagctaggattacagatgcctatcaccatgcctgggtaatttttgtatttttagttgagatggggtttcaccatgttggccaggctggtctcgaacttctgacctcagatgatctgcccgcctcagcctcccaaagtgctgggattacaggcatgagccaccacgcccagccatcaatgcattttttttattttttttttgagacagagtttcgcacttcttgcccaggctggagtacaatggtgcgatcttggctcactgcaacctccacctcctgggttcaagcgcttctccagcctcagcctcctgagtagctgggattacaggtatgtgccaccatgcctggctaattttgtatttttagtagagacggggtttctccatgttggtcagactggtcttgaactcccgacctcaggtaatccgcccgcctcggcctcccaaaatgctgggattagaggtgtgagccactgtgcccagcccatcaatgtgttttaaagctagctgtcagggttccacttaatttaaagctgggcagggagatgtgtaatgatttcaaagttaacacctgtttgttttctaaagggcatgccaagtcctgctgtatcagggaagtattctgtgctaaaatcagcgatggttcattgctctagtctctctcacccttctaggcagtgcatcagtcagctctaaatctggtgcagagggttaacagcataacccttgttggcaaaatggaatagatgttaagacctcaaatagggatttgggatgaaacagctgcagttagcactgttatctgagcatgaaagaactggaaacgctccttacgtcgagatgttggaccttgaagccctcctgaggccaacatgcaaatctggctgtgacggttcatctgacacctgtgtaaagctgaccagcctgctctgtacagtgacaatgaggagcccctctcttccttaagtaggaatctgtgaagcaaaatgtttgctgccaaagacaaatcagactgtcagtcattaaaaacagcattagcaggatgaggatagcaatggggaagggttgtgggcaatgcagtaacagggaaatggcttcagaaatggtttgagttggaagacaacattcttcatctctcaggacttctaattccttgatgctaaaagaagaggcatggattctatgagcttccaagtccctttccactttaaccttctacaaatctttcagaggactgcctagtagcaaaggttattcctggacacaggaaagacgggcattacagggaccaaagctctgaaaggtgacttttattaccaacacactggctggaaaagggacaaaccacatcacgggtgagtgatacttctcagtcttctctactcattcaacaaaggaaatgtgggctggggcagaggtcttttttcatttaatactggaaaaatattgaagagcatccatgttcacttatggctggttttgctatagaaattggaaaataaaggccacttttttgaaatccccagtttaattaaa

SEQ ID NO: 559 - DNA, 2230 bp, Homo sapiens
  source 1..2230: mol_type = genomic DNA
gcttctctcctctccctcaacacagccggtcttaccagtacagcaggcggcagctgagagtcccctctggtggccagcagcggctacagagccgtcactatggggagggacaggacttgaggggttgcctcggtccacctcactggagaatgggcagagtttatggagtctgaaccacctggtctccaggcccctctggggatgggcctggcttactgaccactgacctcagcctaggagggacagaagagactgggggagaccaggatgcccagatgaccttgacccagggtacgctgccccatgtccctgctgcctcccgcccacagctctacgagaggcaggtctgtcattcgccgctggactttgacagtggtcaaaggctctgctcagttctctgtgcctgtctccctccagcactgccgaggttctctgccgaggccaaccagaaataccccttggaagctggaatcctgcaacaatggcccagggtgtcctctggatcctactcggattgctactgtggtcagacccagggacagcctccctgcccctgctcatggactctgtcatccaggccctggctgagctggagcagaaagtgccagctgccaagaccagacacacagcttctgcgtggctgatgtcagctccaaactctggcccccacaatcgcctctaccacttcctgctgggggcatggagcctcaatgctacagagttggatccctgcccactaagcccagagctgttaggcctgaccaaggaggtggcccgacatgacgtacgagaagggaaggaatatggggtggtgctggcacctgatggctcgaccgtggctgtggagcctctgctggcggggctggaggcagggctgcaagggcgcagggtcataaatttgcccttggacagcatggctgccccttgggagactggagatacctttccagatgttgtggccattgctccagatgtaagagccacctcctccccaggactcagggatggctctccagatgtcaccactgcagatattggagccaacactccagatgctacaaaaggctgtccagatgtccaagcttccttgccagatgccaaagccaagtccccaccgaccatggtggacagcctcctggcagtcaccctggctggaaacctgggcctgaccttcctccgaggttcccagacccagagccatccagacctgggaactgagggctgctgggaccagctctctgcccctcggacctttacgcttttggaccccaaggcatctctgttaaccatggccttcctcaatggcgccctggatggggtcatccttggagactacctgagccggactcctgagccccggccatccctcagccacttgctgagccagtactatggggctggggtggccagagacccagggttccgcagcaacttccgacggcagaacggtgctgctctgacttcagcctccatcctggcccagcaggtgtggggaacccttgtccttctacagaggctggagccagtacacctccagcttcagtgcatgagccaagaacagctggcccaggtggctgccaatgctaccaaggaattcactgaggccttcctgggatgcccggccatccacccccgctgccgctggggagcggcgccttatcggggccgcccgaagctgctgcagctgccgctgggattcttgtacgtgcatcacacctacgtgcctgcaccaccctgcacggacttcacgcgctgcgcagccaacatgcgctccatgcagcgctaccaccaggacacgcaaggctggggagacatcggctacagtttcgtggtgggctcggacggctacgtgtacgagggacgcggctggcactgggtgggcgcccacacgctcggccacaactcccggggcttcggcgtggccatagtgggcaactacaccgcggcgctgcccaccgaggccgctctgcgcacggtgcgcgacacgctcccgagttgtgcggtgcgcgccggcctcctgcggccagactacgcgctgctgggccaccgccagctggtgcgcaccgactgccccggcgacgcgctcttcgacctgctgcgcacctggccgcacttcaccgcgactgttaagccaagacctgccaggagtgtctctaagagatccaggagggagccacccccaaggaccctgccagccacagacctccaataaagacagcatggaaacaaa

SEQ ID NO: 560 - DNA, 2421 bp, Homo sapiens
  source 1..2421: mol_type = genomic DNA
ggttccctctccggggagcggcggcggacgcgcggctcccacccctcccctctcacgggctctcccctccccagtgtggccgcgaccctaccctctgcaaggcgatggcccgcgccccgagcgcaggctagcgtgcctgggtgcccggccatgggctgtatcggctctcggagcccggcgggtcaggcatttctggggaccaacagctggccgaggctcagggatagagacggctgctccagctaaaggtgaatgttggagacacagtcgcgatgctgcccaagtcccggcgagccctaactatccaggagatcgctgcgctggccaggtcctccctgcatggtatttcccaggtggtgaaggaccacgtgaccaagcctaccgccatggcccagggccgagtggctcacctcattgagtggaagggctggagcaagccgagtgactcacctgctgccctggaatcagccttttcctcctattcagacctcagcgagggcgaacaagaggctcgctttgcagcaggagtggctgagcagtttgccatcgcggaagccaagctccgagcatggtcttcggtggatggcgaggactccactgatgactcctatgatgaggactttgctgggggaatggacacagacatggctgggcagctgcccctggggccgcacctccaggacctgttcaccggccaccggttctcccggcctgtgcgccagggctccgtggagcctgagagcgactgctcacagaccgtgtccccagacaccctgtgctctagtctgtgcagcctggaggatgggttgttgggctccccggcccggctggcctcccagctgctgggcgatgagctgcttctcgccaaactgccccccagccgggaaagtgccttccgcagcctgggcccactggaggcccaggactcactctacaactcgcccctcacagagtcctgcctttcccccgcggaggaggagccagccccctgcaaggactgccagccactctgcccaccactaacgggcagctgggaacggcagcggcaagcctctgacctggcctcttctggggtggtgtccttagatgaggatgaggcagagccagaggaacagtgacccacatcatgcctggcagtggcatgcatcccccggctgctgccaggggcagagcctctgtgcccaagtgtgggctcaaggctcccagcagagctccacagcctagagggctcctgggagcgctcgcttctccgttgtgtgttttgcatgaaagtgtttggagaggaggcaggggctgggctgggggcgcatgtcctgcccccactcccggggcttgccgggggttgcccggggcctctggggcatggctacagctgtggcagacagtgatgttcatgttcttaaaatgccacacacacatttcctcctcggataatgtgaaccactaagggggttgtgactgggctgtgtgagggtggggtgggagggggcccagcaaccccccaccctccccatgcctctctcttctctgcttttcttctcacttccgagtccatgtgcagtgcttgatagaatcacccccacctggaggggctggctcctgccctcccggagcctatgggttgagccgtccctcaagggcccctgcccagctgggctcgtgctgtgcttcattcacctctccatcgtctctaaatcttcctcttttttcctaaagacagaaggtttttggtctgttttttcagtcggatcttctcttctctgggaggctttggaatgatgaaagcatgtaccctccacccttttcctggccccctaatggggcctgggccctttcccaacccctcctaggatgtgcgggcagtgtgctggcgcctcacagccagccgggctgcccattcacgcagagctctctgagcgggaggtggaagaaaggatggctctggttgccacagagctgggacttcatgttcttctagagagggccacaagagggccacaggggtggccgggagttgtcagctgatgcctgctgagaggcaggaattgtgccagtgagtgacagtcatgagggagtgtctcttcttggggaggaaagaaggtagagcctttctgtctgaatgaaaggccaaggctacagtacagggccccaccccagccagggtgttaatgcccacgtagtggaggcctctggcagatcctgcattccaaggtcactggactgtacgtttttatggttgtgggaagggtgggtggctttagaattaagggccttgtaggctttggcaggtaagagggcccaaggtaagaacgagagccaacgggcacaagcattctatatataagtggctcattaggtgtttattttgttctatttaagaatttgttttattaaattaatataaaaatctttgtaaatctc

SEQ ID NO: 561 - DNA, 3493 bp, Homo sapiens
  source 1..3493: mol_type = genomic DNA
cccagatgtcgatgagtgtggcagcagggagagtccctgccagcagaatgctgactgcatcaacatccccggtagctaccgctgcaagtgcacccgagggtacaaactgtcgccaggcggggcttgtgtgggacggaatgagtgtcgggagatcccgaatgtctgtagccatggtgactgcatggacacagaaggcagctacatgtgtctgtgtcaccgtggattccaggcctctgcagaccagaccctgtgcatggacattgacgagtgtgaccggcagccttgtggaaatgggacctgcaagaacatcattggctcctacaactgcctctgcttccctggctttgtggtgacacacaatggggattgtgtggattttgatgagtgtactaccctggtggggcaggtgtgccgatttggccattgcctcaacacagctggttccttccactgcctctgccaggatggctttgagctcacagctgatgggaagaactgtgtggacaccaatgagtgcctcagccttgcaggaacctgcctacccggcacttgccagaacctcgagggctccttccgctgcatctgtccccctggcttccaggtgcagagtgaccactgcattgatatcgacgagtgctcagaggagcccaacctctgcctctttggcacctgtaccaacagccctgggagcttccagtgcctctgcccacctggctttgtcctctctgacaatgggcaccgttgctttgacacacggcagagtttctgcttcacccgttttgaggctgggaagtgctcggtgcccaaagctttcaacaccaccaagacccgctgctgctgcagtaagaggcctggggagggctggggagacccctgcgaactgtgtccccaggagggcagtcccaggcccggatgactcccgagaagacgtgaatgagtgtgcagagaaccctggcgtctgcactaacggcgtctgtgtcaacaccgatggatccttccgctgtgagtgtccctttggctacagcctggacttcactggcatcaactgtgtggacacagacgagtgctctgtcggccacccctgtgggcaagggacatgcaccaatgtcatcggaggcttcgaatgtgcctgtgctgacggctttgagcctggcctcatgatgacctgcgaggacatcgacgaatgctccctgaacccgctgctctgtgccttccgctgccacaataccgagggctcctacctgtgcacctgtccagccggctacaccctgcgggaggatggggccatgtgtcgagatgtggacgagtgtgcagatggtcagcaggactgccacgcccggggcatggagtgcaagaacctcatcggtaccttcgcgtgcgtctgtcccccaggcatgcggcccctgcctggctctggggagggctgcacagatgacaatgaatgccacgctcagcctgacctctgtgtcaacggccgctgtgtcaacaccgcgggcagcttccggtgcgactgtgatgagggattccagcccagccccacccttaccgagtgccacgacatccggcaggggccctgctttgccgaggtgctgcagaccatgtgccggtctctgtccagcagcagtgaggctgtcaccagggccgagtgctgctgtgggggtggccggggctgggggccccgctgcgagctctgtcccctgcccggcacctctgcctacaggaagctgtgcccccatggctcaggctacactgctgagggccgagatgtagatgaatgccgtatgcttgctcacctgtgtgctcatggggagtgcatcaacagccttggctccttccgctgccactgtcaggccgggtacacaccggatgctactgctactacctgcctggatatggatgagtgcagccaggtccccaagccatgtaccttcctctgcaaaaacacgaagggcagtttcctgtgcagctgtccccgaggctacctgctggaggaggatggcaggacctgcaaagacctggacgaatgcacctcccggcagcacaactgtcagttcctctgtgtcaacactgtgggcgccttcacctgccgctgtccgcccggcttcacccagcaccaccaggcctgcttcgatgtgaatgaatgtgatgggccccaccgctgccagcatggctgtcagaaccagctagggggctaccgctgcagctgcccccagggtttcacccagcactcccagtgggcccagtgtgtggatgagaatgagtgtgccctgtcgccccccacctgcgggagcgcctcctgtcgcaacactcttggtggcttccgctgcgtctgcccctctggctttgactttgatcaggccctcgggggctgccaggaggtggatgagtgcgccggacggcgtggcccctgtagctacagctgtgccaacacgcctggtggcttcctgtgcggctgtcctcaaggctacttccgggctgggcaagggcactgtgtctccggcctgggcttcagccccggaccccaggacaccccggacaaagaggagctgctctcgtctgaagcctgctacgaatgcaagatcaatggcctctcccctcgggaccggccacgacgcagtgcccacagggaccaccaggtgaacctggccacccttgactccgaggccctgctgaccttgggcctgaacctctcacacctgggccgggccgagcgcatcctggagctccggccggccctggagggtctagagggccggatccgctacgtcatcgtccgcggaaacgagcaaggtttctttcgcatgcatcacctccgtggcgtcagctccctgcagctggggcggaggcggccggggcctggaacctaccggctggaggtggtgagccacatggcaggaccctggggtgtccagccagaggggcagccagggccatggggccaggccttgaggctgaaggtgcagctgcagttgctttagttgggaggagcctcagtgggccccagctgtccagagaagggggattctggaactgggaaggactgatccccagaagcgatggctgaccagattgaaccccgaaactcaggaagagtgaaatgctacacgacaacctcaggcaagcccggcctctgcctgggcctctgtgccagccccgggggccccccagttactcagtctttcctggagacagcaagaagctgcaatgtgcaatccccctgcccccacagccaaggtcaggaagaggccctgtggtcaccgtgtctggccaatctcaggctttcacttctgtactgcactgtggcttgccctggcggggggcagggggttggcaggacatggcaatgggcaactggggtgggcacagggcttattcctcggagtagaagggtgtacagggggcccagactccacagtgacttgccacatttgccccccatttggagaatgcttttatatcaaaagtggagacgataataaagttattttgggtt

SEQ ID NO: 562 - DNA, 1972 bp, Homo sapiens
  source 1..1972: mol_type = genomic DNA
aagccgggcgccgcggctctgcttccctcggggatctggcgacatggccagaaaggctctcaagcttgcttcgtggaccagcatggctcttgctgcctctggcatctacttctacagtaacaagtacttggaccctaatgactttggcgctgtcagggtgggcagagcagttgctacgacggctgtcatcagttacgactacctcacttccctgaagagtgtcccttatggctcagaggagtacttgcagctgagatctaagatccatgatttgttccagagcttcgatgacacccctctggggacggcctccctggcccaggtccacaaggcagtgctgcatgatgggcggacggtggccgtgaaggtccagcacccaaaggtgcgggctcagagctcgaaggacattctcctgatggaggtgctcgttctggctgtgaagcagctgttcccagagtttgagtttatgtggcttgtggatgaagccaagaagaacctgcctttggagctggatttcctcaatgaagggaggaatgctgagaaggtgtcccagatgctcaggcattttgacttcttgaaggtcccccgaatccactgggacctgtccacggagcgggtcctcctgatggagtttgtggatggcgggcaggtcaatgacagagactacatggagaggaacaagatcgacgtcaatgagatctcacgccacctgggcaagatgtatagtgagatgatcttcgtcaatggcttcgtgcactgcgatccccaccccggcaatgtactggtgcggaagcaccccggcacgggaaaggcggagattgtcctgttggaccatgggctttaccagatgctcacggaagaattccgcctgaattactgccacctctggcagtctctgatctggactgacatgaagagagtgaaggagtacagccagcgactgggagccggggatctctaccccttgtttgcctgcatgctgacggcgcgatcgtgggactcggtcaacagaggcatcagccaagctcccgtcactgccactgaggacttagagattcgcaacaacgcggccaactacctcccccagatcagccatctcctcaaccacgtgccgcgccagatgctgctcatcttgaagaccaacgacctgctgcgtggcattgaggccgccctgggcacccgcgccagcgccagctcctttctcaacatgtcacgttgctgcatcagagcgctagctgagcacaagaagaagaatacctgttcattcttcagaaggacccagatctctttcagcgaggccttcaacttatggcagatcaacctccatgagctcatcctgcgtgtgaaggggttgaagctggctgaccgggtcttggccctaatatgctggctgttccctgctccactctgagtggaattgctctccctgccccattctggtgtctttccactcctcagcccctcatcttgcctccacccagctgctccatttttgccacatcgtggcccgcagccccagagtcactgtccatgtcaccatccttctcctcctttggaatcctctccgcacactgtggcccttgtctcagggcccacaagctgaactgtggcatagctctctcttcttctccaagaagactcagcagcctacattcccattcctggtatgtgccattgggttggatgtccccactacttccgttaacccttcccattgtcaagatgtgccacgggtgccactgggggcacactgaacttgtagggagtgtgattttgttggaggtgcacatggtctctgaatttgacagagaacaccttccctttccttgccatgtcaccctccagaggaagtcacacctcagcgaggtggtttggcatctggggccaactccattacagctatgagctcactgctgtcagtgacgtttggtgttttctgtactgtgtttcaataaaaactccttcaaggttg

SEQ ID NO: 563 - DNA, 2061 bp, Homo sapiens
  source 1..2061: mol_type = genomic DNA
ctcccaggtgcctggcagagagtcctcaccagccccctgccggatgtctggctggcatctgaggggactgaacatggcaagaagcaaaacagcagcacaagaaaccagtttcttcatctgaaaccgagcaggctctactccagaacagaacccacagtcccaggcgctgggccttcttcttaagttgggaaatcactcatccccaggagaaaaaaagagcaaaagcttccagtactggggatgtggggagaggttttttaaaaatatcagcccaacatatgggaaaatatgggatgcaggcatccccaggtgtcaagcgtccagatccgtagacacactgggacgatggtgatcagtatcactccctctgactcatcggccctacagggaagacaccatgctggtgcacagtcggtgccaaacccgcgtttgtaaatgaataagtgttgctgccctggtggaagcccagctcatgtggaggaagccagcttgcagagagagcaagaacagagccagcacacacattggagcaaaggcaagggcagatggaaagttctggcggcatcatgccaaggctcccatccgaggcctccctgaaccccactctctcggcgccaccttggatgctgcgggctggtacattccccacttgcaaaactctgtggggctgggttcctctcttttctttccaaatatcccaggaagtggatggttttatccaaattcagcagacgagtaaaaagagtcttcgggaggtgcaatagctttctaggaatgaggatattcttcaaggaaaatgaaccccacactaggcctggccatttttctggctgttctcctcacggtgaaaggtcttctaaagccgagcttctcaccaaggaattataaagctttgagcgaggtccaaggatggaagcaaaggatggcagccaaggagcttgcaaggcagaacatggacttaggctttaagctgctcaagaagctggccttttacaaccctggcaggaacatcttcctatcccccttgagcatctctacagctttctccatgctgtgcctgggtgcccaggacagcaccctggacgagatcaagcaggggttcaacttcagaaagatgccagaaaaagatcttcatgagggcttccattacatcatccacgagctgacccagaagacccaggacctcaaactgagcattgggaacacgctgttcattgaccagaggctgcagccacagcgtaagtttttggaagatgccaagaacttttacagtgccgaaaccatccttaccaactttcagaatttggaaatggctcagaagcagatcaatgactttatcagtcaaaaaacccatgggaaaattaacaacctgatcgagaatatagaccccggcactgtgatgcttcttgcaaattatattttctttcgagccaggtggaaacatgagtttgatccaaatgtaactaaagaggaagatttctttctggagaaaaacagttcagtcaaggtgcccatgatgttccgtagtggcatataccaagttggctatgacgataagctctcttgcaccatcctggaaataccctaccagaaaaatatcacagccatcttcatccttcctgatgagggcaagctgaagcacttggagaagggattgcaggtggacactttctccagatggaaaacattactgtcacgcagggtcgtagacgtgtctgtacccagactccacatgacgggcaccttcgacctgaagaagactctctcctacataggtgtctccaaaatctttgaggaacatggtgatctcaccaagatcgcccctcatcgcagcctgaaagtgggcgaggctgtgcacaaggctgagctgaagatggatgagaggggtacggaaggggccgctggcaccggagcacagactctgcccatggagacaccactcgtcgtcaagatagacaaaccctatctgctgctgatttacagcgagaaaataccttccgtgctcttcctgggaaagattgttaaccctattggaaaataaaggagaattcctgcttgcca

SEQ ID NO: 564 - DNA, 1340 bp, Homo sapiens
  source 1..1340: mol_type = genomic DNA
gtaaccgaaccctgagccgcctgcgcggatcggcgtccgcagcgggcggctgctgagctgccttgaggtgcagtgttggggatccagagccatgtcggacctgctactactgggcctgattgggggcctgactctcttactgctgctgacgctgctggcctttgccgggtactcagggctactggctggggtggaagtgagtgctgggtcaccccccatccgcaacgtcactgtggcctacaagttccacatggggctctatggtgagactgggcggcttttcactgagagctgcagcatctctcccaagctccgctccatcgctgtctactatgacaacccccacatggtgccccctgataagtgccgatgtgccgtgggcagcatcctgagtgaaggtgaggaatcgccctcccctgagctcatcgacctctaccagaaatttggcttcaaggtgttctccttcccggcacccagccatgtggtgacagccaccttcccctacaccaccattctgtccatctggctggctacccgccgtgtccatcctgccttggacacctacatcaaggagcggaagctgtgtgcctatcctcggctggagatctaccaggaagaccagatccatttcatgtgcccactggcacggcagggagacttctatgtgcctgagatgaaggagacagagtggaaatggcgggggcttgtggaggccattgacacccaggtggatggcacaggagctgacacaatgagtgacacgagttctgtaagcttggaagtgagccctggcagccgggagacttcagctgccacactgtcacctggggcgagcagccgtggctgggatgacggtgacacccgcagcgagcacagctacagcgagtcaggtgccagcggctcctcttttgaggagctggacttggagggcgaggggcccttaggggagtcacggctggaccctgggactgagcccctggggactaccaagtggctctgggagcccactgcccctgagaagggcaaggagtaacccatggcctgcaccctcctgcagtgcagttgctgaggaactgagcagactctccagcagactctccagccctcttcctccttcctctgggggaggaggggttcctgagggacctgacttcccctgctccaggcctcttgctaagccttctcctcactgccctttaggctcccagggccagaggagccagggactattttctgcaccagcccccagggctgccacccctgttgtgtctttttttcagactcacagtggagcttccaggacccagaataaagccaatgatttacttgtttcacctgga

SEQ ID NO: 565 - DNA, 2070 bp, Homo sapiens
  source 1..2070: mol_type = genomic DNA
gacactgggaacctggggcagaatcagacccagcgtctgactcctcctgagagggctcccttttttctcctctcctccgctgtcagaaacagatctgggctggaatggcctggggtggggtccacacctgctgcttccacctgtgctgctgctgctcctggcctcagggtgctgtgcctgaagaacttcacaaacacccaggacagaccctcctcctgcaatgccagtactcacccaagagagggccctatcagcccaaatcctggtgtcagcagacatctccaagtcggtgtaccttacttgtcaccagctccaagccctggacagcagttcagaagtctcattacacaatctgggacaagcccaatgctggcttcttcaacatcaccatgattcagctgacacagaatgactcgggattctactggtgtggaatctacaacgcttccgaaaacatcatcactgttcttagaaatatcagcctggtggtgtctccagccccaaccacgtctcctatgtggactcttccctggctcccaacaagcacagttctgatcacttctccagaggggacctctggccatccctccatcaatggctctgagaccaggaaatcaagagcccctgcctgccttggctcaggtggccccagattcctggtcttggtgctatgtggactcctcctggccaagggcctgatgttgtgagtcctgttagtgctcctgatctgcaggtgccacaggacagcagtgacgaggtttctgattgtcccagcacagccttgtcccaggacccttgggtgcatgagccacaacatggatcctggatgaatcccagttcttcccctgcccagctattgggagctggcctaagtattgctccccacctccttgtgaggaaaggctagcgctaagcctattggagagaactttcagcccctgaactccccggtggtgacccctcacccctgcactgagcccccttagatctactgcccctgccctgactttcgccattgggaagacctggggtgggggtttctgcatccgggtcaatgcccagctcagcatcttcagctgtgcccaggctcctctccagcactctgtcgttctctgagccccacctcagcaggtctccaggatccctcacatttcccctgtttgttgcctgtggtctgccctagagtcctatgaatttcctcttgtgcttaattaaattcaacctctgaactgaaatgtgtcaggggcagctgagcaagacagcagttgtatcccctcaccttcctcccgtcccaccccagatatcctaaatgagagagaaatgacttaaaaataaatgataaaattgaaactaagaaaggctgtaatcagcagactggaagctgaggaagatctagaagtaaaagaaaaaattagatgcgttaaaatgacatgagcaggcgactcagtggcccaaaacaggacccagaacattcatccgtaaatggaatctgataatctggggcccaaattctgtttacttaacatgtgagaagattcacagcctaaaagagaaaatcaagttgaactaacaataaatgatggtgggtgaaagataaatgttttagggaacagaagaggagcacatatttatgaagcaagaataggtacagtcattttccaactaacatctagtgagactgggattcaccactcagaatgggggtccaccatgagcaacagatttgaggtaccagtgcatagcagctgaatgccagccctgtaaaagaccaccataaagagagctccatgttcttttgctcttttggggatgggacatcaaacaaaagtctcttcgtgtatatctcagctcctgccacatgatcatcacctatctgtgagaggcatcgcttttgctttgtttatttatttttttaatcctcattccctatgtccacttgccttcctctccgaggcaactactctaatgcatttggtatgtaactttaaatttgaatgtattcttgtaaaacatccagtatttttttttctgtgactatgttttcacttacataaaagaaattgtgataga

SEQ ID NO: 566 - DNA, 6533 bp, Homo sapiens
  source 1..6533: mol_type = genomic DNA
gcaggcgcggggcgcggggcaggcagagcgggcgaaggcgcggagctcgcagtgcagcccgcgcttcccagcgtccgtgcccggccgcctgtgcctaccgtgcccgtggcgccatggccgctgccgccctcccgccccggccgctgctccttctgccgctagtgctgctgctgagcggccgccccacgcgcgccgacagtaaggtgtttggggacctggaccaggtgaggatgacctcggagggctccgactgccgttgcaagtgcatcatgcggcccctgagcaaggacgcgtgtagccgagtgcgcagtgggcgggcacgcgtggaggacttctacacggtggagactgtgagctcgggcactgactgccgctgctcctgtaccgcacctccctcctctctcaacccctgtgagaacgagtggaagatggagaaactcaaaaagcaggcgcccgagctcctcaagctgcagtccatggtggatctcctggagggcaccctgtacagcatggacttgatgaaggtgcacgcctacgtccacaaggtggcctcccagatgaacacactggaagagagcatcaaggccaacctgagccgggagaatgaggtggtgaaggacagcgtgcgccacctcagtgagcagttgaggcactatgagaatcactctgccatcatgctgggcatcaagaaggagctgtcccgcctgggcctccagctgctgcagaaggatgccgccgccgcccctgccacccctgccacgggcactggtagcaaggcccaggacacagctagaggaaaaggcaaggacatcagcaagtatggcagtgtgcagaaaagctttgcagacagaggcctcccaaaacctcccaaggagaagctgcttcaggtggagaagctgagaaaggagagcggcaagggcagtttcctccagcccacagccaagccccgcgccctggcccagcagcaggctgtgatccggggcttcacctactacaaggcaggcaagcaggaggtgaccgaggcggtggcagacaacaccctccagggcacttcctggctggagcaactgccgcccaaggtggagggcaggtccaactccgcagagcccaactccgcagagcaggatgaggctgagcccaggtcctccgagcgagtggacctggcttctgccccacttcaatccctgccaccaccaccaccgccaccaccaccccaaccccaccaccagtctcctgcccaccgagccaccttcaggtccagaagtctccagccaaggcagagaggcgagctgtgagggcaccctccgggctgtggacccccctgtgaggcaccacagctatgggcgccacgagggagcctggatgaaggaccctgcagctcgagacgacaggatctatgtcaccaactactactatggaaacagcctggtggagttccgcaacctggaaaacttcaagcaaggccgctggagtaacatgtacaagctaccctacaactggatcggcacaggccacgtggtgtaccagggcgccttctactacaaccgcgccttcaccaagaacatcatcaagtacgacctacggcagcgcttcgtggcctcctgggcgctgctgcccgacgtggtatatgaggacaccacaccttggaagtggcgcggacactcggacattgactttgccgtggacgagagcggcctgtgggtcatctaccccgccgtggacgaccgcgatgaggcccagcccgaggtgatcgtcctgagtcgcttggaccccggcgatctctccgtgcaccgggagaccacgtggaagacacggctgcggcggaactcctacgggaactgcttcctggtgtgcggcatcctgtatgccgtggacacgtacaaccagcaggaaggccaggtcgcctacgctttcgacacgcacacgggcaccgacgcacgcccccagctgccgttcctcaacgagcacgcctacaccacccagatcgactacaaccccaaggagcgggtgctgtacgcctgggacaatggccaccagctcacctacaccctccacttcgtggtctgagtggagacctgtgctccccggagaggggcagcagtgcgggaggggctttgcacagcagctcctgcaactgacccagtccgcaaatatttattgggggccagcccagggctgggactgggcatgaggtggtcaccaggattgagcttcctcagcacccagtgggtaatacttgcttccacttgcagagcaccgtgccaagcacttcccacacacttacccgtttgattctcctagcacctcccttggaggtagagatcatgaacccatttaacagacgaggagacaggctcagagaggcaccgtcccttgcctaacacctcagttgtgatcaggcaggctgtgctctcaggacagccccattttagggatgaggagacttcaccacgccctcccctccctgccctcccccatctccccggtctcccttgttctctcaacccagtctcccttcccagggccactcagaaccagaggtctttagggccagtgtactggtgtggggtggaggccctggctctgcctgccatcctagggccctgttctggctgagctgttggtggccctgggctttgggccccttagccaatgtccttgtctcttgtctttggccagccccctcagcccagcccaccccacccgctgtccggccacattccaaacctctaccgtcacctagctgctgagcagaaaccgcaccccgagagaaaatcccatcctctgttccaaggcccctgtctgctctatgctcatttttattttctcttattcttcatcagtgccgtcatttgtttctgcagcagcagctgagaaggcagccggcagctctgccagggtggggagctgagctgaggctccctctccacccagaagcactggcgttgttcacatagtcaggccttgggtcccctccctggttcatcccagagcctttgggcctggagtccgccttgtcctttttctctgggctttcaaacccacaacctttacacactcagggatacctccgggtctgccatgaataagaccctaggcccaagtctggtgtggtgccaggatggcacagtttccctcttccttgccagccctgacctggtcactgggcaggctggcccagcagcctgggggctgcagaagacatggtgtgagtagttgggtccaggggaggcatcaggccttcttctggttgcaggagagaaccagagggtgggaacggggagggaagaactgagggtctgcagactggacttttcctggctcgacccaggacttgggttgaggatgcacgggggccaccttgcccggggccactggtggctccccagagcctcagacccacacagcccagaggacgaggccttcaagcctgcccctcttctgcttttttagacagtatttttagagctggaaagaaattttctagcccaactccctgtttcatgaaagagaaaagaggctcagaaaagtttagagagcagctcagtgtcacactgggagctgggcacagccgatctccttccagaagggttctgtctgtatcctttattctccgcacatggaggctgccctacctgggaaggcaccccagcacctgtgaaggacatttactgctcatcctcacctgccccctggcccttgctgccttcattctgtcccaatgccagctccctggatgtctgtatgtttgaataccagttgccatgttaggaaggtcagctgcacagccaagagtgtaagagtgtaaagaaatgcctttttttttttttttgagttggagttttgctcttgtcgcccaggctggagtgcagtggcgcgatctcggctcactgcaacctctgccccctgggttcaagcgattctcctgcctcagcctccctagtagctgggactacagcacccaccaccacacccagctaatttttgtatttttagtagagacaggggtttcaccacgttggccaggctggtctcgaactcctgaccttaggtgatccgcccgcctcagcctcccaaagtgttgggattacaggcatgagccactgcgcctggccagcaaatgctttttgtgcagaatacacttctttcaggcattgtcaggtgctgttttgtttaagctctaactcacccctggaatacaggggaatgatgacaaccagcccagccaggcctgactcatcatggtcacatccagcccccacccccggccaactaaccactgcaggctcctcttccagactcaccagggggcctcgaggccccggcatctcccttggccctgggtgtgggttttacaagactgtgtctttcatgacatcatagcccaaccatgtgagaagaaggagaaggcccccctttcttcattaatctgaaaaaaaggaaagtgagaataggctgatttttaaaagttaaggggcaagcagcattgcattctgggggaacgatcctggccacagccgccaaacaaacattcactaggcctcttctgttttcatacccttgtaagtgggttatgtggtgggtatggtcagttttttcttttttcttttcttttcttttttttgagacagagtttcgcttttgttgcccgggctggaatgcaatggcgcgattcagctcactgcaatctccgcctcccgggttcaagtgattctcctgccttagcctcctgaaaagctgggattacagggccctgccaccaagcccagctaattgtatttttagtagagacaggatttcaccatgttggccaggccagtctcaaactcctgacctcaggtgatccacctgcctcagcctcccagactgttgggattacaggcatgagccaccacgcctggccagtttcttcattttacatatggtcacattggcgcctagaacagttaggtcgctcgtcacataggcagttaagtggagaaccaggtttcaaaatcaggtaagaaaaccatcatcattaactgagcaccagctgtgctaagcctgccacgggcgtatccttgcagcctcacaacagtgggaggtctgtatcctgaatgtcctcattttacagatgaggacattgaggagaagagacttacccaggctcacacagcagctcagcctgttccaggcgctggtcagtgcgtgttctttgccaccagcctgtcactccagtggcagctccagaaacggaggctgttgcttttatccctaaactgcatccacagagaagccccaagaaggaggttggggccagctcataaaaagcctgaatgccaagccaaggagtggatgcctccagtcatatttagaacaaagtcaagtataaatttacagagaaaaaattctaagacagttggatgttgtcctgttggtgaggaagggaaaggtttttcttgtagggaactggaaccagcccacaactgcacacttgtgagctgtcatggaaacctgatccccaacagcttttgaggttgtttgtttgtttgtttgtttacctgtcttgggctttgttgcttttggcaaaaggtacttcaaacaagggagggcctggactgagggggaccaggtcttcttgctgacctcgtctacaaaggcaaaggaaggcaaaggaagctgtctcgggtgtttctgaacaacgtgactcatgaggggctttggctacctcttgcgttccccctagagatgtccaggccttacatttaatcggctttctctgcggtggggtagagaatggagctcccgccttgcgggcagtgctaaaggtggagctgggggattttcctgggaatgatttgagggctcttgaaagcccatgtgttccaaagcgtctttaactctgggatagcattggaagccgctgtcatgacaggacatggcactggatggctggcagagagccctggctgggagttagggagccctgggttggaatccagccccacctcttttatgccacaggtttggtcaagttctctcccgctcagggtagggctgtgaactccctcttacagctaagaacatgcagcttagtgaggacaagacccttctagagctttacccctaatccccccccaggagccccgaggccggcattattcctccccattacaggtgatgagcctcaaattcagagagcttaagcaacctgctcagggtcacgtctccaacaggcagtagagtcaaggtataaaccaggtctgtttttgtaccagagtcccagactaactgttggtaggaatcttgtaaccagtcatgttttcttccttgttttggccgctgggaagctcaaagtcaaattcgagacccttttttttccaattgtgctgagtctcctactagactcgcttcattctagctttctgcttttacctttaccctaatctttttatttttatgctattgtactttatttttgtaagttgctgagatatctgttttgcaacaagatgggctatatctaaataaagacatgatcaaaggtttgattt

SEQ ID NO: 567 - DNA, 2966 bp, Homo sapiens
  source 1..2966: mol_type = genomic DNA
acgcagccatggcggaggcggctttggaagccgtgcggagcgagttacgagaattcccggccgctgcaagggagctctgcgtgcctcttgctgtgccctacctggacaaacccccaactccgctccacttctaccgggactgggtctgccccaacaggccgtgcattatccgcaacgctctgcagcactggccggccctccagaagtggtccctcccctatttcagagccacagtgggctccacagaggtgagtgtggccgtgaccccagatggttacgcggatgccgtgagaggggatcgcttcatgatgccagctgagcgccgcctgcccctgagcttcgtgctggatgtgctggagggccgggcccagcaccctggagtcctctatgtgcagaagcagtgctccaacctgcccagcgagctgccccagctgctgcctgatctggaatcccatgtgccctgggcctccgaagccctgggaaagatgcccgatgctgtgaacttctggctgggggaggcggctgcagtgacttctttgcacaaggaccactatgagaacctctactgcgtggtctcaggagagaagcatttcctgttccatccgcccagcgaccggcccttcatcccctatgagctgtacacgccggcaacctaccagctaactgaagagggcacctttaaggtggtggatgaagaggccatggagaaggcagaggtgtccaggacctgcctgctcacggttcgtgtcctgcaggcccatcgcctaccctctaaggacctagtgaccccctctgactgctacgtgactctctggctgcccacggcctgcagccacaggctccagacacgcacggtcaagaacagcagtagccctgtctggaaccagagctttcacttcaggatccacaggcagctcaagaatgtcatggaactgaaagtctttgaccaggacctggtgaccggagatgaccctgtgttgtcagtactgtttgatgcggggactctgcgggctggggagttccggcgcgagagcttctcactgagccctcagggtgaggggcgcctggaagttgaatttcgcctgcagagtctggctgaccgtggcgagtggctcgtcagcaatggcgttctggtggcccgggagctctcctgcttgcacgttcaactggaggagacaggagaccagaagtcctcagagcacagagttcagcttgtggttcctgggtcctgtgagggtccgcaggaggcctctgtgggcactggcaccttccgcttccactgcccagcctgctgggagcaggagctgagtattcgcctgcaggatgcccccgaggagcaactaaaggcgccactgagtgccctgccctctggtcaagtggtgaggcttgtcttccccacgtcccaggagcccctgatgagagtggagctgaaaaaagaagcaggactgagggagctggccgtgcgactgggcttcgggccctgtgcagaggagcaggccttcctgagcaggaggaagcaggtggtggccgcggccttgaggcaggccctgcagctggacggagacctgcaggaggatgagatcccagtggtagctattatggccactggtggtgggatccgggcaatgacttccctgtatgggcagctggctggcctgaaggagctgggcctcttggattgcgtctcctacatcaccggggcctcgggctccacctgggccttggccaacctttatgaggacccagagtggtctcagaaggacctggcagggcccactgagttgctgaagacccaggtgaccaagaacaagctgggtgtgctggcccccagccagctgcagcggtaccggcaggagctggccgagcgtgcccgcttgggctacccaagctgcttcaccaacctgtgggccctcatcaacgaggcgctgctgcatgatgagccccatgatcacaagctctcagatcaacgggaggccctgagtcatggccagaaccctctgcccatctactgtgccctcaacaccaaagggcagagcctgaccacttttgaatttggggagtggtgcgagttctctccctacgaggtcggcttccccaagtacggggccttcatcccctctgagctctttggctccgagttctttatggggcagctgatgaagaggcttcctgagtcccgcatctgcttcttagaaggtatctggagcaacctgtatgcagccaacctccaggacagcttatactgggcctcagagcccagccagttctgggaccgctgggtcaggaaccaggccaacctggacaaggagcaggtcccccttctgaagatagaagaaccaccctcaacagccggcaggatagctgagtttttcaccgatcttctgacgtggcgtccactggcccaggccacacataatttcctgcgtggcctccatttccacaaagactactttcagcatcctcacttctccacatggaaagctaccactctggatgggctccccaaccagctgacaccctcggagccccacctgtgcctgctggatgttggctacctcatcaataccagctgcctgcccctcctgcagcccactcgggacgtggacctcatcctgtcattggactacaacctccacggagccttccaggggtccggcggacacccgaggaggcggcagctggggaggtgaacctgtcttcatcggactctccctaccactacacgaaggtgacctacagccaggaggacgtggacaagctgctgcacctgacacattacaatgtctgcaacaaccaggagcagctgctggaggctctgcgccaggcagtgcagcggaggcggcagcgcaggccccactgatggccggggcccctgccacccctaactctcattcattccctggctgctgagttgcaggtgggaactgtcatcacgcagtgcttcagagcctcgggctcaggtggca

SEQ ID NO: 568 - DNA, 1669 bp, Homo sapiens
  source 1..1669: mol_type = genomic DNA
catatttccagctataatccatcatatttccaggtgtatcccttcccttaaaagtaaaaaaggagaaaatcactttgctgtgtggaagtgctttgtgtgttttataaaatccacataaaatgttcgtggttcaaggagtggctgccgcatttctaaggcaaataagcttatccctgaagaagcttgaagatctgactctcaagaatctttgtgttctggatgaaaaaggaatcattattttttaactcccctgctcaagtcagtgacttccactggcacccaatccattggttataagtacccatgaattgccttgccaattataggcaggataacctaggaggaccaaccaaaaccaaactcctggtaagctttattagccttttctacaatgtgtctcagtttctctttcacaccttggagtggaagacaatctctactcacactgttgtggtatgtgtctgtctgtctcagatgtgtgtataaggtgtatttctcagctcggtatctgaagtaatttctttttcttttcttttttttaaagactgctgtcttaaggcttaaaagtaatttaaggttttgttttttgttattttaagagttgcagtttctttggagacaacaaagtactttttttccaaagatgaaaaaggcatattcagactttctatgttatgttccataattgttttgcttatcactgtataacattctcattatcatgggctactttaagctaatcagttgcattttggggtcctcatttagaagtcaatctggaaaaaagatggctgtaaaacttagataaaccagtatgctatttctccttccttgtctgcctttacagatgtttcctctttctctctctcttccctgactatctctctcaatgatcattgacagctcccgcatcccctctttcactcagcttcactccaccatgaccagagcacctctcctgctactatgtgttgccctggtgctgcttgggcatgtgaatggagccacagtaagaaatgaggacaaatggaagccactcaacaaccccagaaacagagatctgtttttcagaaggcttcaggcatattttaagggcagaggtcttgatcttggaacatttccaaatcctttccccacgaatgaaaatcctagacctctctctttccagtcagaacttactgcttctgcatctgcagattatgaagagcagaaaaactcctttcacaattatctcaaaggctgaaagtttcttctgagctcaggtgtctggctattttaaaactacagatgaagcttctcattagaaaaattcaaccattgtcatagctaaactttcatggagtttctttccccctcacttttatttttcagtttgtaatgattttattccacatttccatatttacatataaatcgctggaactatgatttctatgcatatttatggagtttttttcctatgaaaccataaatattgatgtagagcaccgcatgtatttgtaggagttacaaaaacatcacaaactgaaaaaagattataatctaaattagatgtttctttaagcttgtttttaaaacttgtcttttatgtttattatcttttatcgaccaatatatttttttaaagggacatgctcacttttagtatagtaaaattcattatatgtga

SEQ ID NO: 569 - DNA, 5575 bp, Homo sapiens
  source 1..5575: mol_type = genomic DNA
atgcggcacggcgtcgcctgggcgctgctggtggccgcggccctggggcttggggcgcgcggggtgcgcggcgcggtggcccttgccgacttctacccgttcggcgccgagcgcggcgacgccgtcacccccaagcaggacgacggcggctcggggctgcggccgctctcggtgcccttcccgttcttcggtgccgagcactccggactctacgtgaacaacaacgggatcatctccttcctgaaggaggtttctcagttcaccccagtggccttccccattgccaaggaccgctgcgtggtggcagccttctgggcagatgtggacaaccggcgtgcaggcgacgtgtactaccgggaggccaccgacccagccatgctgcgccgagccacggaggacgtcaggcactacttccccgagctcctggacttcaatgccacctgggtttttgttgccacctggtaccgagtgaccttctttggaggcagttcctcatcccctgtcaacacattccagactgtgctcatcacagacggcaagctctccttcaccatcttcaactatgagtccatcgtgtggaccacaggcacacacgccagcagcgggggcaacgccactggcctcgggggcatcgcagcccaggctggcttcaacgcaggcgatgggcagcgttacttcagtatccccggctcgcgcacagcagacatggccgaggtggagaccaccaccaacgtgggtgtgcccgggcgctgggcgttcagaatcgatgatgcccaggtgcgcgtggggggctgcggccatacaacgtccgtgtgcctggccctgcgcccctgcctcaacggcggcaagtgcatcgacgactgcgtcacgggcaacccctcctacacctgctcctgcctctcgggcttcacggggcggaggtgccacctggacgtgaacgaatgtgcctcccagccctgtcagaatggtgggacctgtactcacggcatcaacagtttccgctgccagtgcccggctggctttgggggacccacctgtgagacagcccaatccccctgtgacaccaaagagtgtcaacatggtggccagtgccaggtggagaatggctctgcggtgtgtgtgtgccaggccggatacaccggagcagcctgcgagatggatgtggacgactgcagccctgacccctgcctgaatggaggctcttgtgttgacctagtggggaattacacctgcttgtgtgccgagcccttcaagggacttcgctgtgagacaggagaccatccagtgccagacgcctgcctctcggccccttgccacaatgggggcacctgtgtggatgcggaccagggctacgtgtgcgagtgccccgaaggcttcatgggcctggactgcagggagagagtccccgatgactgtgagtgccgcaacggaggcagatgcctgggcgccaacaccaccctctgccagtgccccctgggattctttgggcttctctgtgaatttgaaatcacagccatgccctgcaacatgaacacacagtgcccagatgggggctactgcatggagcacggcgggagctacctctgcgtctgccacaccgaccacaatgccagccactccctgccatcaccctgcgactcggacccctgcttcaacggaggctcctgcgatgcccatgacgactcctacacctgcgagtgcccgcgcgggttccacggcaagcactgcgagaaagcccggccacacctgtgcagctcagggccctgccggaacgggggcacgtgcaaggaggcgggcggcgagtaccactgcagctgcccctaccgcttcactgggaggcactgtgagatcgggaagccagactcgtgtgcctctggcccctgtcacaacggcggcacctgcttccactacattggcaaatacaagtgtgactgtcccccaggcttctccgggcggcactgcgagatagccccctccccctgcttccggagcccgtgtgtgaatgggggcacctgcgaggaccgggacacggatttcttctgccactgccaagcagggtacatgggacgccggtgccaggcagaggtggactgcggccccccggaggaggtgaagcacgccacactgcgcttcaacggcacgcggctgggcgcggtggccctgtatgcatgtgaccgtggctacagcctgagcgcccccagccgcatccgggtctgccagccacacggtgtctggagtgagcctccccagtgccttgaaatcgatgagtgccggtctcagccgtgcctgcatgggggctcttgtcaggaccgcgttgctgggtacctgtgcctctgcagcacaggctatgagggcgcccactgtgagctggagagggatgagtgccgagctcacccgtgcagaaatggagggtcctgcaggaacctcccaggggcctatgtctgccggtgccctgcaggcttcgttggagtccactgtgagacagaggtggacgcctgcgactccagcccctgccagcatggaggccggtgtgagagcggcggcggggcctacctgtgcgtctgcccagagagcttcttcggctaccactgcgagacagtgagtgacccctgcttctccagcccctgtgggggccgtggctattgcctggccagcaacggctcccacagctgcacctgcaaagtgggctacacgggcgaggactgcgccaaagagctcttcccaccgacggccctcaagatggagagagtggaggagagtggggtctctatctcctggaacccgcccaatggtccagccgccaggcagatgcttgatggctacgcggtcacctacgtctcctccgacggctcctaccgccgcacagactttgtggacaggacccgctcctcgcaccagctccaggccctggcggccggcagggcctacaacatctccgtcttctcagtgaagcgaaacagtaacaacaagaatgacatcagcaggcctgccgtgctgctggcccgcacgcgaccccgccctgtggaaggcttcgaggtcaccaatgtgacggctagcaccatctcagtgcagtgggccctgcacaggatccgccatgccaccgtcagtggggtccgtgtgtccatccgccaccctgaggccctcagggaccaggccaccgatgtggacaggagtgtggacaggttcacctttagggccctgctgcctgggaagaggtacaccatccagctgaccaccctcagtgggctcaggggagaggagcaccccacagagagcctggccaccgcgccgacgcacgtgtggacccggcccctgcctccagcaaacctgaccgccgcccgagtcactgccacctctgcccacgtggtctgggatgccccgactccaggcagcttgctggaggcttatgtcatcaatgtgaccaccagccagagcaccaagagccgctatgtccccaacgggaagctggcgtcctacacggtgcgcgacctgctgccgggacggcggtaccagctctctgtgatagcagtgcagagcacggagctcgggccgcagcacagcgagcccgcccacctctacatcatcacctcccccagggatggcgctgacagacgctggcaccagggaggacaccaccctcgggtgctcaagaacagaccgcccccggcgcgcctgccggagctgcgcctgctcaatgaccacagcgcccccgagacccccacccagccccccaggttctcggagcttgtggacggcagaggaagagtgagcgccaggttcggtggctcacccagcaaagcagccaccgtgagatcacacgtccctggcaactgttcagaaaacccctgtcagaacggaggcacttgtgtgccgggcgcagacgcccacagctgtgactgcgggccagggttcaaaggcagacgctgcgagctcgcctgtataaaggtgtcccgcccctgcacaaggctgttctccgagacaaaggcctttccagtctgggagggaggcgtctgtcaccacgtgtataaaagagtctaccgagttcaccaagacatctgcttcaaagagagctgtgaaagcacaagcctcaagaagaccccaaacaggaaacaaagtaagagtcagacactggagaaatcttaaggatttaagacgttcttgttacactccaccaacctcacgagtttctaacacccaggaagatgaggtctaaaaactggatgaaaaaggacaccctgagaaaaggtcctagctggagtcagtcccctctgtgacctctctcctcaggcctctagaggacagatggccaggcctgtgcacacaccagcccaccctgagagacccctctgggaccaaccacctgtgagtcctgcgatgcgtttaagcagcctgtgccctcacccaagctgcagttcctgaaggtgtagtctgtgtctctgcggatgagatgacagctcgccattccccggaatcagtgaggctgtcagtcagccacgcttctgcagtatgcagaaacctgttcttagactccaaagccagagaaagaattctcccttcgaggcccaacaaattgagaaggaactgtgatggaccacttccaaaacagagacgggggcaggggctgaagggcagagaccaggtgatgtcagaaggaaagccgggttgcagacacagccgcccctgctctggtcctccagcgtgtttatgacgctcgtgcaggtcgacgagccatcctatggactagttaacactaaggtggagttcagacttttttagacaacggcgcgactggcagcctttctctatcaagggtcagacggtaaacgttttcagctttgcagaccagaggtccctgtggctacagtagcgcagacacagccacaggcatgtcattgaatggctgcggctatgttccaataaaaacttatttacaataacaggtggtggccaaattggcccatgggccttatttggtgaaccctgttctatgagatcacctaggcttcagccttaaacagtggaagccatcccctgaatgacaagtcacaagggtatcaaagaaagacccctgaattttcatggaaaaagctattcagacccctgcttggaaagctaaggcacactgccacgaagcagcaaggacgccttacaagtctcagtgcaacagagatggacacctgggctgggctggacaatgtttaaggttccttttagtccatgactcaagtgatactgttttaggctatcaggtagtaaacacgatcttagacatccccatctttgtaagcagaacagtacggcacttcaccacatctgcttcccaccatgcttctaagcagctgtcttccccctgctaatgttacaaccaaagcagccaccccacctcctctcgtgttgagcctcacgaccgctgacccagctggaaagccagcgccctgccgcgtcaccctgactctgctcagagccagcattccagccacaaagagggcctccttcctttcctctttcataaaaatgttttttgaagagttagagtatattttaggctttttatctttattaaaatttcatgtgc

SEQ ID NO: 570 - DNA, 1400 bp, Homo sapiens
  source 1..1400: mol_type = genomic DNA
cccatcccccggactccacccccagcgggaggccacggggccgctgtgcgcacgcgccgccgcacaccgggggctctcgggcacccgcgcggcgccggttggccttcccggcgctcgcccgggggcgcgcttgcgcgccagcggctgcggacaccagcctgcgtccccggcgcggcgggccatggaggccctgaggagggcccacgaggtcgcgctccgcctgctgctgtgtaggccgtgggcctcgcgcgccgccgcccgccccaagcccagcgcctcggaggtgctgacgcggcatctgctgcagcggcgcctgccgcactggacctccttctgcgtgccctacagcgccgtccgcaacgaccagttcggcctctcgcacttcaactggccggtgcagggcgccaactaccacgtcctgcgcaccggctgcttccccttcatcaagtaccactgctccaaggctccctggcaggacctggcccggcagaaccgcttcttcacggcgctcaaggtcgtcaacctcggtattccaactttattatatggacttggctcctggttatttgccagagtcacagagactgtgcataccagttatggacccataacagtttattttctcaataaagaagatgaaggtgccatgtattgaaagtgtgcgtcaaagaacataaatatcagtggattttctctgtgtatatgtgcagtatttatttttgatcctttaaaataaaacttttgcaaatacttttttctttctacagtatctgcttctttaagatgaatcattgccctcaagaggtgaagctttttatacatcgttatatattacatactctgtttagctgatgtgaactacaaacacatgaagcttcacaccattttttccctagaactaggttaacctacagataaaaaatgattacaatgtaatagattctatagttaattaacaatttaaatcaactctgaagagaaaatatagatgcccacacaaaagagaaggggggaaaatcttttatgtaacaatggaaaaagaagtagaagacattaggatgtatgatggaaatattacatcattggcaaatccaaaattgatgagaatctaattgtaatctcaagtctaaaccattcagctgccaggattgtaaatagaaacgttttaaaggccttgtgccatttacctggaggaggggttggagtgtaatgttgaaacttcttgttgcttaaagagtccaaaaccatatcgtttgtaaaatgtaataataactggttaatataagtgtagcaaggtgaatgaaactcagacttattaaaagttaaaacagctttcctataaagctgtaagaacaattaagatcttctagaaagatgcagaaaaataaatttggtaactg

SEQ ID NO: 571 - DNA, 431 bp, Homo sapiens
  source 1..431: mol_type = genomic DNA
cagctcctgagactgctggcatgaaggggagccgtgccctcctgctggtggccctcaccctgttctgcatctgccggatggccacaggggaggacaacgatgagtttttcatggacttcctgcaaacactactggtggggaccccagaggagctctatgaggggaccttgggcaagtacaatgtcaacgaagatgccaaggcagcaatgactgaactcaagtcctgtatagatggcctgcagccaatgcacaaggcggagctggtcaagctgctggtgcaagtgctgggcagtcaggacggtgcctaagtggacctcagacatggctcagccataggacctgccacacaagcagccgtggacacaacgcccactaccacctcccacatggaaatgtatcctcaaaccgtttaatcaataaagcctcttccg

SEQ ID NO: 572 - DNA, 4450 bp, Homo sapiens
  source 1..4450: mol_type = genomic DNA
cgggcggacgagagagctgcgagctaacgggtccggacgacggcggcggcggcggcggcggcggcgacggctttctgcgcgggcggcggcggcggccggagcggcgagcatggcccgcgcggcgccgggcgctgactgagggtcgtgctgcggcagcctggcgcccgacatgtgaaggggaacctgccaggggattactgtgagctcacagcaggataggctggccccgggggagtggggatgggcagaacctgggccaggagtattaggaaggagacctggaccctggtagggagctcagcacaagctcgcctgacccagatggtattggacacagtgccccgctgaacagcagctgttcccagcgccagaggaccccacagccacagtaggagctttgcgacccctacgcaactgcagctggggctggggccaccaggagaagggaccagcacctcagatgggaagcagaagggcaagacctactgcggaaaggatctcgatctctgcagcggagttttcccacactcacagagcttcctgtttttgtcctctcagggttggggtctggctcccctcctctggcagaggttttgggccaggaggtgggacaacacttgcatggaacccaagtcccctgaagcccctgtgctctctgttgtgattggagttctagggcttccccgctgccgggaacgaggggccgcctcattgtctgctcatgaaccacaaggaccccgactgctccagactggattatttcaagccgccaaagagggggacccctagagctggcagccagcaatcccaagggactagagggctgcaatggactgacctccccctcaccagggtggcaggagaggcagagcctctgtggcctagctagtgacggagagacccgatgaagccctaagcaggggccccgcctgactcagggacaggacagccactcctgccaacgtgtgttctccctacatgagggagggcgtggcaagggacccctgccactgtcccctgctgcagcacgtgcccctatgccctttgcatgtggtgccagaataggcaggctacgccgtggctggcccctcagcgggctgggaaaagagtggccacggtgaccgtcacccgcctgccggcaccatgaagtgctccctgcgggtgtggttcctctccgtggccttcctgctggtgttcatcatgtccctgctcttcacctactcgcaccacagcatggccacgctcccctacctggactcaggggccctggatgggacgcaccgggtgaagctggtgcccggctatgccggcctgcagcgcctcagcaaggagaggctctcgggcaagagctgtgcctgtcgccgctgcatgggcgatgccggtgcctccgactggtttgacagccactttgacggtaacatttcccccgtctggacccgagagaacatggatcttccaccggacgtccagaggtggtggatgatgctgcagccccagttcaagtcacacaacaccaatgaggtgctggagaagctgttccagatagtgcctggcgagaacccctaccgcttccgggacccccaccagtgccggcgctgtgccgtggtggggaactcgggcaacctgcggggctctggctatgggcaggacgtggacgggcacaacttcatcatgaggatgaatcaggcgccaaccgtgggctttgagcaggatgttggcagccgaaccacccaccatttcatgtaccctgagagtgccaagaacctgcccgccaacgtcagcttcgtgctggtgcccttcaaggtcctggaccttctgtggatcgccagcgccttgtccacggggcagatccgattcacctacgccccagtgaagtccttccttcgagtggataaagaaaaggtccagatctacaacccagccttcttcaagtatatccacgacaggtggacagagcatcacgggcggtacccttccacggggatgctggtgcttttctttgccctgcatgtgtgtgatgaggtgaacgtgtacgggttcggggccgacagccggggcaactggcaccactactgggagaacaaccggtacgcgggcgagttccggaagactggcgtgcacgacgcggacttcgaggcccacatcatcgacatgctggccaaggccagcaagatcgaagtctaccggggcaactgagccgggcctcgccgcgacccttccggcccatctatcgggcaccggggctccggcccgggacccaggaccagcaacccgcgaccaatcatgctgcagcccaggggcgtctgctgtgccccgccaatcacgagactgggggaccggccgggcctggcaccaatctgcgctgcggtcgggcggagcttctgtttctcccagccaatcatgtgactcaaggaaaacttccggcgctgtgtccagtctcctccaatcaatggccttcgggggcgggccagcggccgctcaatccccactccctcatgctttgggttagggttttctttcacgctttctgaggaggagagcatggcgcgggcctcggcgaagcacttccgtcagcctcgggcggaggatcgtcttagtagctggccagacctggaggagagcgggcggtctttgcgggcctcaggagataggtggccgcccggcccctttccccgcctgcccggataggtgcgtgcagacccaccaaagaaaagcggtcgctgcgggacccccagtcccacctcggccgcgctgtgggatggctgcgcccccagggcttcctgcgtctccaggaagccgggagtggcgccctctgcggggtggggtgctcccgggccgaactccggacaggtggaggggacagggcagagctcgaggaagccctgtccccttcagtgcaaggtgctgtcactcacgtgtgccctcgaccctcccgttcacccgcagccttctcagcgcctctccctgggccggaggcctcctcaccagcctacctgttgctctggaaaaaaatcccgtcccccgactccgtccctacccccagtcttcggccggctctggcccctggggagggggctgcacggcggaaggaggctggctatgggcccggctgcccgctgcatgtacctcctcctccacccatcgcctcttgcctgggggtaactttgcctggggctcattctttggttaagctgaagctgccgtgggtggccaaaccgcagattctttgcaaattctgagctggcagagctcgcagccgggagccggccggggaagaggagacttgcgcgccgcaagccgcctgcctccaccctgctctccatctcccgctctagaagggctgggaagctcgcggccggggttccacctggaagctgcttgcatggctgaacccagcttaggtccctgacggggctgctggtggaattctcccccttcgaagctggggaggtttaggagggggaaggcttctgtgaagctctcaaaccactaatagagccccctccccaacagtgacggcgcagatgctcccccttttcttagttgacaccaccaggcagcttcctggccgttggtaggttcctgcagctggctgagggaacagggaccggcaggggactttgttaggggagggttgggatgggcagtgggcccctgaaagttaatatattggaacctagctcgagtgtcgttctttccaattccgaaagtagaaagagtaaaaataggggtgattggggtggggttagtagaatgcctctctcagggcgctcccccctcccccaccgttttagagagctaggcctcagccagtcttgccactcccatctcagtgcttcctgaagaggctgttttgagtgttgatgaaaagcaatgcaattatgccaaacagtattgagcagaataatttatttcttttttttcttttgctttaaatcatgaatcccgccaggtacggtggctcacacctgtcatcccagcactttgggaggccaaggcgggcggattacttaatacttaaggtcaggagttcgagaccagcctggccaatatggtgaaacctcgtctctaccaaaaaaaaaaaaaaatacaaaaattagccaggcgcagtggtgcgcacctgtaatcccagctacttggaaggctgaggcaggagaatcccttgaaccgaggaggcgaaggttgcagtgagccgagattgtgccactgcactccagcctgggcgacagagcaagaccctgtctcaaaaaaattaaatcatgaatccccatcctggaagaggtaggtcccagcatccagccagattttctgcaatagtaatttaaacacacttttttatttccttccctttctgaattaaaaggaacaaaaaactgtctagtccttcattgttctgaaatgggcatgatggaagaaggcgggtctggtaggatagctgtgactgataatg

SEQ ID NO: 573 - DNA, 1619 bp, Homo sapiens
  source 1..1619: mol_type = genomic DNA
accaggcgggcactgttgcccggcgacgctccggcgctgggtccccgaggcccggcccctccccgggaggaggtgggcttcgagtcacgtgacccgtgccctacgggagggggtgcggtcggggacccggcaggaggcggccgagaagagaggaccgtgggggcgttcgcgtggctcccagcccgggaccccacccccgctggacagtgggggaaactgaggcctgagcggagtgaccaccccggctatggccagccagcctccagggagcgcgagtgctgctgacaggggccaacgctggtgttggtgaggagctggcctatcactacgcgcgtctgggctcccacctggtgctcactgcccacactgaggctctcctgcagaaggtggtagggaactgccggaagctgggcgcccccaaggtcttctacatcgcggcggacatggcctcccctgaggcgcccgagagcgtggtgcagtttgcgctggacaagctgggcgggctggactacctcgtgctgaaccacatcggcggcgccccggccggcacgcgagcccgcagcccccaggcaactcgctggctcatgcaggtaaactttgtgagctacgtgcaactgacgtcgcgggcgctgcccagcctgacggacagcaagggctccctggtggtggtgtcctcgctgctcggccgcgtgcccacgtcgttctccactccctactcggcggccaagtttgcgctggacggcttcttcggctccctgcggcgggagctggacgtgcaggacgtgaacgtggccatcaccatgtgcgtcctgggcctccgagatcgcgcctccgccgccgaggcagtcaggggagtcacgagggtcaaggcggccccggggcccaaggcagccctggccgtgatccgcggcggcgccacgcgcgcggccggcgtcttctacccgtggcgtttccgcctgctgtgcttgctccggcgctggctaccgcgcccgcgggcctggtttatccgccaggagctcaacgtcacggccgcggcagcctgagcaccggggggtgcccctccagtcccagacggcaatgttcctccctccaactgtccctggagccagaacactcacagagacacccctgagagggtggccacagcccaagatgaagtcatcaagacagaaaagcaaaaccgagaaaaacgacgggcacctggaaccagtcacggcttgggaggtgcaggtgccccgtgttaggcgcctttgtcggggacttgcaaggcctcacctgtttggccatgattgatgacgtgactgcttccattttgcagatgaggaaactaaggctcagagaggccacgccacccttgagccacccatggacccctctccatctcctgcctgcgcctttaagtccctgatttattctttccattcattccatctgggaggaacccccccaactcctgccagcttcccctagctggggtctctggtactcttcacacctgcaggggcgtctacactgttcgtctacctggtggcagggtctgagcgggaggaggagggaaagagtgtgttctgagctggacccagcctcttgttcgagaataaaaactcttcttctcttgc

SEQ ID NO: 574 - DNA, 411 bp, Homo sapiens
  source 1..411: mol_type = genomic DNA
atggtaaggccttaccccctgatctacttcctcttcctgccgctgggcgcctgcttccctctactggacagaagagagcccacagacgccatgggtggcctcggagctggagaacgctgggccgacctggccatggggccccgaccccactccgtgtggggttcctctcggtggctgagagcttcacagccacaggccctgcttgtcatagccagggggctgcagacatcgggcagagagcatgctggctgcagattccgcttcgggaggcaggacgaaggcagtgaggccaccggcttcctccctgctgcgggggagaagaccagcggcccgttagggaacctggctgaggagctcaatggctacagcaggaagaaaggcggcttcagcttccgcttcggtcggcggtga

SEQ ID NO: 575 - DNA, 663 bp, Homo sapiens
  source 1..663: mol_type = genomic DNA
atgcggggccagggccgcaaggagagtttgtccgattcccgagacctggacggctcctacgaccagctcacggacagcgtggacgatgaatttgaattgtccaccgtgtgtcaccggcctgagggtctggagcagctgcaggagcaaaccaaattcacgcgcaaggagttgcaggtcctgtaccggggcttcaagaacgaatgtcccagcggaattgtcaatgaggagaacttcaagcagatttactcccagttctttcctcaaggagactccagcacctatgccacttttctcttcaatgcctttgacaccaaccatgatggctcggtcagttttgaggactttgtggctggtttgtccgtgattcttcggggaactgtagatgacaggcttaattgggccttcaacctgtatgaccttaacaaggacggctgcatcaccaaggaggaaatgcttgacatcatgaagtccatctatgacatgatgggcaagtacacgtaccctgcactccgggaggaggccccaagggaacacgtggagagcttcttccagaagatggacagaaacaaggatggtgtggtgaccattgaggaattcattgagtcttgtcaaaaggatgagaacatcatgaggtccatgcagctctttgacaatgtcatctag

SEQ ID NO: 576 - DNA, 2575 bp, Homo sapiens
  source 1..2575: mol_type = genomic DNA
ggcagagcagggaagccaacctgagcaaacacagcagcccgagtgttcccaaggccaaaatgctgagaacgtccactcctaatctgtgtggtggtctgcattgccgggccccctggctctcttctggcattctctgcctctgcctcatattcttgttgggccaggtgggcttgctgcagggacacccccagtgcctggattacgggccccctttccagccccctctgcaccttgagttttgctctgactatgagtccttcggctgctgtgatcagcacaaggaccgccgcatcgctgcccggtactgggacatcatggaatattttgatctgaagagacatgagctgtgtggagattacattaaagacatcctttgccaggagtgctcgccctacgcagcccacctctacgacgccgaaaacacccagacgcctctccggaatctcccgggcctctgctctgattactgctctgccttccattctaactgtcactcagccatttccctgctgaccaatgaccgcggcctccaggagtctcatggaagggacggtacccgcttctgccacctcctggaccttcctgacaaggactattgcttccctaatgtcctgaggaacgactatctcaaccgccacctgggcatggtggcccaagatcctcagggctgcctgcagctctgcctgagcgaggtggccaacgggctgaggaaccccgtctccatggtccatgctggggacggcacccatcgcttctttgttgccgagcaggtaggagtggtgtgggtctacctccctgatgggagtcgcctggagcaacccttcctggacctcaagaacatcgtgttgaccaccccatggatcggggatgagagaggcttcttggggttggcttttcaccccaaattccgccacaatcgcaagttctatatttattattcgtgcctggacaagaagaaggtagaaaagatccgaattagtgagatgaaggtttctcgggctgatcctaacaaagctgacctgaaatcagagagggtcatcttggagattgaagaaccagcctcaaaccataatggcggacaacttctttttggcctggatggctatatgtacatattcactggggacgggggacaggctggagatccctttggcctgtttggaaatgctcagaacaaaagttccctgctgggaaaagttttaaggatcgatgtgaacagggcaggctcacatggcaagcggtaccgagtcccctcggacaatccatttgtttctgagccaggggcccaccccgccatctatgcctatgggatcaggaacatgtggcgttgtgctgtggaccgaggggaccccatcacgcgccagggccgaggccggatattctgtggggacgtgggccagaacaggtttgaagaggttgacctcattttgaaaggtggaaactatggctggagagcaaaggaagggtttgcatgttatgacaaaaaactttgtcacaatgcctctttggatgatgttctgccaatctatgcttatggccatgcagtggggaagtcagtcactggaggttatgtctatcgtggttgtgaatccccaaatctcaatggcctgtatatctttggagacttcatgagtggtcgacttatggctttgcaggaagatagaaaaaacaagaaatggaagaagcaggatctttgcctgggcagcaccacgtcctgtgccttcccagggctgatcagcacccatagcaagttcatcatctcctttgctgaagatgaagcaggggagctgtatttcctggcgacctcttacccaagtgcctatgcaccacgtggatctatttacaagtttgttgacccctcaaggcgagcacccccaggcaagtgcaaatacaagccagtgcccgtgagaaccaagagtaagcggatcccgttcagaccactcgccaagacagtcttggacttgctaaaggaacaatcagagaaagctgctagaaaatcttccagtgcaaccttagcttctggcccagcccagggtttgtctgagaaaggctcctccaagaagctggcttctcctacaagcagcaagaatacattgcgagggcctggtacaaagaagaaagccagagtggggccccacgtccgccagggcaagaggaggaagagcctgaaaagccacagtggcaggatgaggccatcagcagagcagaagcgagctggcagaagtctcccttgacctattggtcaaggtggccgacagggtgacgtgagagaggagagccacctcatcaaatgaaagtcactgctgaataaagaccttagaagtctgggaagccagggtagaggtggggcagggcggttttcctctccctgggaaatcttgctgtctactgaataaataaatgcaccttctctgtatgcagtgcttctgtgggagaccatatcccagattgctggtgcacctgggttatggtaagcactagtccatgagcctgcttggaatcacactggatgtctccgttttgtcttgtaaatgcctacaacctgaggtaataaatcaacatttgctcaaactgg

SEQ ID NO: 577 - DNA, 2052 bp, Homo sapiens
  source 1..2052: mol_type = genomic DNA
tgctgcgcaccgggcctcgcgccccgcgccccgcgccccgcgccccgcgccccgcaccggcctccaggatcatgtggtatgtcagcaccaggggcgtagccccacgggtcaactttgagggggccctcttctctggctatgcacctgacgggggcctctttatgcctgaagagctcccacagttggacagagggaccctgtgccagtggagcacactctcctatcctggcctggtgaaggagctgtgtgccctcttcattggctctgagctccttccaaaagatgaattaaatgatctgatcgaccgagccttcagcagattccgtcacagagaagtggtccatctgtccaggttgaggaatgggctgaacgtgttggagctgtggcatggcgtcacatatgcatttaaggacctgtccctgtcctgcacaacacagttcctgcagtacttcctggagaagagggagaagcacgtcactgtggttgtaggaacatctggggacacaggaagtgctgccattgagagtgttcaaggggcaaagaacatggacattatcgttctgctgcccaaaggtcactgcacaaagattcaggagctccagatgacaacggtgctgaagcagaacgtacatgtgtttggagtggagggaaacagcgatgagctcgatgagccgatcaagactgtgtttgccgatgtggcttttgtcaagaagcacaatctgatgagcctgaattcgatcaactggtcccgggtcctggtgcagatggcccatcacttctttgcttacttccagtgtacgccatccttggacacacatcccctacccctggtggaggtggttgtgccaacaggggctgccggtaaccttgcagctgggtacattgctcaaaagataggcctgcccatccgtctggtcgtggcagtgaaccgcaatgacatcatccacaggactgtccagcagggagacttctctctctctgaggctgttaaatcaaccttggcatcagctatggacattcaggtgccctacaacatggagagggtgttctggctgctctctggctctgacagccaggtgacaagagccctcatggagcagtttgaaaggacccaaagtgtgaatctgcccaaggaactgcacagcaagtgggagagacaggactacgaaaaaatggctgtaatggagtgtgatgggtgctgtgtggaactgtgccttggaaactgtgggcccagaagagggagcgtgacagatatcccagggacagccatggtcagaggtggtggctgagctggcctccaaccaggaggagcagtttgccagcactccccggtgctgcctcgcccctgcctctgcagccaagttcccggaagctgtcctggctgctggcctgacccctgagactcccgcggagatcgtagccctggagcacaaggagacacgctgcaccctgatgcggagaggtgacaactggatgctgatgcttcgggacaccattgaggaccttagccgacagtggaggagtcatgccctcaacacctcccagtagcctggctggaggtggctttctttaggcttcagatcccaggaagatgcaccttctgagctgccttgtgcaccctccccattaagcgtaggttaggaggtttccgggaggctgctcagctggatctggagccagctggctttgctccgttccctggctagtctgtgcctggtcaccagggaggctgagtgaggggctgtgaacagttgccggaagcaccccctccctccccggcccgtgcagcagtgtctgagctgtagtgaaagtttcagggcctgcaaaagaagaggcttgggcacaggactgaccatggctccaggggtttaggaccccagacctgtgaaggtgggagcagctcaccaccttcacgcaggctttgtatgttctctgagccttagttgattttggcccccaaaccaaatccaaaggttctggcccaccttgtcagaggcttccaccctgctcacatgttgggaatccctggaataaaatgcttgttcagtgtga

SEQ ID NO: 578 - DNA, 1720 bp, Homo sapiens
  source 1..1720: mol_type = genomic DNA
acacgcagctagacacagctaacttgagtcttggagctcctagagggaagcttctggaaaggaaggctcttcaggacctcttaggagccagagaagaggacgttgtcacagataaagagccaggctcaccagctcctgacgcatgcatcatgaccatgagacacaactggacaccagacctcagccctttgtgggtcctgctcctgtgtgcccacgtcgtcactctcctggtcagagccacacctgtctcgcagaccaccacagctgccactgcctcagttagaagcacaaaggacccctgcccctcccagcccccagtgttcccagcagctaagcagtgtccagcattggaagtgacctggccagaggtggaagtgccactgaatggaacgctgagcttatcctgtgtggcctgcagccgcttccccaacttcagcatcctctactggctgggcaatggttccttcattgagcacctcccaggccgactgtgggaggggagcaccagccgggaacgtgggagcacaggctgggctgagggcaaccttgccccccacccaagaagccctgccctccagccacagcagtccacagcagcagggttaagactcagcacagggccagcagcagcacaaccttgaccagagcttgggtcctacctgtctacctggagtgaacagtccctgactgcctgtaggctgcgtggatgcgcaacacaccccctccttctctgctttgggtcccttctctcaccaaattcaaactccattcccacctacctagaaaatcacagcctccttataatgcctcctcctcctgccattctctctccacctatccattagccttcctaacgtcctactcctcacactgctctactgctcagaaaccaccaagactgttgatgccttagccttgcactccagggccctacctgcatttcccacatgactttctggaagcctcccaactattcttgcttttcccagacagctcccactcccatgtctctgctcatttagtcccgtcttcctcaccgccccagcaggggaacgctcaagcctggttgaaatgctgcctcttcagtgaagtcatcctctttcagctctggccgcattctgcagacttcctatcttcgtgctgtatgttttttttttcccccttcactctaatggactgttccagggaagggatgggggcagcagctgcttcggatccacactgtatctgtgtcatccccacatgggtcctcataaaggattattcaatggaggcatcctgacatctgttcatttaggcttcagttccactcccaggaactttgcctgtcccacgagggagtatgggagagagggactgccacacagaagctgaagacaacacctgcttcaggggaacacaggcgcttgaaaaagaaaagagagaacagcccataatgctccccgggagcagaggccactaatggagagtgggaagagcctggaaagatgtggcctcaggaaaagggatgagagaaaggaggtggtatggaagactcagcaggaacaaggggcttgctcaccaccttctccctggagagggcagaagaggtcacacgcagagactgctactacatcttactcacctgccaaggcttggtggccaacacccagaggaacaaattaaggaccgggaattaattcccaggggctccctggtgcccaaaggacaagagcttcca

SEQ ID NO: 579 - DNA, 3031 bp, Homo sapiens
  source 1..3031: mol_type = genomic DNA
gactcagtttcaccagaaaccagggggagaaggcggccgagccccagctctccgagcaccgggtcggaagccgcgacccgagccgcgcaggaagctgggaccggaacctcggcggacccggccccacccaactcacctgcgcaggtcaccagcaccctcggaacccagaggcccgcgctctgaaggtgacccccctggggaggaaggcgatggcccctgcgaggacgatggcccgcgcccgcctcgccccggccggcatccctgccgtcgccttgtggcttctgtgcacgctcggcctccagggcacccaggccgggccaccgcccgcgccccctgggctgcccgcgggagccgactgcctgaacagctttaccgccggggtgcctggcttcgtgctggacaccaacgcctcggtcagcaacggagctaccttcctggagtcccccaccgtgcgccggggctgggactgcgtgcgcgcctgctgcaccacccagaactgcaacttggcgctagtggagctgcagcccgaccgcggggaggacgccatcgccgcctgcttcctcatcaactgcctctacgagcagaacttcgtgtgcaagttcgcgcccagggagggcttcatcaactacctcacgagggaagtgtaccgctcctaccgccagctgcggacccagggctttggagggtctgggatccccaaggcctgggcaggcatagacttgaaggtacaaccccaggaacccctggtgctgaaggatgtggaaaacacagattggcgcctactgcggggtgacacggatgtcagggtagagaggaaagacccaaaccaggtggaactgtggggactcaaggaaggcacctacctgttccagctgacagtgactagctcagaccacccagaggacacggccaacgtcacagtcactgtgctgtccaccaagcagacagaagactactgcctcgcatccaacaaggtgggtcgctgccggggctctttcccacgctggtactatgaccccacggagcagatctgcaagagtttcgtttatggaggctgcttgggcaacaagaacaactaccttcgggaagaagagtgcattctagcctgtcggggtgtgcaaggtgggcctttgagaggcagctctggggctcaggcgactttcccccagggcccctccatggaaaggcgccatccagtgtgctctggcacctgtcagcccacccagttccgctgcagcaatggctgctgcatcgacagtttcctggagtgtgacgacacccccaactgccccgacgcctccgacgaggctgcctgtgaaaaatacacgagtggctttgacgagctccagcgcatccatttccccagtgacaaagggcactgcgtggacctgccagacacaggactctgcaaggagagcatcccgcgctggtactacaaccccttcagcgaacactgcgcccgctttacctatggtggttgttacggcaacaagaacaactttgaggaagagcagcagtgcctcgagtcttgtcgcggcatctccaagaaggatgtgtttggcctgaggcgggaaatccccattcccagcacaggctctgtggagatggctgtcgcagtgttcctggtcatctgcattgtggtggtggtagccatcttgggttactgcttcttcaagaaccagagaaaggacttccacggacaccaccaccacccaccacccacccctgccagctccactgtctccactaccgaggacacggagcacctggtctataaccacaccacgcggcccctctgagcctgggtctcaccggctctcacctggccctgcttcctgcttgccaaggcagaggcctgggctgggaaaaactttggaaccagactcttgcctgtttcccaggcccactgtgcctcagagaccagggctccagcccctcttggagaagtctcagctaagctcacgtcctgagaaagctcaaaggtttggaaggagcagaaaacccttgggccagaagtaccagactagatggacctgcctgcataggagtttggaggaagttggagttttgtttcctctgttcaaagctgcctgtccctaccccatggtgctaggaagaggagtggggtggtgtcagaccctggaggccccaaccctgtcctcccgagctcctcttccatgctgtgcgcccagggctgggaggaaggacttccctgtgtagtttgtgctgtaaagagttgctttttgtttatttaatgctgtggcatgggtgaagaggaggggaagaggcctgtttggcctctctatcctctcttcctcttcccccaagattgagctctctgcccttgatcagccccaccctggcctagaccagcagacagagccaggagaagctcagctgcattccgcagcccccacccccaaggttctccaacatcacagcccagcccgcccactgggtaataaaagtggtttgtggagtttctggctctgttctgtgggccaggagagggactaggttgctggggggtgatgggaccgtcctgttcagctggttcaggcttcagccaccctgttgagcaggttttcccatcgtctctctcgaaactggcctggcccctgactttggagagcagtgccatgtttgaccaccagaggggaggagtgagcgggccacgggagccacgagtgtggggaggctgcagtgctgctgtgtagcatttcttcctggtgtgagcctctccacaagcctgttgagtggttgagctctccacaattctgctcatttggaggttggggttaggggtgcacaggcaccttggctcctacctccatgttagggcccaggtgactagctgtctccctcccaacagaagccctggcttctgcgctggagtgcagcacccccaaccaggctctgagctccttcccaggagcctttagtagagacacgccactccaacccacacccctgcatttgttcaagctacctcccggtgccaaaaaaaaaaaaaaatcatactttgagctca

SEQ ID NO: 580 - DNA, 2144 bp, Homo sapiens
  source 1..2144: mol_type = genomic DNA
gcttttctgatagcaatttcatgagtcagctgacctaagatacatacttcaattctcatgggatttcttgagctaggaaaggtggttggcttacggcacagtagagagcttccagggctggctggcgtgggatacccgtaccacagaaatgcagggaccattgcttcttccaggcctctgctttctgctgagcctctttggagctgtgactcagaaaaccaaaacttcctgtgctaagtgccccccaaatgcttcctgtgtcaataacactcactgcacctgcaaccatggatatacttctggatctgggcagaaactattcacattccccttggagacatgtaacgacaccacctcctcaaagacaaccgagggcaggaaagagctgcaaaagattgtggacaaatttgagtcacttctcaccaatcagactttatggagaacagaagggagacaagaaatctcatccacagctaccactattctccgggatgtggaatcgaaagttctagaaactgccttgaaagatccagaacaaaaagtcctgaaaatccaaaacgatagtgtagctattgaaactcaagcgattacagacaattgctctgaagaaagaaagacattcaacttgaacgtccaaatgaactcaatggacatccgttgcagtgacatcatccagggagacacacaaggtcccagtgccattgcctttatctcatattcttctcttggaaacatcataaatgcaactttttttgaagagatggataagaaagatcaagtgtatctgaactctcaggttgtgagtgctgctattggacccaaaaggaacgtgtctctctccaagtctgtgacgctgactttccagcacgtgaagatgacccccagtaccaaaaaggtcttctgtgtctactggaagagcacagggcagggcagccagtggtccagggatggctgcttcctgatacacgtgaacaagagtcacaccatgtgtaattgcagtcacctgtccagcttcgctgtcctgatggccctgaccagccaggaggaggatcccgtgctgactgtcatcacctacgtggggctgagcgtctctctgctgtgcctcctcctggcggccctcacttttctcctgtgtaaagccatccggaacaccagcacctcactgcatctgcagctctcgctctgcctcttcctggcccacctcctcttcctcgtggggattgatcgaactgaacccaaggtgctgtgctccatcatcgccggtgctttgcactatctctacctggccgccttcacctggatgctgctggagggtgtgcacctcttcctcactgcacggaacctgacagtggtcaactactcaagcatcaatagactcatgaagtggatcatgttcccagtcggctatggcgttcccgctgtgactgtggccatttctgcagcctcctggcctcacctttatggaactgctgatcgatgctggctccacctggaccagggattcatgtggagtttccttggcccagtctgtgccattttctctgcgaatttagtattgtttatcttggtcttttggattttgaaaagaaaactttcctccctcaatagtgaagtgtcaaccatccagaacacaaggatgctggctttcaaagcaacagctcagctcttcatcctgggctgcacatggtgtctgggcttgctacaggtgggtccagctgcccaggtcatggcctacctcttcaccatcatcaacagcctccaaggcttcttcatcttcttggtctactgcctcctcagccagcaggtccagaaacaatatcaaaagtggtttagagagatcgtaaaatcaaaatctgagtctgagacatacacactttccagcaagatgggtcctgactcaaaacccagtgagggggatgtttttccaggacaagtgaagagaaaatattaaaactagaatattcaactccatatggaaaatcatatccatggatctctttggcattatgaagaatgaagctaaggaaaagggaattcattaaacatatcatccttggagaggaagtaatcaacctttacttcccaagctgtttgttctccacaataggctctcaacaaatgtgtggtaaattgcatttctcttc

SEQ ID NO: 581 - DNA, 3127 bp, Homo sapiens
  source 1..3127: mol_type = genomic DNA
ctgttaaggtatacagacagtagttaaatagcagggccaactattctgttaagggtcttcctagacagactaaaaaagccatgtattctttcgtttctctctaaaagaagaaaaatataatttaaaaatacattgcgtattttctaaaacaataaatttatagtgttaatattcatagggtcaatcaaaatgaagcttctcctttgggcctgcattgtatgtgttgcttttgcaaggaagagacggttccccttcattggtgaggatgacaatgacgatggtcacccacttcatccatctctgaatattccttatggcatacggaatttaccacctcctctttattatcgcccagtgaatacagtccccagttaccctgggaatacttacactgacacagggttaccttcgtatccctggattctaacttctcctggattcccctatgtctatcacatccgtggttttcccttagctactcagttgaatgttcctcctctccctcctaggggtttcccgtttgtccctccttcaaggtttttttcagcagctgcagcacccgctgccccacctattgcagctgagcctgctgcagctgcacctcttacagccacacctgtagcagctgagcctgctgcaggggcccctgttgcagctgagcctgctgcagaggcacctgttggagctgagcctgctgcagaggcacctgttgcagctgagcctgctgcagaggcacctgttggagtggagccagctgcagaggaaccttcaccagctgagcctgctacagccaagcctgctgccccagaacctcacccttctccctctcttgaacaggcaaatcagtgaaattctctagaagagtaccatgggttcatttctatactgatgcagaaataagtgaaatctacaaaagttttctttcttttccaaagactatttcattctgttgtattcagagtattcatctcactacattgatttgtttgtggtagtttttccttggacttaatttatattgaaaaaacattgataattaaataaataaaatagataatttagaccaatggtgataaggtctggatgaaaactacgctatggaggactgaaatggcaatcattcagcctagcctggagtctgattatacagctactataggatgatgttagtattggttttgagtgcaataggttttttcctaaacaaacatattttgtagtcaatgaactttttgtcacaaaacagtaaaacatctgtgtttaacctatggtaaacaacatgttaatgaactatgctatccatgacttaatggacagttcaaatgtgacatctacagtttttcatttctcttttatgccagcacacaatcaattcatcaccaattgtcatttgatttacttcaaaaaatatacccccaaatcctaatacttctaaccttctccactgcatctagccaactctagctattgtcatccctaacagaaatggaggaatagcctctttttttttttttttttttgagacgaagtctcacactgttgcacggctgtagtgcaatggtgccaactcagctcactgcaacttccacctcccgggttcaagtgattctcctgcctcagcctcctgagtagccgggattacaggtgtgtgccaccacgcctggctaattttttgtaatttagtacagacaggggttccctatgttggccaggatggtcttgatctcctgacctcatgatctgtccgcctcggcctcccaaagtgctgggaatacaggcgtgagccaccgtgccctgccagaatagcctattaaccagtctacctgcttccacttttcctccaccctgatcacatacacacatgcattatccactgagcagtcacaatcagatgttaaaccaaacattattcagataagatctctgaaaagcctctgatactttctcttttaaaatggaatatattctaaacacctctccaaggacacaagacttaccttgtctaactaatgacttttctaacttcattccctatcattctccatcttgccccatgctcctcatgcagcagcttttttttttttttcctttttcaaatatgttggttttgatcttatccaagaacctttgccctgatgtatgaatgactaactgcttttctacttcgggggtctcatatagaaatcctgcttcagaatactcttccctgagcactctatctaaataaatccctcttctgcaacccagtgctttttgttctattactgacttcttttccttgtagaagttactattactgctttttacctttttatttatttgtgtattgtctttgttgttgccctcatcttatctccacaaaaatatatgctccataaaaacaggcatttctgtgtcttattcagcactttatcagggcctataacaatgcctgggacatattcagtgaccagtgaatatttttggaaggaaagaaaagaagaaagaatgaagtaacaaacaaagaatgaaggaagaaaaaatttttacaaacattcaacatatttttattttgaaataattttgtatttttccctatatcctacattggatcagaatattactgttatgtatagccatgaggacatggtctcaaaaaatgagaaactttcttagacagtaaaattgttaacttgagatgtttgcttccatcttctagagccaagtaggatctaactttaatttgacttagccaataatctgaaactattatagtatctgtctttcacagatacatgcaatattcacttctaaatatttaatgataaatttgtaatcatacatgatagtcaattttaatgattatgttgtcaaaattcaggctttttgtgtgaattgaagacttaaagaagaatttgtaaatatgactgtataagaaacaacagaaagatgaagatgaaccgaaatagaaatatcaagaggctacaaagtcttagcaaattataattgctaatggtacattatgtggtgtttagtatcacatttagaatgtagtcatttgttaagtttttcatggggtaaaagaaagaatttattccaagaaaattttggaattttaaaaataaacatgacatcttatcatgagaaa

SEQ ID NO: 582 - DNA, 2544 bp, Homo sapiens
  source 1..2544: mol_type = genomic DNA
caggctccgcgccgggctcgcccgccgggcaggcgcacggcggacacctgcgagcctggaggtggcggtcgctgcgaacccggcggcgcggccaaacctgtgctggctgcctgggccttctgggcctcctgggccagaagctggcgctgggggcggcggcggggtgggaaagcggcgccgccgtggggcctcctggacgcgtcggcggaggtggcttcgtcccgcggagtccaggcttcaggctttcaccagttctcaggatgcccatagggatgggtgaagcctgcctggcctgtggtgcttcccagtggccgtcatctcattagggccccacagtggcattaggatgcacctctcggcggtgttcaacgccctcctggtgtcggtgctggcagcggtcctgtggaagcatgtgcggctgcgtgagcatgcagccacactggaggaggagctggccctcagccgacaggccacagagccagccccagcactgaggatcgactacccgaaggcactgcagatcctgatggagggcggcacacacatggtgtgcacgggccgcacgcacacagaccgcatctgccgcttcaagtggctctgctactccaacgaggctgaggagttcatcttcttccatggcaacacctctgtcatgctgcccaacctgggctcccggcgcttccagccagccctgctcgacctatccaccgtggaggaccacaacactcagtacttcaacttcgtggagctgcctgctgctgccctgcgcttcatgcccaagccggtgttcgtgccagacgtggccctcatcgccaaccgcttcaaccccgacaacctcatgcacgtctttcatgacgacctgctgccactcttctacaccctgcggcagtttcccggcctggcccacgaggcacggctcttcttcatggagggctggggcgagggtgcacacttcgacctctacaagctgctcagccccaagcagcctctcctgcgggcacagctgaagaccctgggccggctgctgtgcttctcccatgcttttgtgggcctctccaagatcactacctggtaccagtatggctttgtgcagccccagggcccgaaggccaacatcctcgtctcaggcaatgagatccggcagtttgcacggttcatgacagaaaagctgaacgtgagccacacaggagtccccctaggcgaggagtacattctggtctttagccgaacccagaacagactcattctgaatgaggcagagctgctgctggcactggcccaggagttccagatgaagacagtgacagtgtccctggaggaccacacctttgctgatgtcgtgcggctggtcagcaatgcctccatgctggtcagcatgcatggggcccagctggtcaccaccctcttcctgccccgtggggcaactgtggtagagctcttcccatatgctgtcaatcccgaccactacactccctataagacgctggccatgctgcctggcatggacctccagtatgtagcctggcggaacatgatgccagagaacacagtcacacaccctgagcggccctgggatcaggggggcatcacccatctggaccgggctgagcaagcccgtatcctgcaaagccgtgaggtcccacggcatctctgttgccggaaccccgagtggctcttccgaatctaccaggacaccaaggtggacatcccgtccctcattcaaaccatacggcgcgtggtgaagggccggccaggaccacggaagcagaagtggacagtcggcctatatccaggcaaggtgcgggaggcacggtgccaggcgtcagtgcatggcgcctccgaggcccgcctcactgtctcctggcagatcccatggaaccttaaatacctgaaggtgagggaggtgaagtacgaggtgtggctgcaggagcagggggagaacacctacgtgccttacatcctggctctgcagaaccacaccttcactgagaacatcaagcccttcaccacctacctggtgtgggtccgctgcatcttcaacaagatcctcctgggaccctttgcagatgtgctggtgtgcaacacgtagcgagcaggccacagcctggcctcgggaaggtggctcctgcagttcagcgtccctgggcccattaatcccactgtggagacttctgggaactatttattgagcaggcctgtgcctccacatcatcttgttgtctctggggtgtggtgtcacagcactcctctttgccctagagataagggacctgacttccccttctcccatcctgaacatttgtacccctggagaagttccttagcagggaggaggaagaggagaggaggaagcaaagaatcacaaggaacctctggctaggtgatcctgatgtttcctactgagtttttctggtatccagatttctggaaaccgagtaatcatgtactgtttgattgggtggttcatctgcttccatcccagtgaaatttacctgtagcccagtgaagggtgtgtttggaacattcattaaatgattctaagca

SEQ ID NO: 583 - DNA, 6720 bp, Homo sapiens
  source 1..6720: mol_type = genomic DNA
atgggcttcttgcccaagcttctcctcctggcctcattcttcccagcaggccaggcctcatggggcgtctccagtccccaggacgtgcagggtgtgaaggggtcttgcctgcttatcccctgcatcttcagcttccctgccgacgtggaggtgcccgacggcatcacggccatctggtactacgactactcgggccagcggcaggtggtgagccactcggcggaccccaagctggtggaggcccgcttccgcggccgcaccgagttcatggggaaccccgagcacagggtgtgcaacctgctgctgaaggacctgcagcccgaggactctggttcctacaacttccgcttcgagatcagtgaggtcaaccgctggtcagatgtgaaaggcaccttggtcacagtaacagaggagcccagggtgcccaccattgcctccccggtggagcttctcgagggcacagaggtggacttcaactgctccactccctacgtatgcctgcaggagcaggtcagactgcagtggcaaggccaggaccctgctcgctctgtcaccttcaacagccagaagtttgagcccaccggcgtcggccacctggagaccctccacatggccatgtcctggcaggaccacggccggatcctgcgctgccagctctccgtggccaatcacagggctcagagcgagattcacctccaagtgaagtatgcccccaagggtgtgaagatcctcctcagcccctcggggaggaacatccttccaggtgagctggtcacactcacctgccaggtgaacagcagctaccctgcagtcagttccattaagtggctcaaggatggggtacgcctccaaaccaagactggtgtgctgcacctgccccaggcagcctggagcgatgctggcgtctacacctgccaagctgagaacggcgtgggctctttggtctcaccccccatcagcctccacatcttcatggctgaggtccaggtgagcccagcaggtcccatcctggagaaccagacagtgacactagtctgcaacacacccaatgaggcacccagtgatctccgctacagctggtacaagaaccatgtcctgctggaggatgcccactcccataccctccggctgcacttggccactagggctgatactggcttctacttctgtgaggtgcagaacgtccatggcagcgagcgctcgggccctgtcagcgtggtagtcaaccacccgcctctcactccagtcctgacagccttcctggagacccaggcgggacttgtgggcatccttcactgctctgtggtcagtgagcccctggccacactggtgctgtcacatgggggtcatatcctggcctccacctccggggacagtgatcacagcccacgcttcagtggtacctctggtcccaactccctgcgcctggagatccgagacctggaggaaactgacagtggggagtacaagtgctcagccaccaactcccttggaaatgcaacctccaccctggacttccatgccaatgccgcccgtctcctcatcagcccggcagccgaggtggtggaaggacaggcagtgacactgagctgcagaagcggcctaagccccacacctgatgcccgcttctcctggtacctgaatggagccctgcttcacgagggtcccggcagcagcctcctgctccccgcggcctccagcactgacgccggctcataccactgccgggcccgggacggccacagtgccagtggcccctcttcgccagctgttctcactgtgctctacccccctcgacaaccaacattcaccaccaggctggaccttgatgccgctggggccggggctggacggcgaggcctccttttgtgccgtgtggacagcgacccccccgccaggctgcagctgctccacaaggaccgtgttgtggccacttccctgccatcagggggtggctgcagcacctgtgggggctgttccccacgcatgaaggtcaccaaagcccccaacttgctgcgtgtggagattcacaaccctttgctggaagaggagggcttgtacctctgtgaggccagcaatgccctgggcaacgcctccacctcagccaccttcaatggccaggccactgtcctggccattgcaccatcacacacacttcaggagggcacagaagccaacttgacttgcaacgtgagccgggaagctgctggcagccctgctaacttctcctggttccgaaatggggtgctgtgggcccagggtcccctggagaccgtgacactgctgcccgtggccagaactgatgctgccctttacgcctgccgcatcctgactgaggctggtgcccagctctccactcccgtgctcctgagtgtactctatcccccggaccgtccaaagctgtcagccctcctagacatgggccagggccacatggctctgttcatctgcactgtggacagccgccccctggccttgctggccttgttccatggggagcacctcctggccaccagcctgggtccccaggtcccatcccatggtcggttccaggctaaagctgaggccaactccctgaagttagaggtccgagaactgggccttggggactctggcagctaccgctgtgaggccacaaatgttcttggatcatccaacacctcactcttcttccaggtccgaggagcctgggtccaggtgtcaccatcacctgagctccaagagggccaggctgtggtcctgagctgccaggtacacacaggagtcccagaggggacctcatatcgttggtatcgggatggccagcccctccaggagtcgacctcggccacgctccgctttgcagccataactttgacacaagctggggcctatcattgccaagcccaggccccaggctcagccaccacgagcctagctgcacccatcagcctccacgtgtcctatgccccacgccacgtcacactcactaccctgatggacacaggccctggacgactgggcctcctcctgtgccgtgtggacagtgaccctccggcccagctgcggctgctccacggggatcgccttgtggcctccaccctacaaggtgtggggggacccgaaggcagctctcccaggctgcatgtggctgtggcccccaacacactgcgtctggagatccacggggctatgctggaggatgagggtgtctatatctgtgaggcctccaacaccctgggccaggcctcggcctcagctgacttcgacgctcaagctgtgaatgtgcaggtgtggcccggggctaccgtgcgggaggggcagctggtgaacctgacctgccttgtgtggaccactcacccggcccagctcacctacacatggtaccaggatgggcagcagcgcctggatgcccactccatccccctgcccaacgtcacagtcagggatgccacctcctaccgctgcggtgtgggcccccctggtcgggcaccccgcctctccagacctatcaccttggacgtcctctacgcgccccgcaacctgcgcctgacctacctcctggagagccatggcgggcagctggccctggtactgtgcactgtggacagccgcccgcccgcccagctggccctcagccacgccggtcgcctcttggcctcctcgacagcagcctctgtccccaacaccctgcgcctggagctgcgagggccacagcccagggatgagggtttctacagctgctctgcccgcagccctctgggccaggccaacacgtccctggagctgcggctggagggtgtgcgggtgatcctggctccggaggctgccgtgcctgaaggtgcccccatcacagtgacctgtgcggaccctgctgcccacgcacccacactctatacttggtaccacaacggtcgttggctgcaggagggtccagctgcctcactctcattcctggtggccacgcgggctcatgcaggcgcctactcttgccaggcccaggatgcccagggcacccgcagctcccgtcctgctgccctgcaagtcctctatgcccctcaggacgctgtcctgtcctccttccgggactccagggccagatccatggctgtgatacagtgcactgtggacagtgagccacctgctgagctggccctatctcatgatggcaaggtgctggccacgagcagcggggtccacagcttggcatcagggacaggccatgtccaggtggcccgaaacgccctacggctgcaggtgcaagatgtgcctgcaggtgatgacacctatgtttgcacagcccaaaacttgctgggctcaatcagcaccatcgggcggttgcaggtagaaggtgcacgcgtggtggcagagcctggcctggacgtgcctgagggcgctgccctgaacctcagctgccgcctcctgggtggccctgggcctgtgggcaactccacctttgcatggttctggaatgaccggcggctgcacgcggagcctgtgcccactctcgccttcacccacgtggctcgtgctcaagctgggatgtaccactgcctggctgagctccccactggggctgctgcctctgctccagtcatgctccgtgtgctctaccctcccaagacgcccaccatgatggtcttcgtggagcctgagggtggcctccggggcatcctggattgccgagtggacagcgagccgctcgccagcctgactctccaccttggcagtcgactggtggcctccagtcagccccagggtgctcctgcagagccacacatccatgtcctggcttcccccaatgccctgagggtggacatcgaggcgctgaggcccagcgaccaaggggaatacatctgttctgcctcaaatgtcctgggctctgcctctacctccacctactttggggtcagagccctgcaccgcctgcatcagttccagcagctgctctgggtcctgggactgctggtgggcctcctgctcctgctgttgggcctgggggcctgctacacctggagaaggaggcgtgtttgtaagcagagcatgggcgagaattcggtggagatggcttttcagaaagagaccacgcagctcattgatcctgatgcagccacatgtgagacctcaacctgtgccccacccctgggctgaccagtggtgttgcctgccctccggaggagaaagtggccagaatctgtgatgactccagcctatgaatgtgaatgaggcagtgttgagtcctgcccgcctctacgaaaacagctctgtgacatctgactttttatgacctggccccaagcctcttgcccccccaaaaatgggtggtgagaggtctgcccaggagggtgttgaccctggaggacactgaagagcactgagctgatctcgctctctcttctctggatctcctcccttctctccatttctccctcaaaggaagccctgccctttcacatccttctcctcgaaagtcaccctggactttggttggattgcagcatcctgcatcctcagaggctcaccaaggcattctgtattcaacagagtatcagtcagcctgctctaacaagagaccaaatacagtgacttcaacatgatagaattttatttttctctcccacgctagtctggctgttacgatggtttatgatgttggggctcaggatccttctatcttccttttctctatccctaaaatgatgcctttgattgtgaggctcaccatggccccgctttgtccacatgccctccagccagaagaaggaagagtggaggtagaagcacacccatgcccatggtggacgcaactcagaagctgcacaggacttttccactcacttcccattggctggagtattgtcacatggctactgcaagctacaagggagactgggaaatgtagtttttattttgagtccagaggacatttggaattggacttccaaaggactcccaactgtgagctcatccctgagacttttgacattgttgggaatgccaccagcaggccatgttttgtctcagtgcccatctactgagggccagggtgtgcccctggccattctggttgtgggcttcctggaagaggtgatcactctcacactaagactgaggaaataaaaaaggtttggtgttttcctagggagagagcatgccaggcagtggagttgcctaagcagacatccttgtgccagatttggcccctgaaagaagagatgccctcattcccaccaccaccccccctacccccagggactgggtactaccttactggcccttacaagagtggagggcagacacagatgttgtcagcatccttattcctgctccagatgcatctctgttcatgactgtgtgagctcctgtccttttcctggagaccctgtgtcgggctgttaaagagaatgagttaccaagaaggaatgacgtgcccctgcgaatcagggaccaacaggagagagctcttgagtgggctagtgactccccctgcagcctggtggagatggtgtgaggagcgaagagccctctgctctaggatttgggttgaaaaacagagagagaagtggggagttgccacaggagctaacacgctgggaggcagttgggggcgggtgaactttgtgtagccgaggccgcaccctccctcattccaggctcattcattttcatgctccattgccagactcttgctgggagcccgtccagaatgtcctcccaataaaactccatcctatgacgcaa

SEQ ID NO: 584 - DNA, 1953 bp, Homo sapiens
  source 1..1953: mol_type = genomic DNA
gctgcacacccgagaaagtttcagccaaacttcgggcggcggctgaggcggcggccgaggagcggcggactcggggcgcggggagtcgaggcatttgcgctgggcttcggagcgtagcgccagggcctgagcctttgaagcaggaggaggggaggagagagtggggctcctctatcgggaccccctccccatgtggatctgcccaggcggcggcggcggcggcggcggaggaggcgaccgagaagatacccgccctgcgccccgctctgctgtgggcgctgctggcgctctggctgtgctgcgcgacccccgcgcatgcattgcagtgtcgagatggctatgaaccctgtgtaaatgaaggaatgtgtgttacctaccacaatggcacaggatactgcaaatgtccagaaggcttcttgggggaatattgtcaacatcgagacccctgtgagaagaaccgctgccagaatggtgggacttgtgtggcccaggccatgctggggaaagccacgtgccgatgtgcctcagggtttacaggagaggactgccagtactcgacatctcatccatgctttgtgtctcgaccttgcctgaatggcggcacatgccatatgctcagccgggatacctatgagtgcacctgtcaagtcgggtttacaggtaaggagtgccaatggaccgatgcctgcctgtctcatccctgtgcaaatggaagtacctgtaccactgtggccaaccagttctcctgcaaatgcctcacaggcttcacagggcagaagtgtgagactgatgtcaatgagtgtgacattccaggacactgccagcatggtggcacctgcctcaacctgcctggttcctaccagtgccagtgccttcagggcttcacaggccagtactgtgacagcctgtatgtgccctgtgcaccctcgccttgtgtcaatggaggcacctgtcggcagactggtgacttcacttttgagtgcaactgccttccagcaacatggccaatctttcctaagctgctcagcttacaagaaaaggaatcatactgctaagaattcaaacttcagcagtcatagggagccttgggaggaccccgaatcactgatggaattgcgcagtgcatggagatggctcagcaggatgagggtaaatgcaggggcaagtccaggccatactgagagacaatgagtggcgctgatgaggacaaagataaaatcaaaagtttgtgcttcatcttcaaaaactcaagctgataacaaacttggcctgatgagaaataataagtatttttctatttacatgagaatttaatctcaaaacagaaatcagaaaaatatgaagtccagggcataaaacctaaaactattgctcatatttattctttctaaatagagcaaagtgtaaaatcttctccataagacatacattgtggttataaaaaggcaaaagtcttagtgagaatcattggtattccatagaagagtgaattaaacacagccaagggaagacccacgtctcatacttctcttgtatattccaaagttccagggaaattccaggtgatagaggttatttcccatactgttaaagcaaggtttcagacacttctgaattttggtcccagtactctagaagggcacacctctgtcctggaaaataatacaggaatgaatactcttcccgtgacccattctggtcattcttccagcatcacaaaaaccaaaaaatggaaatatggccaaatacgtgattagctgtccctcatcttcaggtttcttatctgttacttatagataatagcattaccttaaggattatgatgaagatacaatgtccaaatataaacacagttttgagcaaaatgccttgtacgaattggtcaatgaataattactaaatatgtgaatatttctggattgtatggatcctatgaataattactgaataatt

SEQ ID NO: 585 - DNA, 834 bp, Homo sapiens
  source 1..834: mol_type = genomic DNA
agaacagaggctgagctcgaagcgccgggcagtacagtgagggagagccgagggaaccagcgcggtgcctagcggaactccagggctggaatcccgagacacaagtgcatctgctagctgttagcacttggcagacggagttctcctctagggtagttctaactttgggtaataatgtttgtcagctacctgatattaacattgctccacgttcaaacagcagtgttagcaagacctgggggagagagcattggctgtgatgactacttaggctccgacaaagtcgtggacaaatgtggggtgtgtggaggagacaacacgggctgtcaggttgtgtcgggcgtgtttaagcatgccctcaccagcctgggctaccaccgcgtcgtggagattcccgagggagccacgaaaatcaacatcacggagatgtacaagagcaacaaaaaaaaaagccatttaaagccagccactagagggagtcagttcagttccgtaaaggtatgctcagtgcccgctgcctgcaagctgttggggaccccagggagggcaaggcagcctgtccccgcccccagggaactagaacatgacaagaattctccgcactgtgcctacctgtccctttaccttacctctctggcccagagttcttggagggttttttctttattttcttatgtactcatctacttattctcaaagtatttagcattcaacactctttttgctttaaaaagaatggccttacaaagggacagaaaagagaagacacgagcttggtgtattttcatcaagttatgtggcagagaaatccagatattaccaggacctgtctaa

SEQ ID NO: 586 - DNA, 571 bp, Homo sapiens
  source 1..571: mol_type = genomic DNA
gcaagagagcgggaagccgagctgggcgagaagtaggggagggcggtgctccgccgcggtggcggttgctatcgcttcgcagaacctactcaggcagccagctgagaagagttgagggaaagtgctgctgctgggtctgcagacgcgatggataacgtgcagccgaaaataaaacatcgccccttctgcttcagtgtgaaaggccacgtgaagatgctgcggctggcactaactgtgacatctatgaccttttttatcatcgcacaagcccctgaaccatatattgttatcactggatttgaagtcaccgttatcttatttttcatacttttatatgtactcagacttgatcgattaatgaagtggttattttggcctttgcttgtgtttgcacttgtgacagcagtatgctgtcttgccgacggggcccttatttaccggaagcttctgttcaatcccagcggtccttaccagaaaaagcctgtgcatgaaaaaaaagaagttttgtaattttatattactttttagtttgatactaagtattaaacatatttctgtattcttccacata

SEQ ID NO: 587 - DNA, 1080 bp, Homo sapiens
  source 1..1080: mol_type = genomic DNA
tggcatggacctgcatcttccctgaagcatctccagggctgaaaaatcactgaccatggcaccatggtctcatccatctgcacagctgcagccagtgggaggagacgccgtgagccctgccctcatggttctgctctgcctcgggaacctctccaaagccaccctctgggctgagccaggctctgtgatcagccgggggaactctgtgaccatccggtgtcaggggaccctggaggcccaggaataccgtctggttaaagagggaagcccagaaccctgggacacacagaacccactggagcccaagaacaaggccagattctccatcccatccatgacagagcaccatgcagggagataccgctgttactactacagccctgcaggctggtcagagcccagcgaccccctggagctggtggtgacaggattctacaacaaacccaccctctcagccctgcccagtcctgtggtgacctcaggagagaacgtgaccctccagtgtggctcacggctgagattcgacaggttcattctgactgaggaaggagaccacaagctctcctggaccttggactcacagctgacccccagtgggcagttccaggccctgttccctgtgggccctgtgacccccagccacaggtggatgctcagatgctatggctctcgcaggcatatcctgcaggtatggtcagaacccagtgacctcctggagattccggtctcaggagcagctgataacctcagtccgtcacaaaacaagtctgactctgggactgcctcacaccttcaggattacgcagtagagaatctcatccgcatgggcatggccggcttgatcctggtggtccttgggattctgatatttcaggattggcacagccagagaagcccccaagctgcagctggaaggtgaacagaagagagaacaatgcaccattgaatgctggagccttggaagcgaatctgatggtcctaggaggttcgggaagaccatctgaggcctatgccatctggactgtctgctggcaatttctttttttctttcttttcttttctttcttttttttttttttt

SEQ ID NO: 588 - DNA, 736 bp, Homo sapiens
  source 1..736: mol_type = genomic DNA
agggggatcctgcaagcagaaatctgtggtgggcgggcggcaggtgagcaaggagaacgtgtctgtaaaggaagcacagggaacaggtggtggctttgtaagacagttggaacccaaggaaggcaggccatcccccaggaaagcctatgttggtgagggttatgatgggagaatgagtgaactgcagcctggcaccaccacaccctggaaggtgcagttgggaagaaagtttctgaggctgtagacatggggatcggatgctggagaaaccccctgctgctgctgattgccctggtcctgtcagccaagctgggtcacttccaaaggtgggagggcttccagcagaagctcatgagcaagaagaacatgaattcaacactcaacttcttcattcaatcctacaacaatgccagcaacgacacctacttatatcgagtccagaggctaattcgaagtcagatgcagctgacgacgggagtggagtatatagtcactgtgaagattggctggaccaaatgcaagaggaatgacacgagcaattcttcctgccccctgcaaagcaagaagctgagaaagagtttaatttgcgagtctttgatatacaccatgccctggataaactatttccagctctggaacaattcctgtctggaggccgagcatgtgggcagaaacctcagatgagggctcatatgattgagttgtgcactggctgttattaaactgtaaaggatca

SEQ ID NO: 589 - DNA, 1879 bp, Homo sapiens
  source 1..1879: mol_type = genomic DNA
atgcaacaggacggacttggagtagggacaaggaacggaagtgggaaggggaggagcgtgcacccctcctggccttggtgcgcgccgcgccccctaaggtactttggaagggacgcgcgggccagacgcgcccagacggccgcgatggcgctggccatccaggtgaccgtgtccaacccctaccacgtggtgatcctcttccagcctgtgaccctgccctgtacctaccagatgacctcgacccccacgcaacccatcgtcatctggaagtacaagtctttctgccgggaccgcatcgccgatgccttctccccggccagcgtcgacaaccagctcaatgcccagctggcagccgggaacccaggctacaacccctacgttgagtgccaggacagcgtgcgcaccgtcagggtcgtggccaccaagcagggcaacgctgtgaccctgggagattactaccagggccggaggattaccatcaccggaaatgctgacctgacctttgaccagacggcgtggggggacagtggtgtgtattactgctccgtggtctcagcccaggacctccaggggaacaatgaggcctacgcagagctcatcgtccttgggaggacctcaggggtggctgagctcttacctggttttcaggcggggcccatagaagactggctcttcgtggttgtggtatgcctggctgccttcctcatcttcctcctcctgggcatctgctggtgccagtgctgcccgcacacttgctgctgctacgtcaggtgcccctgctgcccagacaagtgctgctgccccgaggccctgtatgccgccggcaaagcagccacctcaggtgttcccagcatttatgcccccagcacctatgcccacctgtctcccgccaagaccccacccccaccagctatgattcccatgggccctgcctacaacgggtaccctggaggataccctggagacgttgacaggagtagctcagtccgcagtggctacaggattcaggccagccagcaggacgactccatgcgggtcctgtactacatggagaaggagctggccaacttcgacccttctcgacctggcccccccagtggccgtgtggagcgggccatgagtgaagtcacctccctccacgaggacgactggcgatctcggccttcccggggccctgccctcaccccgatccgggatgaggagtggggtggccactccccccggagtcccaggggatgggaccaggagcccgccagggagcaggcaggcgggggctggcgggccaggcggccccgggcccgctccgtggacgccctggacgacctcaccccgccgagcaccgccgagtcagggagcaggtctcccacgagtaatggtgggagaagccgggcctacatgcccccgcggagccgcagccgggacgacctctatgaccaagacgactcgagggacttcccacgctcccgggacccccactacgacgacttcaggtctcgggagcgccctcctgccgaccccaggtcccaccaccaccgtacccgggaccctcgggacaacggctccaggtccggggacctcccctatgatgggcggctactggaggaggctgtgaggaagaaggggtcggaggagaggaggagaccccacaaggaggaggaggaagaggcctactacccgcccgcgccgcccccgtactcggagaccgactcgcaggcgtcccgagagcgcaggctcaagaagaacttggccctgagtcgggaaagtttagtcgtctgatctgacgttttctacgtagcttttgtatttttttttttaatttgaaggaacactgatgaagccctgccatacccctcccgagtctaataaaacgtataatcac

SEQ ID NO: 590 - DNA, 2089 bp, Homo sapiens
  source 1..2089: mol_type = genomic DNA
tggagcttagacgccgagctcgccgccaaaccatgaaccgatgcccccgcaggtgccggagcccgctggggcaggcagcgcgatccctctaccagctggtgactgggtcgctgtccccagacagcgtggacgatgaatttgaattgtccaccgtgtgtcaccggcctgagggtctggagcagctgcaggagcaaaccaaattcacgcgcaaggagttgcaggtcctgtaccggggcttcaagaacgaatgtcccagcggaattgtcaatgaggagaacttcaagcagatttactcccagttctttcctcaaggagactccagcacctatgccacttttctcttcaatgcctttgacaccaaccatgatggctcggtcagttttgaggactttgtggctggtttgtccgtgattcttcggggaactgtagatgacaggcttaattgggccttcaacctgtatgaccttaacaaggacggctgcatcaccaaggaggaaatgcttgacatcatgaagtccatctatgacatgatgggcaagtacacgtaccctgcactccgggaggaggccccaagggaacacgtggagagcttcttccagaagatggacagaaacaaggatggtgtggtgaccattgaggaattcattgagtcttgtcaaaaggatgagaacatcatgaggtccatgcagctctttgacaatgtcatctagcccccaggagagggggtcagtgtttcctggggggaccatgctctaaccctagtccaggcggacctcacccttctcttcccaggtctatcctcatcctacgcctccctgggggctggagggatccaagagcttggggattcagtagtccagatctctggagctgaaggggccagagagtgggcagagtgcatctcggggggtgttcccaactcccaccagctctcacccccttcctgcctgacacccagtgttgagagtgcccctcctgtaggaattgagcggttccccacctcctacccctactctagaaacacactagacagatgtctcctgctatggtgcttcccccatccctgacctcataaacatttcccctaagactcccctctcagagagaatgctccattcttggcactggctggcttctcagaccagccattgagagccctgtgggagggggacaagaatgtatagggagaaatcttgggcctgagtcaatggataggtcctaggaggtggctggggttgagaatagaagggcctggacagattatgattgctcaggcataccaggttatagctccaagttccacaggtctgctaccacaggccatcaaaatataagtttccaggctttgcagaagaccttgtctccttagaaatgccccagaaattttccacaccctcctcggtatccatggagagcctggggccagatatctggctcatctctggcattgcttcctctccttccttcctgcatgtgttggtggtggttgtggtgggggaatgtggatgggggatgtcctggctgatgcctgccaaaatttcatcccaccctccttgcttatcgtccctgttttgagggctatgacttgagtttttgtttcccatgttctctatagacttgggaccttcctgaacttggggcctatcactccccacagtggatgccttagaagggagagggaaggagggaggcaggcatagcatctgaacccagtgtgggggcattcactagaatcttcaatcaacctgggctctccccaccccaccccagataacctcctcagttccctagggtctcttcttgcttgactcaatctacccagagatgccccttagcacacctagagggcagggaccataggacccaggttccaaccccattgtcagcaccccagccatgcggccaccccttagcacacctgctcgtcccatttagcttaccctcccagttggccagaatctgaggggagagcccccagagagcccccttccccatcagaagactgttgactgctttgcattttgggctcttctatatattttgtaaagtaagaaatataccagatctaataaaacacaatggctatgca

SEQ ID NO: 591 - DNA, 2036 bp, Homo sapiens
  source 1..2036: mol_type = genomic DNA
agaactcagccagtttcttgcttccgtgcccctggttctcctccccatcgagcccacccctcctttcccaccttcagtcacccctagtgaactgccccagcgatctctgctgtgcttgaccccgagggtcttccaccctcgccctgaccctggacactgcccagcttggccccccatcctgctcctggcacaatgccctctagccagccaaccttccctcccccaaccctggggccgccccagggttcctgcgcactgcctgttcctcctgggtgtcactggcagccctgtccttcctagagggactggaacctaattctcctgaggctgagggagggtggagggtctcaaggcaacgctggccccacgacggagtgccaggagcactaacagtacccttagcttgctttcctcctccctcctttttattttcaagttcctttttatttctccttgcgtaacaaccttcttcccttctgcaccactgcccgtacccttacccgccccgccacctccttgctaccccactcttgaaaccacagctgttggcagggtccccagctcatgccagcctcatctcctttcttgctagcccccaaagggcctccaggcaacatggggggcccagtcagagagccggcactctcagttgccctctggttgagttggggggcagctctgggggccgtggcttgtgccatggctctgctgacccaacaaacagagctgcagagcctcaggagagaggtgagccggctgcaggggacaggaggcccctcccagaatggggaagggtatccctggcagagtctcccggagcagagttccgatgccctggaagcctgggagaatggggagagatcccggaaaaggagagcagtgctcacccaaaaacagaagaatgactccgatgtgacagaggtgatgtggcaaccagctcttaggcgtgggagaggcctacaggcccaaggatatggtgtccgaatccaggatgctggagtttatctgctgtatagccaggtcctgtttcaagacgtgactttcaccatgggtcaggtggtgtctcgagaaggccaaggaaggcaggagactctattccgatgtataagaagtatgccctcccacccggaccgggcctacaacagctgctatagcgcaggtgtcttccatttacaccaaggggatattctgagtgtcataattccccgggcaagggcgaaacttaacctctctccacatggaaccttcctggggtttgtgaaactgtgattgtgttataaaaagtggctcccagcttggaagaccagggtgggtacatactggagacagccaagagctgagtatataaaggagagggaatgtgcaggaacagaggcgtcttcctgggtttggctccccgttcctcacttttcccttttcattcccaccccctagactttgattttacggatatcttgcttctgttccccatggagctccgaattcttgcgtgtgtgtagatgaggggcgggggacgggcgccaggcattgtccagacctggtcggggcccactggaagcatccagaacagcaccaccatctagcggccgctcgagggaagcacccgccggttggccgaagtccacgaagccgccctctgctagggaaaacccctggttctccatgccacacctctctccaggtgccctctgcctcttcaccccacaagaagccttatcctacgtccttctctccatctatcggaccccagtttccatcactatctccagagatgtagctattatgcgcccgtctacagggggtgcccgacgatgacggtgccttcgcagtcaaattactcttcgggtcccaaggtttggctttcacgcgctccattgccccggcgtggcaggccattccaagcccttccgggctggaactggtgtcggaggagcctcgggtgtatcgtacgccctggtgttggtgttgcctcactcctctgagctcttctttctgatcaagccctgcttaaagttaaataaaatagaatgaatgat

SEQ ID NO: 592 - DNA, 3186 bp, Homo sapiens
  source 1..3186: mol_type = genomic DNA
actagagtagaagtgattgaatgtgaagtgtcaggagattgctcgctcgtccttcgttaaacccctggtccggctgtgtgctgtggatgcgggtgtgtgttgaggggacctgcgtctgccggggccgcaccccctcccgcaggaccttggctggccgcgcgtttcctgcctgtttcctgtccagcagctggcgagctggggaccggcaggaaaggatgcgctgcccagaaggggcgggaaccgaccacgcccggtcccgtgtgccccccgccctcccggcgcccgccctccccacgccgtcgggggcgggccccgcggggctgtgggagccgaacgccgcggggtcagggcgtgcagtctgggacgcgggatgcttggcgctctacctcgccgcccctgagccttcccgtccgcctcgccacgcgcccggacggcctggggttgctgcccgtcagtctcgaaaggtgtttttggggaaaaaaatcacaatctggacgtgagaaaggacatgaggagactaaagacctgggattttgtcaatcagaatgaaaccaatgttgaaagacttttcaaatctattgttggtggtactctgtgactatgttcttggagaagctgaatatcttctcttgagagagccaggccatgtagcactaagcaacgacacagtgtatgtggatttccagtattttgatggtgctaatgggacactgaggaatgtatctgtcctgctgttggaggccaacaccaatcagactgtaactaccaagtacctcctgaccaaccagtcccagggaacactaaagtttgagtgcttctatttcaaggaggctggtgactactggttcacaatgactccagaagcaacagacaacagcactccattcccctggtgggagaaaagtgcctttctgaaggtggaatggcctgtctttcacgttgacttgaataggagtgccaaggcagcagaaggcaccttccaagtgggcctatttaccagtcaaccactgtgcccgtttcctgtggacaagcccaacatcgtagtggatgtcatcttcaccaacagtcttcctgaggcaagaagaaattcaagacagccgctggaaataagaaccagcaaaaggacagaacttgctcaaggtcagtgggttgagtttggctgtgcacccttggggccagaagcctatgtcaccgtggtgctgaagctgcttgggcgagactcagtcattacctccacaggacccattgacctggcccagaaatttggatacaaactggtgatggtgccagaactcacatgtgagtccggggtagaggtgacagtgctgcctccaccatgcaccttcgtccaaggagtggtcactgtcttcaaggaggcccccagataccctgggaagaggaccattcacttggctgaaaacagcctgcccctgggagagaggaggacaatttttaactgtactttgtttgacatggggaagaataagtactgctttgactttggcatttcaagcagaagccatttttctgcaaaggaggagtgcatgctaattcagagaaatacagctttccagccatccagcccatctcctcttcagccccagggtccagtgaagtccaacaacatcgtgactgtcactggtatatccttgtgcttgttcatcatcattgccactgtgctcatcacgctgtggaggaggttcggccggccagccaagtgcagcacacctgctcgacacaactccatccactcccccagcttccggaagaactcggacgaggagaatatctgcgagctgagcgagcagcgcgggagcttctcggatgggggagacgggcccacggggagtccaggggacacaggcatccctctgacctacaggcggagcgggccggtacctcccgaggatgatgcctctggcagcgagagcttccagtccaacgcccagaagataatcccacctctgttcagctaccgccttgcccagcagcagttaaaggagatgaaaaagaaaggtctgacggaaactaccaaagtgtatcacgtgtctcagagtcccctgacagacactgccattgatgcggcccccagcgctcccttagatttggaaagcccggaagaagctgcagcaaacaagttccggatcaaatccccatttccggagcagcccgcggtcagtgccggggaaaggcctccctccaggctggatctaaatgtgactcaggccagttgtgccataagccccagccagactctgatccgcaagtcacaggcaaggcacgtgggcagcagagggggcccgtccgaaaggagccatgccaggaacgcccatttcaggaggacagcgagtttccatgaagccaggcaggcccggccgttccgagagaggagcatgtccactctgactccacggcaggcccctgcctacagctctaggacgcggacctgcgagcaggcagaggacagatttaggcctcagagtcgaggtgcccacctgtttcctgaaaaactggagcatttccaagaggcaagtggaacccgtggtccattaaaccctctccctaaatcctacactttggggcagcccttgaggaaaccagaccttggggatcaccaggcaggattagtggccggaattgagagaacagagccccacagagctcgtcggggaccgtcccccagtcacaagagtgtctcaaggaagcagtcttctcccatatcccccaaagataactaccagagggtcagttctctgagcccttctcagtgtagaaaagacaagtgtcaaagcttccccactcaccctgagtttgccttctatgacaatacgtcgtttggcctcactgaggctgagcagaggatgctggacctcccaggatattttgggtcaaatgaagaggatgaaaccacaagtacacttagcgtggagaagctggtgatctagactgagaatcagcctgagctttacacagctggggtctgctactcgcgttttgtagacttttgtgtaactatttgtaccgtaggacagaatgtgaggaggaagtaacacacagaggaggatgtgtgtgtatgcatgtgtttgaattcacaaggaagaaattatttatcttgagctttttcctttgttattcaatttctattgatttattagtaataacaatgataataaaatgtaaatgagc

SEQ ID NO: 593 - DNA, 1804 bp, Homo sapiens
  source 1..1804: mol_type = genomic DNA
gcgccggctccgcgcctcgcgcccagtccgcgggccgcgccgccgctcccgccgctcccgccgctcccgccgctcccgcagccgccccgccgcccgcccggagccccgcgtccctaggcctggctcccgcctgcccgagacccgcccagcctgccccgctcagccgccagagaagatgcggctgctcccggaatggttcctcttgctctttggcccgtggctccttaggaaggccgtcagtgcccagataccagagtccggaaggccgcagtacctggggctgcgccccgccgcggccggagcgggtgcccccggccagcagctcccagagccaaggtcttcggacggcctaggcgtgggccgcgcctggagctgggcctggccgaccaaccacacgggggcgctggcccgggcaggggcagccggggcgttgcccgcgcagcgcaccaagaggaagccgtccatcaaggcggcgcgcgccaaaaagatcttcggctggggggacttctactttcgggtgcataccctcaagttttcgctgctggtgaccggcaagatcgtggaccatgtgaacggtaccttcagtgtgtatttccgccacaactcgtccagcctgggcaacctcagtgtcagcatcgtgccgccctccaagcgtgtcgagttcggaggagtctggctgcccgggcctgtcccccaccctctgcagtctacgctcgccctggagggggtgcttcctgggctggggcccccgctggggatggcagcagcagcggcggggcccgggcttgggggctccctcgggggcgcactggcggggccgcttgggggcgcgttgggagtgcctggggccaaagagtcacgcgctttcaattgccacgtggagtatgagaagacaaaccgcgcgcgcaagcaccgaccgtgcctgtacgacccgtcgcaggtgtgcttcaccgagcacacgcagagccaggccgcctggctctgtgccaagcccttcaaagtcatctgtatcttcgtctctttcctcagctttgactacaaactggtgcagaaggtgtgcccagactataacttccagagtgagcacccctacttcggatagcgcccctccccagccagtcctgagcctcccgccaaatcccagcctcactaggtgggacccccttcccagtgttctgccgctcctgtggccatgtcgcccactccttccactctgggggcggaggggaatggcttctcgggaccctcagctagcgtgggtgcccttttccttatgcggagtgcccgcaaggctggggtagccccctccagtacaccccaaagtgaaagggataagagtgcagccccagaataggcggggcttggaggcggtcccaatgtcccctgggtccacagtgggtccccttttcacccttggcgctaggctgcgcactccctttccccgcagctttaataactcctggcctggcaccctcaccccaccctgactttcccatcccccagcgcttgtcctgcttcaccctaccccgcctaagactgtaaaggcctaaaaacctcggcctgtcctcccaccattctgcctgccatatgcctgtccccttttcctccaaaccctattagggtaccggaagcagaacccctgggctgaggccctggccctgcccccggcccctgcccctgcccgcccccctccagtccaggcagtcgagctccacctgccctctcctgctgcttcctctcggtgatattttttctacgccaaaacagacgggaaagggaacaaaataaagtgaaatccaataca

SEQ ID NO: 594 - DNA, 888 bp, Homo sapiens
  source 1..888: mol_type = genomic DNA
ggagacctaaacacagtcaccatgaagctgggctgtgtcctcatggcctgggccctctacctttcccttggtgtgctctgggtggcccagatgctactggctgccagttttgagacgctgcagtgtgagggacctgtctgcactgaggagagcagctgccacacggaggatgacttgactgatgcaagggaagctggcttccaggtcaaggcctacactttcagtgaacccttccacctgattgtgtcctatgactggctgatcctccaaggtccagccaagccagtttttgaaggggacctgctggttctgcgctgccaggcctggcaagactggccactgactcaggtgaccttctaccgagatggctcagctctgggtccccccgggcctaacagggaattctccatcaccgtggtacaaaaggcagacagcgggcactaccactgcagtggcatcttccagagccctggtcctgggatcccagaaacagcatctgttgtggctatcacagtccaaggtgcttccagctctgctgcacctcccacattgaatccagctcctcagaaatcagctgctccaggaactgctcctgaggaggcccctgggcctctgcctccgccgccaaccccatcttctgaggatccaggcttttcttctcctctggggatgccagatcctcatctgtatcaccagatgggccttcttctcaaacacatgcaggatgtgagagtcctcctcggtcacctgctcatggagttgagggaattatctggccaccggaagcctgggaccacaaaggctactgctgaatagaagtaaacagttcatccatgatctcacttaaccaccccaataaatctgattctttattttctcttcctgtcc

SEQ ID NO: 595 - DNA, 1362 bp, Homo sapiens
  source 1..1362: mol_type = genomic DNA
atgctgcggatcctgtgcctggcactctgcagcctgctgactggcacgcgagctgaccctggggcactgctgcggttgggcatggacatcatgaaccaggtccagagcgccatggatgagagtcatatcctggagaagatggcagccgaggcaggcaagaaacagccagggatgaaacctatcaagggcatcaccaatttgaaggtgaaggatgtccagctgcccgtcatcacactgaactttgtacctggagtgggcatcttccaatgtgtgtccacaggcatgaccgtcactggcaagagcttcatgggagggaacatggagatcatcgtggccctgaacatcacagccaccaaccggcttctgcgggatgaggagacaggcctccccgtgttcaagagtgagggctgtgaggtcatcctggtcaatgtgaagactaacctgcctagcaacatgctccccaagatggtcaacaagttcctggacagcaccctgcacaaagtcctccctgggctgatgtgtcccgccatcgatgcagtcctggtgtatgtgaacaggaagtggaccaacctcagtgaccccatgcctgtgggccagatgggcaccgtcaaatatgttctgatgtccgcaccagccaccacagccagctacatccaactggacttcagtcctgtggtgcagcagcaaaagggcaaaaccatcaagcttgctgatgccggggaggccctcacgttccctgagggttatgccaaaggctcgtcgcagctgctgctcccagccaccttcctctctgcagagcttgcccttctgcagaagtcctttcatgtgaatatccaggatacaatgattggtgagctgcccccacaaaccaccaagaccctggctcgcttcattcctgaagtggctgtagcttatcccaagtcaaagcccttgacgacccagatcaagataaagaagcctcccaaggtcactatgaagacaggcaagagcctgctgcacctccacagcaccctggagatgttcgcagctcggtggcggagcaaggctccaatgtccctctttctcctagaagtgcacttcaatctgaaggtccagtactcagtgcatgagaaccagctgcagatggccacttctttggacagattactgagcttgtcccggaagtcctcatcgattggcaacttcaatgagagggaattaactggcttcatcaccagctatctcgaagaagcctacatcccagttgtcaatgatgtgcttcaagtggggctcccactcccggactttctggccatgaattacaacctggctgagctggacatagtagagaatgccctgatgctggacttgaagctgggctga

SEQ ID NO: 596 - DNA, 1871 bp, Homo sapiens
  source 1..1871: mol_type = genomic DNA
ccgtcatccccctgcagccacccttcccagagtcctttgcccaggccaccccaggcttcttggcagccctgccgggccacttgtcttcatgtctgccagggggaggtgggaaggaggtgggaggagggcgtgcagaggcagtctgggcttggccagagctcagggtgctgagcgtgtgaccagcagtgagcagaggccggccatggccagcctggggctgctgctcctgctcttactgacagcactgccaccgctgtggtcctcctcactgcctgggctggacactgctgaaagtaaagccaccattgcagacctgatcctgtctgcgctggagagagccaccgtcttcctagaacagaggctgcctgaaatcaacctggatggcatggtgggggtccgagtgctggaagagcagctaaaaagtgtccgggagaagtgggcccaggagcccctgctgcagccgctgagcctgcgcgtggggatgctgggggagaagctggaggctgccatccagagatccctccactacctcaagctgagtgatcccaagtacctaagagagttccagctgaccctccagcccgggttttggaagctcccacatgcctggatccacactgatgcctccttggtgtaccccacgttcgggccccaggactcattctcagaggagagaagtgacgtgtgcctggtgcagctgctgggaaccgggacggacagcagcgagccctgcggcctctcagacctctgcaggagcctcatgaccaagcccggctgctcaggctactgcctgtcccaccaactgctcttcttcctctgggccagaatgagggggtgcacacagggaccactccaacagagccaggactatatcaacctcttctgcgccaacatgatggacttgaaccgcagagctgaggccatcggatacgcctaccctacccgggacatcttcatggaaaacatcatgttctgtggaatgggcggcttctccgacttctacaagctccggtggctggaggccattctcagctggcagaaacagcaggaaggatgcttcggggagcctgatgctgaagatgaagaattatctaaagctattcaatatcagcagcatttttcgaggagagtgaagaggcgagaaaaacaatttccagattctcgctctgttgctcaggctggagtacagtggcgcaatctcggctcactgcaacctttgcctcctgggttcaagcaattctcttgcctcatcctcccgagtagctgggactacaggagcgtgccaccatacctggctaatttttatatttttttagtagagacagggtttcatcatgttgctcatgctggtctcgaactcctgatctcaagagatccgcccacctcaggctcccaaagtgtgggattataggtgtgagccaccgcgtctggctgaaaagcactttcaatgagactgtgttgaataaagggccaaggttcttgccacccagcactcatgggggctctctcccctagatggctgctcctcccacaacacagccacagcagtggcagccctgggtggcttcctatacatcctggcagaataccccccagcaaacagagagccacacccatccacaccgccaccaccaagcagccgctgagacggacggttccatgccagctgcctggaggaggaacagacccctttagtcctcatcccttagatcctggagggcacggatcacatcctgggaagaaggcatctggaggataagcaaagccaccccgacacccaatcttggaagccctgagtaggcaaggccagggtaggtgggggccgggagggacccaggtgtgaacggatgaataaagttcaactgcaactg

SEQ ID NO: 597 - DNA, 1189 bp, Homo sapiens
  source 1..1189: mol_type = genomic DNA
agaaactctgtggggaagataagtcctgagcctagagctgccatttccacagacaactgaactaccttcaaacagatgtgtttttaggggcagcagatagaaggagctgaatccaggagtttccttccctgaaatgccccaacagaggcacagtcctccaccttccctggaacagagggctttcatctgtctctctgaagccatctccctcccctgtttatgcccagagctgctttccaatcccatggagtgcctccgtatctaaccatagccactgagtctaccaggtgttcctgagaagacaactaagccaaccgctccacactctgctgattttcttctacatctcacagggggaagagctggatcaccatgaaatatgtcttctatttgggtgtcctcgctgggacatttttctttgctgactcatctgttcagaaagaagaccctgctccctatttggtgtacctcaagtctcacttcaacccctgtgtgggcgtcctcatcaaacccagctgggtgctggccccagctcactgctatttaccaaatctgaaagtgatgctgggaaatttcaagagcagagtcagagacggtactgaacagacaattaaccccattcagatcgtccgctactggaactacagtcatagcgccccacaggatgacctcatgctcatcaagctggctaagcctgccatgctcaatcccaaagtccagccccttaccctcgccaccaccaatgtcaggccaggcactgtctgtctactctcaggtttggactggagccaagaaaacagtggccgacaccctgacttgcggcagaacctggaggcccccgtgatgtctgatcgagaatgccaaaaaacagaacaaggaaaaagccacaggaattccttatgtgtgaaatttgtgaaagtattcagccgaatttttggggaggtggccgttgctactgtcatctgcaaagacaagctccagggaatcgaggtggggcacttcatgggaggggacgtcggcatctacaccaatgtttacaaatatgtatcctggattgagaacactgctaaggacaagtgagaccctacttctccctctgcattccactggctctgccatggactatacaagcagataattttccctctattcaaaataaaatctccaaatgaaaatttgggaatgtagc

SEQ ID NO: 598 - DNA, 1639 bp, Homo sapiens
  source 1..1639: mol_type = genomic DNA
ggccagctggctatcagacaatgacatgctttgacaggcccctgagctctgtgagtaaattcttgaacagctgagagtgctaccattttgtcatagccctaagggtgcagatgatgctgaaagcgtgttggccaaatctgaatgatgaaagccaattacaaactagaaaatgaaaacagaccccagatgcaaggagatgagacagttaaatttacttcctcttttctaatctgagaggtttcatgttgaagaaaatcagtgttggggttgcaggagacctaaacacagtcaccatgaagctgggctgtgtcctcatggcctgggccctctacctttcccttggtgtgctctgggtggcccagatgctactgggtgcttccagctctgctgcacctcccacattgaatccagctcctcagaaatcagctgctccaggaactgctcctgaggaggcccctgggcctctgcctccgccgccaaccccatcttctgaggatccaggcttttcttctcctctggggatgccagatcctcatctgtatcaccagatgggccttcttctcaaacacatgcaggatgtgagagtcctcctcggtcacctgctcatggagttgagggaattatctggccaccggaagcctgggaccacaaaggctactgctgaatagaagtaaacagttcatccatgatctcacttaaccaccccaataaatctgattctttattttctcttcctgtcctgcacatatgcataagtacttttacaagttgtcccagtgttttgttagaataatgtagttaggtgagtgtaaataaatttatataaagtgagaattagagtttagctataattgtgtattctctcttaacacaacagaattctgctgtctagatcaggaatttctatctgttatatcgaccagaatgttgtgatttaaagagaactaatggaagtggattgaatacagcagtctcaactgggggcaattttgccccccagaggacattgggcaatgtttggagacattttggtcattatacttggggggttgggggatggtgggatgtgtgtgctactggcatccagtaaatagaagccaggggtgccgctaaacatcctataatgcacagggcagtaccccacaacgaaaaataatctggcccaaaatgtcagttgtactgagtttgagaaaccccagcctaatgaaaccctaggtgttgggctctggaatgggactttgtcccttctaattattatctctttccagcctcattcagctattcttactgacataccagtctttagctggtgctatggtctgttctttagttctagtttgtatcccctcaaaagccattatgttgaaatcctaatccccaaggtgatggcattaagaagtgggcctttgggaagtgattagatcaggagtgcagagccctcatgattaggattagtgcccttatttaaaaaggccccagagagctaactcacccttccaccatatgaggacgtggcaagaagatgacatgtatgagaaccaaaaaacagctgtcgccaaacaccgactctgtcgttgccttgatcttgaacttccagcctccagaactatgagaaataaaattctgttgtttgtaagct

SEQ ID NO: 599 - DNA, 3222 bp, Homo sapiens
  source 1..3222: mol_type = genomic DNA
agcagccagctccccagcaccgcacggcggggacgcgagcgcgcccccgacggcagcccggacgccgagcacgggtcacctgcggcgccggcccgggcgccgaccgaggttcaacgcacggcccggggacccccaggcggggccaacgccgccgtcgcccccggcctcgcggggagcaggaagagccaacatgctggccccgcgcggagccgccgtcctcctgctgcacctggtcctgcagcggtggctagcggcaggcgcccaggccaccccccaggtctttgaccttctcccatcttccagtcagaggctaaacccaggcgctctgctgccagtcctgacagaccccgccctgaatgatctctatgtgatttccaccttcaagctgcagactaaaagttcagccaccatcttcggtctttactcttcaactgacaacagtaaatattttgaatttactgtgatgggacgcttaaacaaagccatcctccgttacctgaagaacgatgggaaggtgcatttggtggttttcaacaacctgcagctggcagacggaaggcggcacaggatcctcctgaggctgagcaatttgcagcgaggggccggctccctagagctctacctggactgcatccaggtggattccgttcacaatctccccagggcctttgctggcccctcccagaaacctgagaccattgaattgaggactttccagaggaagccacaggacttcttggaagagctgaagctggtggtgagaggctcactgttccaggtggccagcctgcaagactgcttcctgcagcagagtgagccactggctgccacaggcacaggggactttaaccggcagttcttgggtcaaatgacacaattaaaccaactcctgggagaggtgaaggaccttctgagacagcaggttaaggaaacatcatttttgcgaaacaccatagctgaatgccaggcttgcggtcctctcaagtttcagtctccgaccccaagcacggtggtgcccccggctccccctgcaccgccaacacgcccacctcgtcggtgtgactccaacccatgtttccgaggtgtccaatgtaccgacagtagagatggcttccagtgtgggccctgccccgagggctacacaggaaacgggatcacctgtattgatgttgatgagtgcaaataccatccctgctacccgggcgtgcactgcataaatttgtctcctggcttcagatgtgacgcctgcccagtgggcttcacagggcccatggtgcagggtgttgggatcagttttgccaagtcaaacaagcaggtctgcactgacattgatgagtgtcgaaatggagcgtgcgttcccaactcgatctgcgttaatactttgggatcttaccgctgtgggccttgtaagccggggtatactggtgatcagataaggggatgcaaagcggaaagaaactgcagaaacccagagctgaacccttgcagtgtgaatgcccagtgcattgaagagaggcagggggatgtgacatgtgtgtgtggagtcggttgggctggagatggctatatctgtggaaaggatgtggacatcgacagttaccccgacgaagaactgccatgctctgccaggaactgtaaaaaggacaactgcaaatatgtgccaaattctggccaagaagatgcagacagagatggcattggcgacgcttgtgacgaggatgctgacggagatgggatcctgaatgagcaggataactgtgtcctgattcataatgtggaccaaaggaacagcgataaagatatctttggggatgcctgtgataactgcctgagtgtcttaaataacgaccagaaagacaccgatggggatggaagaggagatgcctgtgatgatgacatggatggagatggaataaaaaacattctggacaactgcccaaaatttcccaatcgtgaccaacgggacaaggatggtgatggtgtgggggatgcctgtgacagttgtcctgatgtcagcaaccctaaccagtctgatgtggataatgatctggttggggactcctgtgacaccaatcaggacagtgatggagatgggcaccaggacagcacagacaactgccccaccgtcattaacagtgcccagctggacaccgataaggatggaattggtgacgagtgtgatgatgatgatgacaatgatggtatcccagacctggtgccccctggaccagacaactgccggctggtccccaacccagcccaggaggatagcaacagcgacggagtgggagacatctgtgagtctgactttgaccaggaccaggtcatcgatcggatcgacgtctgcccagagaacgcagaggtcaccctgaccgacttcagggcttaccagaccgtggtcctggatcctgaaggggatgcccagatcgatcccaactgggtggtcctgaaccagggcatggagattgtacagaccatgaacagtgatcctggcctggcagtggggtacacagcttttaatggagttgacttcgaagggaccttccatgtgaatacccagacagatgatgactatgcaggctttatctttggctaccaagatagctccagcttctacgtggtcatgtggaagcagacggagcagacatattggcaagccaccccattccgagcagttgcagaacctggcattcagctcaaggctgtgaagtctaagacaggtccaggggagcatctccggaactccctgtggcacacgggggacaccagtgaccaggtcaggctgctgtggaaggactccaggaatgtgggctggaaggacaaggtgtcctaccgctggttcctacagcacaggccccaggtgggctacatcagggtacgattttatgaaggctctgagttggtggctgactctggcgtcaccatagacaccacaatgcgtggaggccgacttggcgttttctgcttctctcaagaaaacatcatctggtccaacctcaagtatcgctgcaatgacaccatccctgaggacttccaagagtttcaaacccagaatttcgaccgcttcgataattaaaccaaggaagcaatctgtaactgcttttcggaacactaaaaccatatatattttaacttcaattttctttagcttttaccaacccaaatatatcaaaacgttttatgtgaatgtggcaataaaggagaagagatcatttttaaaaa

SEQ ID NO: 600 - DNA, 508 bp, Homo sapiens
  source 1..508: mol_type = genomic DNA
gcaagagagcgggaagccgagctgggcgagaagtaggggagggcggtgctccgccgcggtggcggttgctatcgcttcgcagaacctactcaggcagccagctgagaagagttgagggaaagtgctgctgctgggtctgcagacgcgatggataacgtgcagccgaaaataaaacatcgccccttctgcttcagtgtgaaaggccacgtgaagatgctgcggctggatattatcaactcactggtaacaacagtattcatgctcatcgtatctgtgttggcactgataccagaaaccacaacattgacagttggtggaggggtgtttgcacttgtgacagcagtatgctgtcttgccgacggggcccttatttaccggaagcttctgttcaatcccagcggtccttaccagaaaaagcctgtgcatgaaaaaaaagaagttttgtaattttatattactttttagtttgatactaagtattaaacatatttctgtattcttccacata

SEQ ID NO: 601 - DNA, 538 bp, Homo sapiens
  source 1..538: mol_type = genomic DNA
gggaccggggccatgtctccacacctcactgctctcctgggcctagtgctctgcctggcccagaccatccacacgcaggagggggcccttcccagaccctccatctcggctgagccaggcactgtgatctccccggggagccatgtgactttcatgtgccggggcccggttggggttcaaacattccgcctggagagggaggatagagccaagtacaaagatagttataatgtgtttcgacttggtccatctgagtcagaggccagattccacattgactcagtaagtgaaggaaatgccgggctttatcgctgcctctattataagccccctggatggtctgagcacagtgacttcctggagctgctggtgaaagggactgtgccaggcactgaagcctccggatttgatgcaccatgaatgaggagaaatggcctcccgtcttgtgaacttcaatggggagaaataattagaatgagcaatagaaatgcacagatgcctatacatacatatacaaataaaaagatacgattcgcaa

SEQ ID NO: 602 - DNA, 564 bp, Homo sapiens
  source 1..564: mol_type = genomic DNA
atgctgccttgcctcgccctgcttctcctgatggagctgtccgtgtgcactgtggcaggtgatggtggagaggaacagacactcagcactgaagcagagacctgggaaggcgctggccccagcattcagctccagctgcaggaggtgaagacgggcaaggcaagccagttctttgggctgatggggaagcgagtgggaggcagagaggatgaggcccaaggttcagagtaaaagcccccaccacagacttcccagaggacacggtgccgcttcttcctacctggatgtcacagctgacaagccggcaggccaactctcttctctgtgtctcctgtcctcatcgctggcacttcacacaaggcccacactgaacccactgggcttcttcctggactctcagtgtcaagcagcagtcctgcataaatgcacagcttcgccgtagcaagctgcactgactctgccctccctcacactcagagttggcatctcactgcacagcagtgaggagactcgcacactctgtatcctgtgcctagcacacagtaggcactcaataaatgagtg

SEQ ID NO: 603 - DNA, 684 bp, Homo sapiens
  source 1..684: mol_type = genomic DNA
atgcggggccagggccgcaaggagagtttgtccgattcccgagacctggacggctcctacgaccagctcacggacagcgtggacgatgaatttgaattgtccaccgtgtgtcaccggcctgagggtctggagcagctgcaggagcaaaccaaattcacgcgcaaggagttgcaggtcctgtaccggggcttcaagaaccctggtgccctctccttccaggaatgtcccagcggaattgtcaatgaggagaacttcaagcagatttactcccagttctttcctcaaggagactccagcacctatgccacttttctcttcaatgcctttgacaccaaccatgatggctcggtcagttttgaggactttgtggctggtttgtccgtgattcttcggggaactgtagatgacaggcttaattgggccttcaacctgtatgaccttaacaaggacggctgcatcaccaaggaggaaatgcttgacatcatgaagtccatctatgacatgatgggcaagtacacgtaccctgcactccgggaggaggccccaagggaacacgtggagagcttcttccagaagatggacagaaacaaggatggtgtggtgaccattgaggaattcattgagtcttgtcaaaaggatgagaacatcatgaggtccatgcagctctttgacaatgtcatctag

SEQ ID NO: 604 - DNA, 1485 bp, Homo sapiens
  source 1..1485: mol_type = genomic DNA
gcacttggctgtggtgtgtgctgcagggagcgggaggacatgggaggacgtgctccaggaggcctctccagcacctgccaaccggggaggagggaaccaagacagggagatgggagccgaggtctgaggacaagcagaagcttccccaccctccctcttagagctgcagagctggagaggcccctagagtccacccaacaacaacagtggcaatcatcatcaccatcatcatcatcatcaccatcatcatcatcatcatgatgtcagccacagggcccggcaggaagatgggctcccgtggacagggactcttgctggcgtactgcctgctccttgcctttgcctctggcctggtcctgagtcgtgtgccccatgtccagggggaacagcaggagtgggaggggactgaggagctgccgtcgcctccggaccatgccgagagggctgaagaacaacatgaaaaatacaggcccagtcaggaccaggggctccctgcttcccggtgcttgcgctgctgtgaccccggtacctccatgtacccggcgaccgccgtgccccagatcaacatcactatcttgaaaggggagaagggtgaccgcggagatcgaggcctccaagggaaatatggcaaaacaggctcagcaggggccaggggccacactggacccaaagggcagaagggctccatgggggcccctggggagcggtgcaagagccactacgccgccttttcggtgggccggaagaagcccatgcacagcaaccactactaccagacggtgatcttcgacacggagttcgtgaacctctacgaccacttcaacatgttcaccggcaagttctactgctacgtgcccggcctctacttcttcagcctcaacgtgcacacctggaaccagaaggagacctacctgcacatcatgaagaacgaggaggaggtggtgatcttgttcgcgcaggtgggcgaccgcagcatcatgcaaagccagagcctgatgctggagctgcgagagcaggaccaggtgtgggtacgcctctacaagggcgaacgtgagaacgccatcttcagcgaggagctggacacctacatcaccttcagtggctacctggtcaagcacgccaccgagccctagctggccggccacctcctttcctctcgccaccttccacccctgcgctgtgctgaccccaccgcctcttccccgatccctggactccgactccctggctttggcattcagtgagacgccctgcacacacagaaagccaaagcgatcggtgctcccagatcccgcagcctctggagagagctgacggcagatgaaatcaccagggcggggcacccgcgagaaccctctgggaccttccgcggccctctctgcacacatcctcaagtgaccccgcacggcgagacgcgggtggcggcagggcgtcccagggtgcggcaccgcggctccagtccttggaaataattaggcaaattct

SEQ ID NO: 605 - DNA, 651 bp, Homo sapiens
  source 1..651: mol_type = genomic DNA
aggcccttccgcaatcggagccctcacagaggccaaactgatataaatctgcttaggaggcctgattcacagacgctacaggatggagcggggcgcaggagccaagctgctgccgctgctgctgcttctgcgggcgactggtttcacatgtgcacagacagatggccggaacggctacacggcggtcatcgaagtgaccagcgggggtccctggggcgactgggcctggcctgagatgtgtcccgatggattcttcgccagcgggttctcgctcaagctggggcgaatggagtgagccgctgtggtgtcgcggcggcgcctacctagtggctttctcgcttcgcgtggaggcacccacgaccctcggtgacaacacagcagcgaacaacgtgcgcttccgctgttcagacggcgaggaactgcaggggcctgggctgagctggggagactttggagactggagtgaccattgccccaagggcgcgtgcggcctgcagaccaagatccagggacctagaggcctcggcgatgacactgcgctgaacgacgcgcgcttattctgctgccgcagttgaacggcgccgccgccgccgctctctcccgggccaggaggctagtcccacctcttgctattaaagcttctctgagttg

SEQ ID NO: 606 - DNA, 1987 bp, Homo sapiens
  source 1..1987: mol_type = genomic DNA
tatccaaggtgcagcagctgagcattccaaattcgggaaccaccagaaaggctggcctctcttcaacatgggatcttctggacttttgagcctcctggtgctattcgtcctcttagcgaatgtccagggacctggtctgactgattggttatttcccaggagatgtcccaaaatcagagaagaatgtgaattccaagaaagggatgtgtgtacaaaggacagacaatgccaggacaacaagaagtgttgtgtcttcagctgcggaaaaaaatgtttagatctcaaacaagatgtatgcgaaatgccaaaagaaactggcccctgcctggcttattttcttcattggtggtatgacaagaaagataatacttgctccatgtttgtctatggtggctgccagggaaacaataacaacttccaatccaaagccaactgcctgaacacctgcaagaataaacgctttccctgattggataaggatgcactggaagaactgccagaatgtggctcatgctctgagtactgttcctgtacctgacggatgctccagactggcttccagtttcactctcagcattccaagatcttagcccttcccagaacagaacgcttgcatctacctcctcttcctccatctttggctcttttgatgcacaatatccatccgttttgatttcatctttatgtcccctttatctccaacttctagaactcccagtttatacctgtgtcactctcaattttttccagtaaagtacttgatgtagtcctgtgccttgaggctgagtgattgacatctttttggcacattacactttgcagagtaagggatcattgaggcttctggtgacatcattcaagggagtgaagacaatcagaactttgagagttcagagttccaggaatattgttattgttatcttcctctgtttctacaaaagattgtaaaaccctttttaggcaagggcccaaggacagtgccttagtttggatcctctagaaactaaccctgggaaaagggcatgggtgcaggtagtttgtttgagagatttcccaggacatacaagatggggagtgagatgagtaattcagggaagagaagggaagagagaagagtctattatgagctggttactactgtggctcaatcctattggggaccttttaaagaatcatgtaaaacaggcttacaaattttctttttaaaaatattttattttattttacgttccgggatacatgtgcaggacctgcaggtttgttacataggtaagcctgtgccatggtggtttgctgcacctatcaacccattacctgggtattaagccccgcatgcattagctatttatcctgatgctttccctccccctgccccctcaacagtccacgtgttctcattgttcatctcccacttgcaagtgagaacatgtggtatttacttttgttcctgcgttactttgctgaggataacggcttccagcttcatccatgtccctgcaaaggacgtgatctcatttctttttatggctgcatagtattccatggcatatatgtaccacattttctttatccagcctatcgttgatggatatttggtttgattccatgtttttgctattgtaaatagtgctgcagtgaacatacacatgcatgtatctttataaaagaatgatttatattcctttgagtgtatacccagtaatgggattgctgggtcaaatggtatttctggttctagatctttcaggaattggcacactctcttccacaatggttgaaccaatttacattcccaacagtgtaaaagcattcatgtttctccacagctttaccagcatctgttgtttctggactttttaataatcaccattctgactggcatgagatggtatctcattgtggttttgatttgcatttctctgatgatcactggtgttgagctttttttcatatgtttgttggccgcataaatgtcttcttttgagaa

SEQ ID NO: 607 - DNA, 1079 bp, Homo sapiens
  source 1..1079: mol_type = genomic DNA
tgagtgggggagagagaggagaccaggacagctgctgagacctctaagaagtccagatactaagagcaaagatgtttcaaactgggggcctcattgtcttctacgggctgttagcccagaccatggcccagtttggaggcctgcccgtgcccctggaccagaccctgcccttgaatgtgaatccagccctgcccttgagtcccacaggtcttgcaggaagcttgacaaatgccctcagcaatggcctgctgtctgggggcctgttgggcattctggaaaaccttccgctcctggacatcctgaagcctggaggaggtacttctggtggcctccttgggggactgcttggaaaagtgacgtcagtgattcctggcctgaacaacatcattgacataaaggtcactgacccccagctgctggaacttggccttgtgcagagccctgatggccaccgtctctatgtcaccatccctctcggcataaagctccaagtgaatacgcccctggtcggtgcaagtctgttgaggctggctgtgaagctggacatcactgcagaaatcttagctgtgagagataagcaggagaggatccacctggtccttggtgactgcacccattcccctggaagcctgcaaatttctctgcttgatggacttggccccctccccattcaaggtcttctggacagcctcacagggatcttgaataaagtcctgcctgagttggttcagggcaacgtgtgccctctggtcaatgaggttctcagaggcttggacatcaccctggtgcatgacattgttaacatgctgatccacggactacagtttgtcatcaaggtctaagccttccaggaaggggctggcctctgctgagctgggtcttcccccaacagaactatttcttgctgctcaatccatttcctctggcccagcttcccagtgctcacagatggctggcccatgtgctggaagatgacacagttgccttctctccgaggaacctgccccctctcctttcccaccaggcgtgtgtaacatcccatgtgcctcacctaataaaatggctcttcttctgcatca

SEQ ID NO: 608 - DNA, 1894 bp, Homo sapiens
  source 1..1894: mol_type = genomic DNA
tggcgggtggggttgtcgacacgttcaacccgttctgctggctcgagaacgaagtaggccgtctcgctctgggtctccaggcccgcgaccgtccgccagtcgtcccgaggcatgaagaactcttgactgacagaaacggagggtgtgtccaaagttttgaggacggccgagcggcgctccaaaacccgtcctcacagcctcgccccgttcgcctcagctacaacaaatcatcgtcaacctgttccaccttctccagtctggtagcaaaaaggggtgtctcagaatctccggcctgtgaaactgtgaggggattcggccaagacgtcctcttccctctgcctcccacccaggccactcttcacctccaccatgagcctggacatccagagcctggacatccagtgtgaggagctgagcgacgctagatgggccgagctcctccctctgctccagcagtgccaagtggtcaggctggacgactgtggcctcacggaagcacggtgcaaggacatcagctctgcacttcgagtcaaccctgcactggcagagctcaacctgcgcagcaacgagctgggcgatgtcggcgtgcattgcgtgctccagggcctgcagaccccctcctgcaagatccagaagctgagcctccagaactgctgcctgacgggggccggctgcggggtcctgtccagcacactacgcaccctgcccaccctgcaggagctgcacctcagcgacaacctcttgggggatgcgggcctgcagctgctctgcgaaggactcctggacccccagtgccgcctggaaaagctgcagctggagtattgcagcctctcggctgccagctgcgagcccctggcctccgtgctcagggccaagccggacttcaaggagctcacggttagcaacaacgacatcaatgaggctggcgtccgtgtgctgtgccagggcctgaaggactccccctgccagctggaggcgctcaagctggagagctgcggtgtgacatcagacaactgccgggacctgtgcggcattgtggcctccaaggcctcgctgcgggagctggccctgggcagcaacaagctgggtgatgtgggcatggcggagctgtgcccagggctgctccaccccagctccaggctcaggaccctgtggatctgggagtgtggcatcactgccaagggctgcggggatctgtgccgtgtcctcagggccaaggagagcctgaaggagctcagcctggccggcaacgagctgggggatgagggtgcccgactgctgtgtgagaccctgctggaacctggctgccagctggagtcgctgtgggtgaagtcctgcagcttcacagccgcctgctgctcccacttcagctcagtgctggcccagaacaggtttctcctggagctacagataagcaacaacaggctggaggatgcgggcgtgcgggagctgtgccagggcctgggccagcctggctctgtgctgcgggtgctctggttggccgactgcgatgtgagtgacagcagctgcagcagcctcgccgcaaccctgttggccaaccacagcctgcgtgagctggacctcagcaacaactgcctgggggacgccggcatcctgcagctggtggagagcgtccggcagccgggctgcctcctggagcagctggtcctgtacgacatttactggtctgaggagatggaggaccggctgcaggccctggagaaggacaagccatccctgagggtcatctcctgaggctcttcctgctgctgctctccctggacgaccggcctcgaggcaaccctggggcccaccagcccctgccatgctctcaccctgcatatcctaggtttgaagagaaacgctcagatccgcttatttctgccagtatatt

SEQ ID NO: 609 - DNA, 957 bp, Homo sapiens
  source 1..957: mol_type = genomic DNA
tcaacacaacttgcttctctccagacttgggcttaaggctctgataaccatgaggcttctcattctcacctgtcttgtggctgttgctcttgccaggcctaaacttcctcttagatacccagaacgccttcagaatccatcagagagcagtgagcctataccattagaatcaagagaggaatacatgaatggtatgaacaggcagagaaacattctgagagaaaaacagactgatgaaatcaagaactgtgttgtggcagagcctgagaagatggaatccagcatcagttcatcgagtgaggaaatgtctctcagtaagtgtgcggaacagttttgtagactgaacgaatacaaccaacttcagctgcagaagatgtctaagcaggagcaaattcgcagaatgaatgaaaacagccatgtccaagtgcctttccagcagctcaaccaacttgctgcctacccctatgctgtttggtactatccacaaatcatgcagtatgttcctttcccaccgttttccgacatctccaatcccactgctcatgaaaattatgaaaaaaataacgtcatgctacagtggtgatatgattgaaaatttcattctctgaatttctcctctcaaggaaaaccatcttatctgaagactggactgttgttttagaatagtaaaatcccatattgaaggaaattgttctttttgagttatctacttaatagcatatcattctttttcttaagctaaattttcctagagagtttattgtctaaatttcagttgtgtcttgccatatggagggcacctaatcagagggtattaaagtgtttactaagttttctagtggacattttgtttaaaaagtctttgaattgccagttctgtaagtgccatcaattaaaatagttttgtgcagtgacagagattttcttttttcttttcaataaattacactttaaggc

SEQ ID NO: 610 - DNA, 3963 bp, Homo sapiens
  source 1..3963: mol_type = genomic DNA
agggcctgtccctctcacttccactcgattgtaatttcatccccgggccggtcgagcctccctccctcccgcggccagcccttccctcccagtcggcctccttcgtcgcccccgcccccgcgaaaagccctgcagcttgcagccggcttcactcgcgcacgccgacctcccggctgcagtcctacctcttggaactacccgtgtttccgggcccagccctcgcagccccccacctcctcgccccggcccggggatccgttggggccgcgtcccccacgcgcccccggagacgccctttccgtgtgcgcccgggacttggtgaaactttgcaggcgccggctgcgaaatggatttaatccgaggcgtcttgctccggctcctgctcctggcttccagcctcggacccggcgcggtgtcgctccgagcggccatccgaaaaccaggcaaggtagggcctcctcttgacatcaagctgggcgcattgaactgtacggctttcagcatccagtggaaaatgccaaggcatcctggaagtcccatccttgggtacactgtcttttactctgaggttggcgcagataaatccctgcaggagcagttgcacagcgtgcctctcagccgggacatcccgaccacggaggaagtgattggagatttgaaaccaggcactgaatatcgtgtgagcatagcagcttacagccaggctggcaaagggcggctgagctctcctcggcatgtcaccactttgtcccaagattcctgcctgcctcctgcagctccccagcagccacatgtcattgtggtttcggattctgaggtggccctgtcttggaaacctggagcgagtgaaggaagcgcccctattcagtactattctgtggaattcatcaggccagatttcgacaagaagtggacctcaatccatgagcggatccagatggactccatggttatcaagggcctcgatccagataccaactaccagtttgccgtgagggcaatgaattcccatggccccagcccccgcagctggcccagtgacatcatccggaccctctgccctgaggaggcgggaagtggccgctatggaccccgttatatcaccgacatgggagctggtgaggatgatgaaggatttgaagacgacttagatttggatatttcctttgaggaggttaaaccacttcctgctaccaaaggagggaataagaaatttttggtggaaagcaagaagatgtctatatctaacccaaagaccatttctaggctcatcccccctacctcagcatctctccctgtgaccacggtggctccccagcccattcccatacagagaaaggggaagaatggtgtggccataatgtcaaggctctttgacatgccttgtgatgaaactctctgctctgctgacagcttctgtgtcaatgactacacctgggggggctcgcgatgccagtgcaccctgggcaaaggtggtgagagctgctcagaagatattgttatccagtatcctcagttctttggccactcctatgtaacgtttgaacctctgaagaattcttatcaggcatttcaaattactcttgaatttagggcggaggcagaggatggcttactgctctactgtggggagaacgaacacgggaggggggatttcatgtccctggctatcatccgacgctccctgcagttcaggtttaattgtggaactggggttgccatcatcgtaagtgagaccaaaatcaaactagggggttggcacacggttatgctctacagagatgggctgaacgggctgctgcagctgaacaatggcaccccagtgacaggccagtctcagggccaatacagtaaaattactttccggacacctctctatcttggtggcgctcccagcgcttactggttggttagagcaacagggacaaaccgaggctttcaaggctgtgtgcagtcgctcgctgtgaatgggaggagaattgacatgaggccctggcccctgggaaaagcactcagtggggctgatgtgggggaatgcagcagtggaatctgtgatgaggcctcgtgcatccatggtggcacctgcacagcaatcaaagccgactcctacatttgcctctgtccccttgggtttaaaggtcgacactgtgaagatgctttcaccttgaccattcctcagttcagagagtctctgagatcttacgctgcaactccctggccactggagccccagcattacctttccttcatggaatttgagatcacatttcggccagactcaggagatggtgtcctcctgtacagctatgacacaggcagcaaagacttcctgtccatcaacttggcagggggccacgtggagttccgctttgactgtggctctgggaccggtgtcctcaggagtgaagatcccctcaccctgggcaactggcacgagcttcgtgtatctcgcacagcaaagaatggaatcttacaggtggataagcagaagatagtggagggaatggcagagggaggcttcacacagattaagtgcaacacagacattttcattggcggagtccccaattatgatgatgtgaagaagaactcgggtgtcctgaagcctttcagcgggagcatccagaagatcatcctgaatgaccgaaccatccatgtgaagcatgacttcacctccggagtgaatgtggagaatgcggcccacccctgtgtgagagccccttgtgcccatgggggcagctgccggcccaggaaggagggctatgactgtgactgccccttgggctttgaggggcttcactgccagaaagagtgtgggaactactgcctcaatacgatcatagaagccattgagatcccgcagtttatcggccgcagttacctgacgtatgacaacccagatatcttgaagagggtgtcaggatcaagatcaaatgtgttcatgaggtttaaaacaactgccaaggatggccttttgctgtggaggggagacagccccatgagacccaacagcgacttcatttccttgggccttcgggatggagccctcgtgttcagctataacctgggcagtggtgtggcatccatcatggtgaatggctccttcaacgatggtcggtggcaccgagttaaggccgttagggatggccagtcaggaaagataaccgtggatgactatggagccagaacaggcaaatccccaggcatgatgcggcagcttaacatcaatggagctctgtatgtgggtggaatgaaggaaattgctctgcacactaacaggcaatatatgagagggctcgtgggctgtatctctcacttcaccctgtccaccgattaccacatttccctcgtggaagatgccgtggatgggaaaaacatcaacacttgtggagccaagtaacaccagctggccttgtccaagggacagagccttctattctgagaatcccaggggccctcagaccctgcctgatgctatatgcagaggcccagggaccaggtgtgtttcctctcaccaagaagaaagtacacactgatgagaaactgagaaccaagacaggcatccctgggtggcctttcctgctgacactccacgagctgacccagcagaattctctgtgtaggaagcatcggactttgtccattgaatatgtagcggctgccagagatcacacatcaatgcaaattccagagcctgtctgctatagctcagtgactgtgttgtgattcatagtacattaaaaagagagagagagagaaagaatcccacagggcactattaaaatacttctctccttccctgactcatgacactcttcctgacagcagaatgactgtgtgaccttgaacttcacatttcccacattggcccttggattgttcggattaaccccttccactcctcactggctggttcactgtgttctgactagtccataaaaataaagatggaaggagatcaaa

SEQ ID NO: 611 - DNA, 2217 bp, Homo sapiens
  source 1..2217: mol_type = genomic DNA
tcagcccacttccggggagggaggcagaggaacccctccccgccgctcacccctaagcccagccctcggctcccacccttgtgtacctgggccgaaccattcaccggagcgcgcagcgggtggagtgtggctcggaggaccgcggcgggtcaagcacctttctcccccatatctgaaagcatgccctttgtccacgtcgtttacgctcattaaaacttccagaatgcaacaggacggacttggagtagggacaaggaacggaagtgggaaggggaggagcgtgcacccctcctggccttggtgcgcgccgcgccccctaaggtactttggaagggacgcgcgggccagacgcgcccagacggccgcgatggcgctgttggccggcgggctctccagagggctgggctcccacccggccgccgcaggccgggacgcggtcgtcttcgtgtggcttctgcttagcacctggtgcacagctcctgccagggccatccaggtgaccgtgtccaacccctaccacgtggtgatcctcttccagcctgtgaccctgccctgtacctaccagatgacctcgacccccacgcaacccatcgtcatctggaagtacaagtctttctgccgggaccgcatcgccgatgccttctccccggccagcgtcgacaaccagctcaatgcccagctggcagccgggaacccaggctacaacccctacgttgagtgccaggacagcgtgcgcaccgtcagggtcgtggccaccaagcagggcaacgctgtgaccctgggagattactaccagggccggaggattaccatcaccggaaatgctgacctgacctttgaccagacggcgtggggggacagtggtgtgtattactgctccgtggtctcagcccaggacctccaggggaacaatgaggcctacgcagagctcatcgtccttgactggctcttcgtggttgtggtatgcctggctgccttcctcatcttcctcctcctgggcatctgctggtgccagtgctgcccgcacacttgctgctgctacgtcaggtgcccctgctgcccagacaagtgctgctgccccgaggccctgtatgccgccggcaaagcagccacctcaggtgttcccagcatttatgcccccagcacctatgcccacctgtctcccgccaagaccccacccccaccagctatgattcccatgggccctgcctacaacgggtaccctggaggataccctggagacgttgacaggagtagctcagctggtggccaaggctcctatgtacccctgcttcgggacacggacagcagtgtggcctctgaagtccgcagtggctacaggattcaggccagccagcaggacgactccatgcgggtcctgtactacatggagaaggagctggccaacttcgacccttctcgacctggcccccccagtggccgtgtggagcgggccatgagtgaagtcacctccctccacgaggacgactggcgatctcggccttcccggggccctgccctcaccccgatccgggatgaggagtggggtggccactccccccggagtcccaggggatgggaccaggagcccgccagggagcaggcaggcgggggctggcgggccaggcggccccgggcccgctccgtggacgccctggacgacctcaccccgccgagcaccgccgagtcagggagcaggtctcccacgagtaatggtgggagaagccgggcctacatgcccccgcggagccgcagccgggacgacctctatgaccaagacgactcgagggacttcccacgctcccgggacccccactacgacgacttcaggtctcgggagcgccctcctgccgaccccaggtcccaccaccaccgtacccgggaccctcgggacaacggctccaggtccggggacctcccctatgatgggcggctactggaggaggctgtgaggaagaaggggtcggaggagaggaggagaccccacaaggaggaggaggaagaggcctactacccgcccgcgccgcccccgtactcggagaccgactcgcaggcgtcccgagagcgcaggctcaagaagaacttggccctgagtcgggaaagtttagtcgtctgatctgacgttttctacgtagcttttgtatttttttttttaatttgaaggaacactgatgaagccctgccatacccctcccgagtctaataaaacgtataatc

SEQ ID NO: 612 - DNA, 1047 bp, Homo sapiens
  source 1..1047: mol_type = genomic DNA
atcccagcagactgtgcagtggggcaaggatttcatgagcatcctcctctaaacgcgtgtcaagacaaaagatgcttcagctttggaaacttgttctcctgtgcggcgtgctcactgggacctcagagtctcttcttgacaatcttggcaatgacctaagcaatgtcgtggataagctggaacctgttcttcacgagggacttgagacagttgacaatactcttaaaggcatccttgagaaactgaaggtcgacctaggagtgcttcagaaatccagtgcttggcaactggccaagcagaaggcccaggaagctgagaaattgctgaacaatgtcatttctaagctgcttccaactaacacggacatttttgggttgaaaatcagcaactccctcatcctggatgtcaaagctgaaccgatcgatgatggcaaaggccttaacctgagcttccctgtcaccgcgaatgtcactgtggccgggcccatcattggccagattatcaacctgaaagcctccttggacctcctgaccgcagtcacaattgaaactgatccccagacacaccagcctgttgccgtcctgggagaatgcgccagtgacccaaccagcatctcactttccttgctggacaaacacagccaaatcatcaacaagttcgtgaatagcgtgatcaacacgctgaaaagcactgtatcctccctgctgcagaaggagatatgtccactgatccgcatcttcatccactccctggatgtgaatgtcattcagcaggtcgtcgataatcctcagcacaaaacccagctgcaaaccctcatctgaagaggacgaatgaggaggaccactgtggtgcatgctgattggttcccagtggcttgccccacccccttatagcatctccctccaggaagctgctgccaccacctaaccagcgtgaaagcctgagtcccaccagaaggaccttcccagataccccttctcctcacagtcagaacagcagcctctacacatgttgtcctgcccctggcaataaaggcccatttctgca

SEQ ID NO: 613 - DNA, 9200 bp, Homo sapiens
  source 1..9200: mol_type = genomic DNA
atcagaccaacgtgaattgaatcacagcagttcagaaagaggaaactggattcaggacttgaacgcaactcccaattgcagaaaattggcaacgtctctgaagagcccttgcttttgcctggacccccagcatcatggtttcccatttcatggggtctctcagtgtcctgtgtttccttctgctgcttggattccagttcgtctgcccacagccctccactcaacacaggaaggtcccgcagcggatggcggcggagggcgcccccgaggacgacggcggcggcggcgccccgggagtgtggggcgcctggggcccctggtcggcctgctcgcgtagctgcagcggcggcgtgatggagcagacgcggccctgcctgccccgctcctaccgcctgcgcggcggccagcggcctggcgcccctgcgcgcgccttcgcggaccacgtggtgtcggcggtgcgcacgtcggtgccactgcaccggagccgcgacgagacgccagcgctggccggtacggacgccagccgccagggccccacggtgctgcgaggcagccggcacccacagccccagggcctcgaagtcactggggacagaaggagcaggacccgtggtaccattggccctggcaagtatggctatggtaaggccccatatatcttaccactgcagacagacactgcacacacgccacagaggctccggagacagaagctctcatcccgccattccaggtcccagggagcatcttctgctaggcatggctacagttcaccagcccaccaggtcccccaacatgggcctttgtaccaaagtgacagtggccctcgctctggactgcaggctgcggaggcccccatctaccagctacctttgacccatgatcaaggctaccctgcagcttcaagtctctttcacagcccagaaacaagcaacaaccacggtgtggggacccatggggcaactcagagcttctctcagcctgcccgatctacagcaatctcatgcatcggggcctatcggcagtacaagctgtgcaacaccaacgtatgtccagaaagcagtagaagtatccgggaggtacagtgtgcatcctacaacaacaagccattcatgggccggttttatgagtgggaaccatttgcagaagtaaaaggcaatcgcaaatgtgagttgaactgccaggcaatgggctaccgcttctatgtacggcaagctgagaaagtcatcgatggcaccccctgtgaccagaacggcacggccatctgtgtgtctgggcagtgcaagagcattggctgtgatgactacttaggctccgacaaagtcgtggacaaatgtggggtgtgtggaggagacaacacgggctgtcaggttgtgtcgggcgtgtttaagcatgccctcaccagcctgggctaccaccgcgtcgtggagattcccgagggagccacgaaaatcaacatcacggagatgtacaagagcaacaactatttggccctgagaagtcgttctggacgctccatcatcaatgggaactgggcaattgatcgaccaggaaaatacgagggcggagggaccatgttcacctacaagcgtccaaatgagatttcgagcactgccggagagtcctttttggcggaaggtcccaccaacgagatcttggatgtctacatgatacaccagcagccaaacccaggcgtgcactacgagtacgtgatcatggggaccaacgccatcagcccccaggtgccaccccacaggagaccaggggaacccttcaatggccagatggtgacagaaggcaggagccaggaggagggagaacagaaagggaggaacgaggagaaggaagacttgcgtggggaggcccctgagatgttcacctcagaatcggcacagaccttcccagtcaggcatccagacagattttctccccatcgaccggacaacttggtgccaccagcaccgcagcccccacggcgcagccgggatcacaactggaagcagcttgggacaacagaatgttccacgacctgtgggaaaggatcgcagtaccctattttccgctgtgtgcacagaagcactcatgaagaggctcctgagagttactgtgactccagcatgaagccgacccccgaggaggagccctgcaacatcttcccttgcccagccttctgggacatcggggagtggtctgagtgcagcaagacctgtggcctgggcatgcagcaccgccaggttctgtgccgccaggtgtacgccaaccgcagcctgacggtgcagccctaccgctgccagcacctggagaaacctgagaccaccagcacctgccaactcaagatctgcagcgagtggcagatccggaccgactggacctcgtgctcggtgccctgcggcgtgggacagaggacccgtgatgtgaagtgtgtgagcaacattggggatgtggttgacgatgaggaatgcaacatgaagctccggccgaatgacattgagaactgcgacatgggaccctgtgccaagagctggttcctcaccgagtggagcgaaaggtgctcagcggagtgtggggccggagtgcggacacgctcggtggtgtgcatgaccaaccatgtcagcagcctgcccctggagggctgtgggaacaaccggccggcagaggccaccccatgtgacaacggaccctgcacgggcaaggtggagtggtttgccgggagctggagtcagtgttccatcgagtgtgggagcgggacgcaacagagggaggtgatttgtgttagaaagaatgcagacacctttgaagtgttggacccctctgaatgttctttcctggagaaaccccccagccagcaatcctgccacctcaagccttgcggagccaaatggtttagcaccgaatggagcatgtgttccaagagctgccagggtggctttcgggtccgggaagtgcggtgtctgtctgatgacatgactctaagtaacctctgtgaccctcagttgaaaccagaagagagagaatcttgtaaccctcaggactgtgtccctgaagttgatgaaaactgcaaggacaagtactacaactgcaacgtggtggtccaggcaagactctgtgtctacaactactacaagaccgcctgctgtgcctcctgcacccgtgtggccaacaggcagacgggcttcctggggagcagataacactcctgcacccccatcagtagggcagcatcactgccttcccgggggcttcagcagtgcgcctggctggctgctgctccaccacgggccccctggcccaggcgctgccaaccaacttagtcaccacccctgcctccggtgaatgcaccccgtggtacccaggggctttttacacaagatgtttgaaagccacagtcagtcctttaagcatcaccatgtactgatgatcccctccttggacctggcatctgctaatggtgccctttgaaagtcaagcagtgggaagtacatggagctctcagccctgctcccatctggcaccttcaagtcagcagatgggccactgactgagcactgccccgtccctggtgctactggtctttctaaacttagcaccctggagagtccaaggaggcagcgcccccaacccagcgccccactaagccttgctgacacgcgtgcatccctctgtgacctcagcccagatgtgcctgttttcattctcaaagacattagactgttttcctgccctatgacacagatagctcacatgaatattgtgctttatttagcaggtgtactcacagatactagctccttagcagctcacaacatcccagaatgggaggcagggggtgactcattatccccattttactgacagggaaactgaggctcaacttaagtaattgacctgccaggtatattcacccatccagtggaagagctgagtccccgccccagtcatctaccagtatccagcctggggcctgtacttagatgtgaaaggtgctgcttcatttctgaccaagagactgagaagtttcccagaatgcaaacaaagcccaggcccctgaaatctttccggtcaagcctttatcccagcactcagttgttttggatgtctgttcctacttgcccttacccccaaagttacagatcctagttacaggactctgccagctttgttaaactgtccgtgagacaagaaagccattggggaaaccaggtgattgcctgaaattcttactccgttccaagtgctgttcctcccaggaaatcaaaggccagggtccttatggccgtggagccttcccgaccacagagccaacttgtgaagcacacagctctgcagcctgggctctgccctgcctcagccgcctcccccacgctcttcaccacgttcctggagagtccggccaacctgtcccagccgaaacactgctgtattagaaaaagtctctttctggtctttctggttttgtttatgaatttccctctgtggccacaaattcctcccctcccccatgactcacagtccatatggcccacccccagacttgagcaccaagctctgcattaatgcagttggcctgcgacaaggagctgtggacccttccccatctcttccaattcactttccccaactatccagttccagaggccgcaggcctggaaggatgcagtgcatattgaaaggtggaccctctgaaaacagttaagaggaatatatgtatgttttacccattaagaaaaaatggcaagctaaacaaatgttaaacttacagaaaatttgtcttatggtcctgagcatatttcccttttagagcaagcctggattcttagcaaagtgtttcccccatttgctcttttagctgacaaatctgccactgtgatgatggtttgcagcttttggaagcagtatggcaacctggcctgacatgctctttaggcttccactaacctggggctttcagaaattctatttggcctttctgtgggtagctttccagcttctcttctagggagccccaggcatcatttcccaaaagcatccccatctcctgattctcttggaactcctacagataagcatcctggcagaggcccaggctcccaaaccgacaaagtgaaaagagaccagagaggccaagcatattgactggtgctgttcagggcctgctcttttccactcaccacttgttttgctgcttgtcacgaggagagttgttcctgtatgtggctgctctcagatctttccaagcaagccagtcatttgaagaggttttcttttcatgctggagggcaggctaagatcaatgagtggaagagagaaaggctgttttagctcaagttaaaggaacaccttctagccatcaaagccgcccaacagaggcaagggccaccacacatgagagagcgctctgtccttaaagggaattctctgttgagtgggaggtgaacaccctggttcttccaactcaggaattctcgtggctgggctgggtcagtgatggctttgtctctttatgtctaaagtgccctatggctgctgaaggttacctaaccattctttaaaaggagaatgaccctccatgggaatggccagcctgccaactgtgcaattgaagaagacccgatggatcaaccccatgtctcccttggggagaaagtgcataaaccaggggtctctttttttttttcaacaaaccattgagctgttcttggagttcatctctggagaggttatacattattagaagtttgattattattatagtttgatcaatttatttgtcttagagatccaatttttactaattccctagttttttatttcagcatctgaatgtctttctccctagcacagtgcatacaatcagggccttgggtatttccagtgataactttccttggagaggatctaagaaaagcccagatttcggtagccatctccctccaaatatgtctctttctgctttcttagtgcccattatttccccctctcctttcttctgtcactgccatctccttcttggtcttcccattgttctttaactggccgtaatgtggaattgatatttacattttgatacggtttttttcttggcctgtgtacgggattgcctcatttcctgctctgaattttaaaattagatattaaagctgtcatatggtttcctcacaaaagtcaacaaagtccaaacaaaaatagtttgccgttttactttcatccattgaaaaaggaaattgtgcctcttgcagcctaggcaaaggacatttagtactatcgattctttccaccctcacgatgacttgcggttctctctgtagaaaagggatggcctaagaaatacaactaaaaaaacaaacaaaaacaccaaaagaaaaaaaaaagccatttaaagccagccactagagggagtcagttcagttccgtaaaggtatgctcagtgcccgctgcctgcaagctgttggggaccccagggagggcaaggcagcctgtccccgcccccagggaactagaacatgacaagaattctccgcactgtgcctacctgtccctttaccttacctctctggcccagagttcttggagggttttttctttattttcttatgtactcatctacttattctcaaagtatttagcattcaacactctttttgctttaaaaagaatggccttacaaagggacagaaaagagaagacacgagcttggtgtattttcatcaagttatgtggcagagaaatccagatattaccaggacctgtctaaacaaatgttgtgggttttcttttcattcggatagccactttatagttggaatatcaattctaatgaggaggaagacataaatataagtggtaaaaagaaacatgacttcccttaaaacaggctggataatctatatcagccttgtgggtggagactagtatttgatccttgccatataaaacattttaatatggtttacatgggaaaatatcgatggcttcctcacaaaatgtatgggtgacgtgaagttgaagagccaatggcttgggtgacacgtgctggatccaaaaagatcagggagactagaataaaacttggatgttaaaaattcaccaggaatccacataaagtactatatttgggctaaaatgaaaaactaaatacaaggtgggagagaggcaagaatttcagttgactaagctcagtgtgagtcaaagtgggatggaaccatgcaaaaacaaaacccacagacatgcaggctacgtgaggagaaaacagtggtgaggatcacatcacattgtgtttgcatttgccggaaccatactttaagaagaaaaccgatcatctataataacatcagtttatcaatgccccgtcctgatgaagtgtgcagactctcagaaacagcaggaaggacttcatgagaaccctcaggctggagaaggcactagggcacaaggagagctctcctaggaccaggaccaagaagctacaggcaggcacagtttagctcctgcagagacccagcttttcacaagttggagccttccagagatagagggactgtggtaggtggtgacccacccatcactggaggtggaagcagaggccgtttgccagggatgctggagaggggattcaagcatctggctgggcaacgtgatgctcagggccgtctccactcagggcttaggggagtctgtgagtagaagagctttaggtgatttgtttggtgggggaaggcaagtacacagctatgcactttccgtttctgacttttgccaccctgtcagccatggggagcccactgtgggactgaaaccctgagctgaatgcggcctcatgtctcagagaaacactggcaagttggtcagagccgccgtctgcatcgaggcgtagctgagcggcaggatggggggctgcctgcccagggtctctcaccgtggtgtaagcagagccatggcttgcctaggaccctatagataccatcactctttctcagctcgactggagtttctgcacctttgcaggggcaaagtaactccctgcaccctgaaccaccccccattcctgttcatttcagcagataatgatggagggggggggtgtccatcgtgctgagggtgtgaccgcaagagggtgaaaacttccagccaactttctcagtcctttctcttgcgagagggaagccacctgctatacaaactaataccccctgccttgaccccttccccacgactcagttgacagaaggatatactttgttataacttattattttgttctctgtaaatacaagatgtttataggaaatatgtattctgaactctatctgcagaatgagtcactacaccaaaatagttctattatttagaatgtgttaattttaaagggacctgataggtatttatttacatatgcgatccacatttgtgtgaaagcatgtgatcatactaacccagcctcctggaatgtcgctgtacgatgattgatgtctttttctcagtccatagttacaattgtttagtatgctaatcagtccagttccctgaggtttaagatcaaatataaattactctgcttttcgactcattcaggtagcattgtacctgaacctgattgctactttttcatcttaaatattatatttcctcatctaatctgccttcccctcatccacagacatttggagaaggaaatgggagggtgtctgttatccctttctctttgctttgtccccgttgttagactggcagcgtcagttgctcggtgggcttggttagagccgtgggtgaggcaggtggctggcggggacagggagaggctgagagggaagtggtggcatttactgctctgacacttccactgtccctgctggggatgctggggccaaggcctgtggggcctgtgaactgcacagccaggagcaaggaacccactaaatactccgtcacctccatgtcccctctacagtgttaaattattacataagcaggtgaaaggtagaaggcgaattatgtgagtaaatatggtctgttttctcttcagcaaaaatgactatttttgtgtgtgactaatttatttttattattgtaaagatacaataaaccggttgaaatatctgctttgttgacaagcgtgtgctttctctggccttattcgcgttctgttctcctgcaaatagcgccctctaaaaagaagagtcagacaataaactggttgaaatatc

SEQ ID NO: 614 - DNA, 2060 bp, Homo sapiens
  source 1..2060: mol_type = genomic DNA
atgtcatagaattctcaaaacttcctaactgcttctctctctctcttttactcttattctttctctctcactctctctcttttcccacccttaagccaagtacagggatagttgtctcatcattggtggcttaaaatgatgtttttgaacaagaagacgccccatgggtacttttggtgactagcactatctctgtttttttccttttaaattcctgagctattgtttagcagtacacccttttatctccattgctactgaagctgaatgttacttgggtggaaagcataactgctttcttttctatgtccttaaaccctttgataatgttactgtttgagagtccctgaagccaggatactagaagagtctggcttgtctgaacagctgaactacgaaataatggagtagggcaggctttaccaagccaattcactcaagttgtctcatctataccccttcaaaccctgtgagagatggaagctttgatgctcacaaggggctgccctggcaaacctcctgagagaaaagaaaagctaagcctctaggtgctgtgctgtcctgaggcctgggccatggtgcccaaggaaagcccctgaagctcaccaggaggaagaagcatgcagggcacccctggaggcgggacgcgccctgggccatcccccgtggacaggcggacactcctggtcttcagctttatcctggcagcagctttgggccaaatgaatttcacaggggaccaggttcttcgagtcctggccaaagatgagaagcagctttcacttctcggggatctggagggcctgaaaccccagaaggtggacttctggcgtggcccagccaggcccagcctccctgtggatatgagagttcctttctctgaactgaaagacatcaaagcttatctggagtctcatggacttgcttacagcatcatgataaaggacatccaggtgctgctggatgaggaaagacaggccatggcgaaatcccgccggctggagcgcagcaccaacagcttcagttactcatcataccacaccctggaggagatatatagctggattgacaactttgtaatggagcattccgatattgtctcaaaaattcagattggcaacagctttgaaaaccagtccattcttgtcctgaagttcagcactggaggttctcggcacccagccatctggattgacactggaattcactcccgggagtggatcacccatgccaccggcatctggactgccaataagattgtcagtgattatggcaaagaccgtgtcctgacagacatactgaatgccatggacatcttcatagagctcgtcacaaaccctgatgggtttgcttttacccacagcatgaaccgcttatggcggaagaacaagtccatcagacctggaatcttctgcatcggcgtggatctcaacaggaactggaagtcgggttttggaggaaatggttctaacagcaacccctgctcagaaacttatcacgggccctcccctcagtcggagccggaggtggctgccatagtgaacttcatcacagcccatggcaacttcaaggctctgatctccatccacagctactctcagatgcttatgtacccttacggccgattgctggagcccgtttcaaatcagagggagttgtacgatcttgccaaggatgcggtggaggccttgtataaggtccatgggatcgagtacatttttggcagcatcagcaccaccctctatgtggccagtgggatcaccgtcgactgggcctatgacagtggcatcaagtacgccttcagctttgagctccgggacactgggcagtatggcttcctgctgccggccacacagatcatccccacggcccaggagacgtggatggcgcttcggaccatcatggagcacaccctgaatcacccctactagcagcacgactgagggcaggaggctccatccttctccccaaggtctgtggctcctcccgaaacccaagttatgcatccccatccccatgccctcatcccgacctcttagaaaataaatacaagtttgaac

SEQ ID NO: 615 - DNA, 917 bp, Homo sapiens
  source 1..917: mol_type = genomic DNA
tgcaggaaagcctcaagtagaggagggttgaggcttcagtccagcacctttctcgggtcacggcctcctcctggctcccaggaccccaccataggcagaggcaggccttcctacaccctactccctgtgcctccaggctcgactagtccctagcactcgacgactgagtctctgaggtcacttcaccgtggtctccgcctcacccttggcgctggaccagtgagaggagagggctggggcgctccgctgagccactcctgcgcccccctggccttgtctacctcttgccccccgaagggttagtgtcgagctcactccagcatcctacaacctcctggtggccttgccgcccccacaaccccgaggtttaaagccaggtacacgaggcaggggacacaccaaggatggagatgttccaggggctgctgctgttgctgctgctgagcatgggcgggacatgggcatccaaggagccgcttcggccacggtgccgccccatcaatgccaccctggctgtggagaaggagggctgccccgtgtgcatcaccgtcaacaccaccatctgtgccggctactgccccaccatgacccgcgtgctgcagggggtcctgccggccctgcctcaggtggtgtgcaactaccgcgatgtgcgcttcgagtccatccggctccctggctgcccgcgcggcgtgaaccccgtggtctcctacgccgtggctctcagctgtcaatgtgcactctgccgccgcagcaccactgactgcgggggtcccaaggaccaccccttgacctgtgatgacccccgcttccaggactcctcttcctcaaaggcccctccccccagccttccaagtccatcccgactcccggggccctcggacaccccgatcctcccacaataaaggcttctcaatccg

SEQ ID NO: 616 - DNA, 389 bp, Homo sapiens; identical to SEQ ID NO: 514
  source 1..389: mol_type = genomic DNA

SEQ ID NO: 617 - DNA, 1357 bp, Homo sapiens
  source 1..1357: mol_type = genomic DNA
gagaaacagaatcctaactatttctgaggaaactgacttggcaacaagcattttgagaaatttattctgcccttgaacatctttgagcccattgagatgttctccaacgcaaacagcaggtccaaaatgtggctgcttttaacaatggcaagtttgatatctgtactggggactacacatggtttgtttggaaaattacatcctggaagccctgaagtgactatgaacattagtcagatgattacttattggggatacccaaatgaagaatatgaagttgtgactgaagatggttatattcttgaagtcaatagaattccttatgggaagaaaaattcagggaatacagatgctggttatgatgtgtggctgggcaacagcagaggaaacacctgggccagaagaaacttgtactattcaccagattcagttgaattctgggctttcagctttgatgaaatggctaaatatgaccttccagccacaatcgacttcattgtaaagaaaactggacagaagcagctacactatgttggccattcccagggcaccaccattggttttattgccttttccaccaatcccagcctggctaaaagaatcaaaaccttctatgctctagctcctgttgccactgtgaagtatacaaaaagccttataaacaaacttagatttgttcctcaatccctcttcaagtttatatttggtgacaaaatattctacccacacaacttctttgatcaatttcttgctactgaagtgtgctcccgtgagatgctgaatctcctttgcagcaatgccttatttataatttgtggatttgacagtaagaactttaacacgagtcgcttggatgtgtatctatcacataatccagcaggaacttctgttcaaaacatgttccattggacccaggctgttaagtctgggaaattccaagcttatgactggggaagcccagttcagaataggatgcactatgatcagtcccaacctccctactacaatgtgacagccatgaatgtaccaattgcagtgtggaacggtggcaaggacctgttggctgacccccaagatgttggccttttgcttccaaaactccccaatcttatttaccacaaggagattcctttttacaatcacttggactttatctgggcaatggatgcccctcaagaagtttacaatgacattgtttctatgatatcagaagataaaaagtagttctggatttaaagaattatccgtttgtttttccaaaatactttattctctcatacatagtattttcataatgtttgacatgcagtgcttctttctgtaattttgactttagaaatatattggcatcaacaaa

SEQ ID NO: 618 - DNA, 3506 bp, Homo sapiens
  source 1..3506: mol_type = genomic DNA
ctcctcctcctcccctccgtcggtcagtcagtccgcgaggagagtccgcggtggcggcgacggtggcgagagccgcgggggccgtaggaagccaaccttccctgcttctccggggccctcgccccctcctccccacaaaatcagggatggaggcgcctccccggcaccctcttagcagccctccccaggaaaagtgtcccccctgagctcctaacgctccccaacagctacccctgccccccacgccatggggcccggggccccttttgcccgggtggggtggccactgccgcttctggttgtgatggcggcaggggtggctccggtgtgggcctcccactccccccatctcccgcggcctcactcgcgggtccccccgcacccctcctcagaacggcgcgcagtgtacatcggggcactgtttcccatgagcgggggctggccagggggccaggcctgccagcccgcggtggagatggcgctggaggacgtgaatagccgcagggacatcctgccggactatgagctcaagctcatccaccacgacagcaagtgtgatccaggccaagccaccaagtacctatatgagctgctctacaacgaccctatcaagatcatccttatgcctggctgcagctctgtctccacgctggtggctgaggctgctaggatgtggaacctcattgtgctttcctatggctccagctcaccagccctgtcaaaccggcagcgtttccccactttcttccgaacgcacccatcagccacactccacaaccctacccgcgtgaaactctttgaaaagtggggctggaagaagattgctaccatccagcagaccactgaggtcttcacttcgactctggacgacctggaggaacgagtgaaggaggctggaattgagattactttccgccagagtttcttctcagatccagctgtgcccgtcaaaaacctgaagcgccaggatgcccgaatcatcgtgggacttttctatgagactgaagcccggaaagttttttgtgaggtgtacaaggagcgtctctttgggaagaagtacgtctggttcctcattgggtggtatgctgacaattggttcaagatctacgacccttctatcaactgcacagtggatgagatgactgaggcggtggagggccacatcacaactgagattgtcatgctgaatcctgccaatacccgcagcatttccaacatgacatcccaggaatttgtggagaaactaaccaagcgactgaaaagacaccctgaggagacaggaggcttccaggaggcaccgctggcctatgatgccatctgggccttggcactggccctgaacaagacatctggaggaggcggccgttctggtgtgcgcctggaggacttcaactacaacaaccagaccattaccgaccaaatctaccgggcaatgaactcttcgtcctttgagggtgtctctggccatgtggtgtttgatgccagcggctctcggatggcatggacgcttatcgagcagcttcagggtggcagctacaagaagattggctactatgacagcaccaaggatgatctttcctggtccaaaacagataaatggattggagggtcccccccagctgaccagaccctggtcatcaagacattccgcttcctgtcacagaaactctttatctccgtctcagttctctccagcctgggcattgtcctagctgttgtctgtctgtcctttaacatctacaactcacatgtccgttatatccagaactcacagcccaacctgaacaacctgactgctgtgggctgctcactggctttagctgctgtcttccccctggggctcgatggttaccacattgggaggaaccagtttcctttcgtctgccaggcccgcctctggctcctgggcctgggctttagtctgggctacggttccatgttcaccaagatttggtgggtccacacggtcttcacaaagaaggaagaaaagaaggagtggaggaagactctggaaccctggaagctgtatgccacagtgggcctgctggtgggcatggatgtcctcactctcgccatctggcagatcgtggaccctctgcaccggaccattgagacatttgccaaggaggaacctaaggaagatattgacgtctctattctgccccagctggagcattgcagctccaggaagatgaatacatggcttggcattttctatggttacaaggggctgctgctgctgctgggaatcttccttgcttatgagaccaagagtgtgtccactgagaagatcaatgatcaccgggctgtgggcatggctatctacaatgtggcagtcctgtgcctcatcactgctcctgtcaccatgattctgtccagccagcaggatgcagcctttgcctttgcctctcttgccatagttttctcctcctatatcactcttgttgtgctctttgtgcccaagatgcgcaggctgatcacccgaggggaatggcagtcggaggcgcaggacaccatgaagacagggtcatcgaccaacaacaacgaggaggagaagtcccggctgttggagaaggagaaccgtgaactggaaaagatcattgctgagaaagaggagcgtgtctctgaactgcgccatcaactccagtctcggcagcagctccgctcccggcgccacccaccgacacccccagaaccctctgggggcctgcccaggggaccccctgagccccccgaccggcttagctgtgatgggagtcgagtgcatttgctttataagtgagggtgcatgtccgttccgaggaatgggatttaatgacctttgatgccaacccatatgacagcgtgaaaaaaatcaaagaacatgtccggtctaagaccaaggttcctgtgcaggaccaggttcttttgctgggctccaagatcttaaagccacggagaagcctctcatcttatggcattgacaaagagaagaccatccaccttaccctgaaagtggtgaagcccagtgatgaggagctgcccttgtttcttgtggagtcaggtgatgaggcaaagaggcacctcctccaggtgcgaaggtccagctcagtggcacaagtgaaagcaatgatcgagactaagacgggtataatccctgagacccagattgtgacttgcaatggaaagagactggaagatgggaagatgatggcagattacggcatcagaaagggcaacttactcttcctggcatgttattgtattggagggtgaccaccctgggcatggggtgttggcaggggtcaaaaagcttatttcttttaatctcttactcaacgaacacatcttctgatgatttcccaaaattaatgagaatgagatgagtagagtaagatttgggtgggatgggtaggatgaagtatattgcccaactctatgtttctttgattctaacacaattaattaagtgacatgatttttactaatgtattactgagactagtaaataaatttttaaggcaaaa

SEQ ID NO: 619 - DNA, 1802 bp, Homo sapiens
  source 1..1802: mol_type = genomic DNA
ggactcgcccgctcccaggccggacccgcgcccgggacagggacccggccgagtcgagccgtcgcgccagcgctgcgccgccggtcggtgcgcctagcggatcggagctgcgcgcggaaccgtgctgccccgccccgctccacccgtgagggtggcccgaggcagccgggatgacagctctccccaggaatcctgctgcctgctgagaaacatggtcagcaagtcccgctggaagctcctggccatgttggctctggtcctggtcgtcatggtgtggtattccatctcccgggaagacaggtacatcgagcttttttattttcccatcccagagaagaaggagccgtgcctccagggtgaggcagagagcaaggcctctaagctctttggcaagctttcacctctgtgcagctactcccgggatcagcccatcttcctgcggcttgaggattatttctgggtcaagacgccatctgcttacgagctgccctatgggaccaaggggagtgaggatctgctcctccgggtgctagccatcaccagctcctccatccccaagaacatccagagcctcaggtgccgccgctgtgtggtcgtggggaacgggcaccggctgcggaacagctcactgggagatgccatcaacaagtacgatgtggtcatcagattgaacaatgccccagtggctggctatgagggtgacgtgggctccaagaccaccatgcgtctcttctaccctgaatctgcccacttcgaccccaaagtagaaaacaacccagacacactcctcgtcctggtagctttcaaggcaatggacttccactggattgagaccatcctgagtgataagaagcgggtgcgaaagggtttctggaaacagcctcccctcatctgggatgtcaatcctaaacagattcggattctcaaccccttcttcatggagattgcagctgacaaactgctgagcctgccaatgcaacagccacggaagattaagcagaagcccaccacgggcctgttggccatcacgctggccctccacctctgtgacttggtgcacattgccggctttggctacccagacgcctacaacaagaagcagaccattcactactatgagcagatcacgctcaagtccatggcggggtcaggccataatgtctcccaagaggccctggccattaagcggatgctggagatgggagctatcaagaacctcacgtccttctgacctgggcaagagctgtagcctgtcggttgcctactctgctgtctgggtgacccccatgcgtggctgtgggggtggctggtgccagtatgacccacttggactcaccccctcttggggagggagttctgggcctggccaggtctgagatgaggccatgcccctggctgctcttatggagccgagatccagtcagggtgggggcgctggagccgtgggagcccggccagggcagggggctcgttgctgtggcaccccctctctgccagcaccaagagattatttaatgggctatttaattaaggggtaggaaggtgctgtgggctggtcccacacatccaggaaagaggccagtagagaattctgcccactttttataaaaacttacagcgatggccccaccaaggcctagacacggcactggcctcccaggagggcaggggcattgggaatgggtgggtgccctccagagaggggctgctacctcccagcaggcatgggaagagcactggtgtgggggttccaccgagaaggggacctcatctagaaaagaggttacaaacctaccattaaa

SEQ ID NO: 620 - DNA, 1791 bp, Homo sapiens
  source 1..1791: mol_type = genomic DNA
gccgagccccgcccagtagtccccgcccacgcacctgaccacgcccacgagccggctcgaacacgcccgcgccgctgactggcgggtggggttgtcgacacgttcaacccgttctgctggctcgagaacgaagtaggccgtctcgctctgggtctccaggcccgcgaccgtccgccagtcgtcccgagaatctccggcctgtgaaactgtgaggggattcggccaagacgtcctcttccctctgcctcccacccaggccactcttcacctccaccatgagcctggacatccagagcctggacatccagtgtgaggagctgagcgacgctagatgggccgagctcctccctctgctccagcagtgccaagtggtcaggctggacgactgtggcctcacggaagcacggtgcaaggacatcagctctgcacttcgagtcaaccctgcactggcagagctcaacctgcgcagcaacgagctgggcgatgtcggcgtgcattgcgtgctccagggcctgcagaccccctcctgcaagatccagaagctgagcctccagaactgctgcctgacgggggccggctgcggggtcctgtccagcacactacgcaccctgcccaccctgcaggagctgcacctcagcgacaacctcttgggggatgcgggcctgcagctgctctgcgaaggactcctggacccccagtgccgcctggaaaagctgcagctggagtattgcagcctctcggctgccagctgcgagcccctggcctccgtgctcagggccaagccggacttcaaggagctcacggttagcaacaacgacatcaatgaggctggcgtccgtgtgctgtgccagggcctgaaggactccccctgccagctggaggcgctcaagctggagagctgcggtgtgacatcagacaactgccgggacctgtgcggcattgtggcctccaaggcctcgctgcgggagctggccctgggcagcaacaagctgggtgatgtgggcatggcggagctgtgcccagggctgctccaccccagctccaggctcaggaccctgtggatctgggagtgtggcatcactgccaagggctgcggggatctgtgccgtgtcctcagggccaaggagagcctgaaggagctcagcctggccggcaacgagctgggggatgagggtgcccgactgctgtgtgagaccctgctggaacctggctgccagctggagtcgctgtgggtgaagtcctgcagcttcacagccgcctgctgctcccacttcagctcagtgctggcccagaacaggtttctcctggagctacagataagcaacaacaggctggaggatgcgggcgtgcgggagctgtgccagggcctgggccagcctggctctgtgctgcgggtgctctggttggccgactgcgatgtgagtgacagcagctgcagcagcctcgccgcaaccctgttggccaaccacagcctgcgtgagctggacctcagcaacaactgcctgggggacgccggcatcctgcagctggtggagagcgtccggcagccgggctgcctcctggagcagctggtcctgtacgacatttactggtctgaggagatggaggaccggctgcaggccctggagaaggacaagccatccctgagggtcatctcctgaggctcttcctgctgctgctctccctggacgaccggcctcgaggcaaccctggggcccaccagcccctgccatgctctcaccctgcatatcctaggtttgaagagaaacgctcagatccgcttatttctgc

SEQ ID NO: 621 - DNA, 2223 bp, Homo sapiens
  source 1..2223: mol_type = genomic DNA
ggggacgcggagctgagaggctccgggctagctaggtgtaggggtggacgggtcccaggaccctggtgagggttctctacttggccttcggtgggggtcaagacgcaggcacctacgccaaaggggagcaaagccgggctcggcccgaggcccccaggacctccatctcccaatgttggaggaatccgacacgtgacggtctgtccgccgtctcagactagaggagcgctgtaaacgccatggctcccaagaagctgtcctgccttcgttccctgctgctgccgctcagcctgacgctactgctgccccaggcagacactcggtcgttcgtagtggataggggtcatgaccggtttctcctagacggggccccgttccgctatgtgtctggcagcctgcactactttcgggtaccgcgggtgctttgggccgaccggcttttgaagatgcgatggagcggcctcaacgccatacagttttatgtgccctggaactaccacgagccacagcctggggtctataactttaatggcagccgggacctcattgcctttctgaatgaggcagctctagcgaacctgttggtcatactgagaccaggaccttacatctgtgcagagtgggagatggggggtctcccatcctggttgcttcgaaaacctgaaattcatctaagaacctcagatccagctgacaacatgaccaaaatctttaccctgcttcggaagtatgaaccccatgggccattggtaaactctgagtactacacaggctggctggattactggggccagaatcactccacacggtctgtgtcagctgtaaccaaaggactagagaacatgctcaagttgggagccagtgtgaacatgtacatgttccatggaggtaccaactttggatattggaatggtgccgataagaagggacgcttccttccgattactaccagctatgactatgatgcacctatatctgaagcaggggaccccacacctaagctttttgctcttcgagatgtcatcagcaagttccaggaagttcctttgggacctttacctcccccgagccccaagatgatgcttggacctgtgactctgcacctggttgggcatttactggctttcctagacttgctttgcccccgtgggcccattcattcaatcttgccaatgacctttgaggctgtcaagcaggaccatggcttcatgttgtaccgaacctatatgacccataccatttttgagccaacaccattctgggtgccaaataatggagtccatgaccgtgcctatgtgatggtggatggggtgttccagggtgttgtggagcgaaatatgagagacaaactatttttgacggggaaactggggtccaaactggatatcttggtggagaacatggggaggctcagctttgggtctaacagcagtgacttcaagggcctgttgaagccaccaattctggggcaaacaatccttacccagtggatgatgttccctctgaaaattgataaccttgtgaagtggtggtttcccctccagttgccaaaatggccatatcctcaagctccttctggccccacattctactccaaaacatttccaattttaggctcagttggggacacatttctatatctacctggatggaccaagggccaagtctggatcaatgggtttaacttgggccggtactggacaaagcaggggccacaacagaccctctacgtgccaagattcctgctgtttcctaggggagccctcaacaaaattacattgctggaactagaagatgtacctctccagccccaagtccaatttttggataagcctatcctcaatagcactagtactttgcacaggacacatatcaattccctttcagctgatacactgagtgcctctgaaccaatggagttaagtgggcactgaaaggtaggccgggcatggtggctcatgcctgtaatcccagcactttgggaggctgagacgggtggattacctgaggtcaggacttcaagaccagcctggccaacatggtgaaaccccgtctccactaaaaatacaaaaattagccgggcgtgatggtgggcacctctaatcccagctacttgggaggctgagggcaggagaattgcttgaatccaggaggcagaggttgcagtgagtggaggttgtaccactgcactccagcctggctgacagtgagacactccatctc

SEQ ID NO: 622 - DNA, 2088 bp, Homo sapiens
  source 1..2088: mol_type = genomic DNA
cctaacctgctgatacagatcagatggtgactgaatagaagctgccccagtcctgggttcatgatgtacgcacctgttgaattttcagaagctgaattctcacgagctgaatatcaaagaaagcagcaattttgggactcagtacggctagctcttttcacattagcaattgtagcaatcataggaattgcaattggtattgttactcattttgttgttgaggatgataagtctttctattaccttgcctcttttaaagtcacaaatatcaaatataaagaaaattatggcataagatcttcaagagagtttatagaaaggagtcatcagattgaaagaatgatgtctaggatatttcgacattcttctgtaggcggtcgatttatcaaatctcatgttatcaaattaagtccagatgaacaaggtgtggatattcttatagtgctcatatttcgatacccatctactgatagtgctgaacaaatcaagaaaaaaattgaaaaggctttatatcaaagtttgaagaccaaacaattgtctttgaccataaacaaaccatcatttagactcacacctattgacagcaaaaagatgaggaatcttctcaacagtcgctgtggaataaggatgacatcttcaaacatgccattaccagcatcctcttctactcaaagaattgtccaaggaagggaaacagctatggaaggggaatggccatggcaggccagcctccagctcatagggtcaggccatcagtgtggagccagcctcatcagtaacacatggctgctcacagcagctcactgcttttggaaaaataaagacccaactcaatggattgctacttttggtgcaactataacaccacccgcagtgaaacgaaatgtgaggaaaattattcttcatgagaattaccatagagaaacaaatgaaaatgacattgctttggttcagctctctactggagttgagttttcaaatatagtccagagagtttgcctcccagactcatctataaagttgccacctaaaacaagtgtgttcgtcacaggatttggatccattgtagatgatggacctatacaaaatacacttcggcaagccagagtggaaaccataagcactgatgtgtgtaacagaaaggatgtgtatgatggcctgataactccaggaatgttatgtgctggattcatggaaggaaaaatagatgcatgtaagggagattctggtggacctctggtttatgataatcatgacatctggtacattgtaggtatagtaagttggggacaatcatgtgcacttcccaaaaaacctggagtctacaccagagtaactaagtatcgagattggattgcctcaaagactggtatgtagtgtggattgcccatgagttatacacatggcacacagagctgatactcctgcgtattttgtattgtttaaattcatttactttggattagtgcttttgctagatgtcaagaagcccttcagacccagacaaatctaatatcctgaggtggcctttacatacgtaggaccaaaccctctctaccatgagggaagaagacacagcaaatgacagacagcacctattccttactcacaagggaaactgcttgtgatacttcctaataagataaataagtggtttccctcaattgaagacaggaacatcattttccacaggatatgaagagctgccagtaatgccaaaatcttacctcatataatacctggagcatgtgagattcttctagtgaaaaagaacagtcttccctgaagactcagggcttcaacattctagaactgataagtggaccttcagtgtgcaagaatggagaagcatgggatttgcattatgacttgaactgggcttatatctaataatacagagcactatctctaacctcaacagttgacattttaaaagtttttaaatgtatctgaacttgctgttaacacagtgttataactcaagcactagcttcaggaagcatgttgtgttgttaagaagcttttctgatttattctttaacagcatcttgccatctatatgttagtagcagttggcccagaaaggac

SEQ ID NO: 623 - DNA, 4805 bp, Homo sapiens
  source 1..4805: mol_type = genomic DNA
agtccagcagccaccatcaccaccactgcggttgctgctgcagctgcagctgctgctctccctccggctgcttcttcgcgtggccagcagcgaatggagcgatggagcccagactgttctgctggaccactctctttctcctggccgggtggtgcctgccagggttgccctgccccagccggtgcctttgctttaagagcaccgtccgctgcatgcacttgatgctggaccacattcctcaggtaccacagcagaccacagttctagacttgaggtttaacagaataagagaaattccagggagcgccttcaagaaactcaagaatttgaacacacttctgctgaacaacaaccacatcagaaagatttccagaaatgcttttgaaggacttgaaaatttgctatatctgtacctgtataagaatgaaatccatgcactagataagcaaacatttaaaggactcatatctttggaacatctgtatattcatttcaaccaactagaaatgctacagccagagacctttggagaccttctgagattagagcgactatttttgcataacaacaaattatctaaaattccagctgggagcttttctaatctggattcattaaaaagattgcgtctggattccaacgccctggtttgtgactgtgatctgatgtggctgggggagcttttacaaggctttgcccaacacggccacacccaggctgcggctacctgcgaatatcccaggagactccatgggcgtgcagttgcttcagtaacagtagaggaattcaattgccagagcccccgaattacttttgagccgcaggatgtggaggtaccatcaggaaataccgtctacttcacctgccgggcggaaggaaaccccaaacctgagattatttggatacacaacaaccactcattggatttggaagatgatactcgacttaatgtgtttgatgatggcacactcatgatccgaaacaccagagagtcagaccaaggtgtctatcagtgcatggccagaaattccgctggggaagccaagacacagagtgccatgctcagatactccagtcttccagccaaaccaagctttgtaatccagcctcaggacacagaggttttaattggcaccagcacaactttggaatgtatggccacaggccacccacaccctcttatcacttggaccagggacaatggattggagctggatggatccaggcacgtggcaacgtccagtggactttacttacagaacatcacacaacgggatcatggtcgatttacctgtcatgccaacaatagccacggcactgttcaagctgcagcaaacataattgtacaagctcctccacaatttacagtaacccccaaggatcaagtggtgctggaagaacatgctgtagagtggctctgtgaagctgacggcaacccacctcctgttattgtctggacaaaaacaggagggcagctccctgtggaaggccagcatacagttctctcctctggcactttgagaattgaccgtgcagcacagcacgatcaaggccaatatgaatgtcaagcagtcagttcgttgggggtgaaaaaggtgtctgtgcagctgactgtaaaacccaaagctcttgcagtgtttactcaacttcctcaggatacaagtgtcgaggttggaaagaatataaacatttcatgtcatgctcaaggagaaccacagcccataattacttggaataaggaaggtgtgcagattactgagagtggtaaattccatgtggatgatgaaggcacgctgactatctacgacgcagggttccctgaccagggaagatatgaatgtgtggctcggaattcttttggccttgctgtgaccaacatgtttcttacagtcacggctatacagggtagacaagctggcgatgactttgttgaatcttccattcttgatgctgtacagagagttgacagtgcaattaactccacacgaagacatttgttttcacaaaaacctcacacctccagtgacctgctggctcaatttcattacccgcgtgacccactgattgtggaaatggcaagagcaggggagatttttgagcacacgctgcagctgatacgggaacgtgtgaagcaggggctcactgtggacttggaaggcaaagaattccggtacaatgacttggtgtccccgcgctccctcagcctcatcgccaatttatctggatgcacagctcgcaggcctctgccaaactgctccaaccggtgtttccatgcgaagtaccgcgcccacgacggcacgtgcaacaacctgcagcagcccacgtggggcgcggcgctgaccgccttcgcgcgcctgctgcagccagcctaccgggacggcatccgcgcgccccgcgggctcggccttcctgtgggctcccgccagcccctcccgccgccccggctggtcgccacagtgtgggcgcgcgcggcggccgtcacccccgaccacagctacacgcgcatgctcatgcactggggctggtttctagagcacgacttggaccacacagtgcctgcgctgagcacagcccgcttctcggatgggcggccgtgcagctccgtctgcaccaacgaccctccttgtttccccatgaacacccggcacgccgacccccggggcacccacgcgccctgcatgctcttcgcgcgctccagccccgcgtgtgccagcggccgtccctctgcgacggtggattcagtctatgcacgagagcagatcaaccagcaaacagcctacatcgatggctccaacgtttacgggagctcggagcgggaatcccaggctctcagagacccttcggtgcctcggggtctcctgaagacaggctttccttggcctccctccggaaagcccttattgcccttttctacaggcccacccaccgagtgcgcgcgacaggagcaggagagcccctgtttcctggccggggaccaccgggccaacgagcatctggctctggccgccatgcacaccctgtggttccgggaacacaacaggatggccacggagctgtccgccctgaacccccactgggagggaaacacggtttaccaggaagccaggaagatcgtgggcgcggagctgcagcacatcacctacagccactggctgcctaaggtcctgggggaccctggcactaggatgctgaggggttaccgaggctacaaccccaacgtgaatgcaggcatcattaactcttttgctactgcagcctttagatttggccacacattaatcaatcctattctttaccgactgaatgccaccttaggtgaaatttccgaaggccaccttccgttccataaagcgctcttttcaccgtccagaataatcaaggaaggtgggatagacccggttctccgggggctgtttggcgtggctgctaaatggcgggcaccctcctaccttctcagtcctgagctgacccagaggctcttctccgcggcttattctgcggccgtggattcggctgccaccatcattcaaaggggtagagaccacgggatcccaccatatgttgacttcagagttttctgtaatttgacttcagttaagaactttgaggatcttcaaaatgaaattaaagattcagagattagacaaaaactgagaaagttgtacggctctccaggtgacattgacctctggcccgcccttatggttgaagacctgattcctggtacaagagtgggaccaacacttatgtgcctgtttgttacccagtttcagcggctaagagatggagataggttctggtatgaaaaccctggagtatttaccccggcacaactcactcagctgaagcaggcgtccctgagccgggtgctttgtgacaatggtgacagcattcagcaagtgcaggctgatgtctttgtaaaggcagaatacccacaggattacctgaactgcagcgagatcccgaaggtggacctgcgagtgtggcaagactgctgtgcagactgtaggagtagaggacagttcagagcagtgacgcaagagtctcaaaagaaacgctcagctcaatacagctatcctgttgataaggatatggagttaagtcatctaagaagtaggcaacaagataaaatatatgtgggtgaagatgctagaaatgtgacagttctggcaaaaacaaagttctcccaagatttcagcacgtttgcagcggaaattcaggaaaccatcacagcactcagagagcagataaacaagctggaggcacgcctgaggcaggcagggtgtacagatgttagaggggttccaaggaaggccgaggagcgctggatgaaagaagactgcactcactgcatttgtgagagtggccaggtcacctgtgtggtggagatttgtcccccggctccctgtcccagtcctgaattggtgaaaggaacctgctgtccagtttgcagagaccgaggaatgccaagtgattccccagagaagcgctaataaaagttttgtgctgttgagccccaaatgggaaatttctcaggaagagacatttaggacttcagaacttttaacttgtagtcacattgttgatatggaaaccactgacttaagcaacttagttcatctaatcttacatatacttacgatcttttattttttcattttctaacataccttgaaataattcaaaactaaaagcaataaagtgcatatgaagtgtttgatcataagaaatatttcttactgtaagctgtcagttttatatgccacacctggaaataaaaagaatatcatggaatatttaaaaaa

SEQ ID NO: 624 - DNA, 1487 bp, Homo sapiens
  source 1..1487: mol_type = genomic DNA
atatcacctgagagagttcccaagtctacaattgctctactagttactattcagtgtttgtgaaaaattttaatctcagtactgtgaagaagctggaaaaagggatattatggggctaaaagctctctgtttggggctgctttgtgttctttttgtctctcatttttacacacccatgccagacaacattgaagaaagctggaaaataatggccttggatgccatcgctaaaacttgtacatttacggctatgtgttttgaaaatatgcgtattatgagatatgaagagtttatatccatgatattcaggctggattatacccaaccactttcagatgaatacatcacagtgactgatacaacatttgttgacattccagtacgattgtacttgccaaaaagaaagtcagaaacccgaaggcgagctgtgatatattttcatggtggtggtttttgttttggaagttccaaacagagggcttttgacttcctgaatagatggacggcaaacacgcttgatgctgttgttgtaggcgtggactataggctggctcctcaacaccactttcctgctcagtttgaagatggccttgctgcagtcaaattttttcttttggaaaaaattcttacaaaatatggagtggatcccacccgaatctgcattgcgggagacagttctgggggcaatttagcaacagcggtcactcaacaggtgcagaatgatgctgaaataaaacataaaatcaagatgcaagtcttactttaccctggcttacagataacagattcttatttgccatctcaccgagaaaatgagcatggtatagttttgaccagggatgtagccataaaactcgtgagcttatatttcaccaaggatgaagcacttccctgggcaatgagaagaaaccaacacatgcctctggagtcaagacatctgtttaagtttgttaactggagtattcttcttcctgagaagtatagaaaagactatgtatatactgaaccaattcttggaggacttagttattcattgccaggacttacagacagcagagcattacccttgttggccaatgattctcagttacagaatttgccactaacctatattcttacttgtcaacatgatctcttaagagatgatggacttatgtatgttacaagacttcgaaatgttggagtccaagttgttcatgaacatattgaggatggaattcatggagctttatcattcatgacttcaccattttatttacgtctaggtcttaggataagagatatgtatgtaagttggctggataagaatttataaatatgtgatgtgtatgtatagcccttacatagtggattgtaatttgtgatattttgtggttttggagcaaagaacaatgtcatttgagttatctaaatctacatttgcaacatttgtagcagttaatgtgtgtccttgaagagttattaaattttctgacttgcagaccctg

SEQ ID NO: 625 - DNA, 642 bp, Homo sapiens
  source 1..642: mol_type = genomic DNA
ggaataatttcagtaggattggcaccagctcttctttatatgtctggtagaatttggctgtgaatccatctggtccagggccttttctggggctccatggttcctagaggcaaggaagaagagccaccagtcaaataggtttcagcacctccaactccaacatcttcaaagcagcgactgggaagaaaaataatccttctgacaacacatattcagacacatatggtcagcctcatgaagctctggatacccatgctcatgacattcttctgtacggtgctactgtctgtgctgggagaaatgaggaagaaaagatatgacaggaaggaattgttacttgaagaatgctggggaaagccaaatgtcaaagaatgtaccaataagtgttctaaagcctttagatgtaaagacaaaaattacacatgctgctggacctattgtggaaacatctgctggataaacgtcgaaaccagtggagattactaaaaccgtagcttcccaccaggctgccacctgtgtgggctgggaaatgtttaagaggtctcatagtagtaccctgtggctacttttaggaacaccagtctatttttactgagagctggacaacagcaaacacttgacaaataaacttatttaccagta

SEQ ID NO: 626 - DNA, 1989 bp, Homo sapiens
  source 1..1989: mol_type = genomic DNA
gagggggcgggaggagagaggcagctcggctcggctccgcgctcagctccgctctgcctccggctctgcgctcacctgctgcctagtgttccctctcctgctccaggacctccgggtagacctcagaccccgggcccattcccagactcagcctcagcccggacttccccagccccgacagcacagtaggccgccagggggcgccgtgtgagcgccctatcccggccacccggcgccccctcccacggcccgggcgggagcggggcgccgggggccatgcggggccagggccgcaaggagagtttgtccgattcccgagacctggacggctcctacgaccagctcacgggccaccctccagggcccactaaaaaagcgctgaagcagcgattcctcaagctgctgccgtgctgcgggccccaagccctgccctcagtcagtgaaacattagccgccccagcctccctccgcccccacagaccccgcctgctggacccagacagcgtggacgatgaatttgaattgtccaccgtgtgtcaccggcctgagggtctggagcagctgcaggagcaaaccaaattcacgcgcaaggagttgcaggtcctgtaccggggcttcaagaacgaatgtcccagcggaattgtcaatgaggagaacttcaagcagatttactcccagttctttcctcaaggagactccagcacctatgccacttttctcttcaatgcctttgacaccaaccatgatggctcggtcagttttgaggactttgtggctggtttgtccgtgattcttcggggaactgtagatgacaggcttaattgggccttcaacctgtatgaccttaacaaggacggctgcatcaccaaggaggaaatgcttgacatcatgaagtccatctatgacatgatgggcaagtacacgtaccctgcactccgggaggaggccccaagggaacacgtggagagcttcttccagaagatggacagaaacaaggatggtgtggtgaccattgaggaattcattgagtcttgtcaaaaggatgagaacatcatgaggtccatgcagctctttgacaatgtcatctagcccccaggagagggggtcagtgtttcctggggggaccatgctctaaccctagtccaggcggacctcacccttctcttcccaggtctatcctcatcctacgcctccctgggggctggagggatccaagagcttggggattcagtagtccagatctctggagctgaaggggccagagagtgggcagagtgcatctcggggggtgttcccaactcccaccagctctcacccccttcctgcctgacacccagtgttgagagtgcccctcctgtaggaattgagcggttccccacctcctacccctactctagaaacacactagacagatgtctcctgctatggtgcttcccccatccctgacctcataaacatttcccctaagactcccctctcagagagaatgctccattcttggcactggctggcttctcagaccagccattgagagccctgtgggagggggacaagaatgtatagggagaaatcttgggcctgagtcaatggataggtcctaggaggtggctggggttgagaatagaagggcctggacagattatgattgctcaggcataccaggttatagctccaagttccacaggtctgctaccacaggccatcaaaatataagtttccaggctttgcagaagaccttgtctccttagaaatgccccagaaattttccacaccctcctcggtatccatggagagcctggggccagatatctggctcatctctggcattgcttcctctccttccttcctgcatgtgttggtggtggttgtggtgggggaatgtggatgggggatgtcctggctgatgcctgccaaaatttcatcccaccctccttgcttatcgtccctgttttgagggctatgacttgagtttttgtttcccatgttctc

SEQ ID NO: 627 - DNA, 2697 bp, Homo sapiens
  source 1..2697: mol_type = genomic DNA
tccctcccccctccctgccctcctcctcctcctcccctatgtggtgctcccgggagcccagcccaacactggagcgtctcctgctcgcgcacgccagaagcagctcggggtctctccgccgccccttggccatggccgctgtgccgacggcgcccgctcccctgcgctccaggggcccccgccgctgcagccgcagccgccgcagcttctgagcccaaggggccgccgctgcagccgccgccgccgccgctcgcccgcccggatcccgcctgcggcagttgccgcacaacatgctacctgcggccgccccggcggctcctggaaccccggttcgcggcgatgccagccaccccagcgaagccgccgcagttcagtgcttggataatttgaaagtacaatagttggtttccctgtccacccgccccacttcgcttgccatcacagcacgcctatcggatgtgagaggagaagtcccgctgctcgggcactgtctatatacgcctaacacctacatatattttaaaaacattaaatataattaacaatcaaaagaaagaggagaaaggaagggaagcattactgggttactatgcacttgcgactgatttcttggctttttatcattttgaactttatggaatacatcggcagccaaaacgcctcccggggaaggcgccagcgaagaatgcatcctaacgttagtcaaggctgccaaggaggctgtgcaacatgctcagattacaatggatgtttgtcatgtaagcccagactattttttgctctggaaagaattggcatgaagcagattggagtatgtctctcttcatgtccaagtggatattatggaactcgatatccagatataaataagtgtacaaaatgcaaagctgactgtgatacctgtttcaacaaaaatttctgcacaaaatgtaaaagtggattttacttacaccttggaaagtgccttgacaattgcccagaagggttggaagccaacaaccatactatggagtgtgtcagtattgtgcactgtgaggtcagtgaatggaatccttggagtccatgcacgaagaagggaaaaacatgtggcttcaaaagagggactgaaacacgggtccgagaaataatacagcatccttcagcaaagggtaacctgtgtcccccaacaaatgagacaagaaagtgtacagtgcaaaggaagaagtgtcagaagggagaacgaggaaaaaaaggaagggagaggaaaagaaaaaaacctaataaaggagaaagtaaagaagcaatacctgacagcaaaagtctggaatccagcaaagaaatcccagagcaacgagaaaacaaacagcagcagaagaagcgaaaagtccaagataaacagaaatcggtatcagtcagcactgtacactagagggttccatgagattattgtagactcatgatgctgctatctcaaccagatgcccaggacaggtgctctagccattaggaccacaaatggacatgtcagttattgctctgtctaaacaacattcccagtagttgctatattcttcatacaagcatagttaacaacaaagagccaaaagatcaaagaagggatactttcagatggttgtcttgtgtgcttctctgcatttttaaaagacaagacattcttgtacatattatcaataggctataagatgtaacaacgaaatgatgacatctggagaagaaacatcttttccttataaaaatgtgttttcaagctgttgttttaagaagcaaaagatagttctgcaaattcaaagatacagtatcccttcaaaacaaataggagttcagggaagagaaacatccttcaaaggacagtgttgttttgaccgggagatctagagagtgctcagaattagggcctggcatttggaatcacaggatttatcatcacagaaacaactgttttaagattagttccatcactctcatcctgtatttttataagaaacacaagagtgcataccagaattgaatataccatatgggattggagaaagacaaatgtggaagaaatcatagagctggagactacttttgtgctttacaaaactgtgaaggattgtggtcacctggaacaggtctccaatctatgttagcactatgtggctcagcctctgttaccccttggattatatatcaacctgtaaacatgtgcctgtaacttacttccaaaaacaaaatcatacttattagaagaaaattctgattttatagaaaaaaaatagagcaaggagaatataacatgtttgcaaagtcatgtgttttctttctcaatgagggaaaaacaattttattacctgcttaatggtccacctggaactaaaagggatactattttctaacaaggtatatctagtaggggagaaagccaccacaataaatatatttgttaatagtttttcaagttttgttcactctgttttattgtttgttttattgagaaattcttactcttagagactcatgaattaagaaagagaattctgctaactcagagaacctggttcctatgtaattcagaatatattacatttctcagtaatatttgttttttgaatccacctttatctgagccaatggagatttacttatagcgtattaggagatatttattccattttcttattttaatcaacattctaattatagacacatgggcct

SEQ ID NO: 628 - DNA, 294 bp, Homo sapiens
  source 1..294: mol_type = genomic DNA
atggccaaatctttcccagtattctcacttttgtcctttatcttgatacatttggtgttatcttctgtttcaggccctagacactggtggccaccacgtggaattattaaggtgaaatgtccatatgagaaagtaaacttgagctggtacaatggaacggtcaacccctgccctggcttatatcaacccatctgcggcaccaattttataacctatgataatccctgcattctgtgtgttgagagcttgaaatctcatggaagaatcaggttttaccatgatggaaaatgttag

SEQ ID NO: 629 - DNA, 1268 bp, Homo sapiens
  source 1..1268: mol_type = genomic DNA
ccaggcaggggagcagatgagggaggagccttagagctggagcaaagtgaggaagctgtctccatagggaagaggcctgatgtggactgtccgaactgaaggagggcactttcctctccatagccccaccttctcctggaggaatgtagctttcctgctgcttctctcccttgctttggagtggacttctgcaatgctgaccaagaagatcaaacacaaaccagggttatgtcccaaagagaggctcacctgtaccactgaacttccggactcatgtaacacagattttgactgcaaggaataccagaagtgctgcttttttgcctgtcagaagaagtgcatggatccctttcaagaaccctgcatgctacctgtgaggcatggaaactgtaatcatgaggcacagcgctggcattttgactttaaaaattaccgctgcacacccttcaaatacaggggctgcgaagggaatgccaacaacttcttaaatgaggatgcctgcagaacggcctgcatgttaattgttaaggatggacaatgcccactcttccctttcactgaacgtaaggagtgtccaccttcatgtcacagtgacatcgattgtccccagacagacaaatgttgtgaatccaggtgtggctttgtttgtgccagggcctggacagtcaaaaaaggtttctgcccacgcaagcccttgctatgtaccaagattgataaacccaagtgcctgcaggatgaggagtgcccattggtggaaaagtgctgctcacattgtggactgaaatgtatggaccccagacgttgaataacggagttttgctcttattgcccaggcgcaatctcggctcactgcaacctctgcttcccgggttcaagtgattctcctgcctcagcctcccaagtagctgggattacaggtgcccaccatcatgcccagctaattttttgtatttttagtagagatggggttttaccatgttggccaagctggtcacaaactcctgacctcaggtgatccacccacctcagcctccgaaagtgctgggatcacaggtgggagccactgtgcctggccagttatttcctttttaagcctatttcctatccatttatagctactactgaaaatgactactgaattttatcaaataccttttaagcatacagtcacataatgatttttctcttctaatttgttggcataataaattactaaattttcttgagccatccttgcattcttaataaacttaattgcagactgctgt

SEQ ID NO: 630 - DNA, 2241 bp, Homo sapiens
  source 1..2241: mol_type = genomic DNA
cgcgagcgccccgggaggggaccggggctgccgtccctccgcctcttcccccgcggggcgtagcgatggcccgggccagggccggggcgctgctggcgctttgggtgctcggggccgccgcgcatccgcagtgcctggacttcaggccgcccttccggccgacgcagccgctgcgcctctgcgcgcagtactcggacttcggctgctgcgatgaggggcgcgacgccgagctgacccgccgcttctgggccctggcgagccgcgtggacgccgccgagtgggccgcgtgcgccggctacgcgagggacctgctgtgccaggaatgctcgccgtatgcagcccacctctatgacgccgaggacccattcacgcccctgcgcacggtgcccgggctctgccaggattactgcctggacatgtggcataagtgccgggggctgttccgtcacctgtcaactgaccaggagctctgggcgctggagggcaaccttgccaggttctgccgctacctgtccctggatgacacggactactgcttcccttacctgctggtcaacaagaacctcaactcaaacctgggccacgtggtagccgatgccaagggctgcctgcagctgtgcctggaggaggtggccaacgggctgcgcaaccccgtggccatggtccatgccagggatggcacccaccgcttcttcgtggccgagcaggtggggctggtgtgggcctacctgcccgaccgctcgaggctggggaagcctttcctgaacatcagccgggtggtgctcacctcgccctgggagggtgacgagcgtggcttcctgggcattgccttccaccccagcttccagcacaaccgcaggctctacgtctactactcagtgggtatccgcagcagtgagtggatccgcatcagcgagttcagagtctccgaggatgacgagaacgccgtggaccacagctctgagaggataatcctggaggtcaaagaaccagcctcaaaccacaacgggggccagctgcttttcggggatgacgggtacctctacatcttcactggagatggcgggatggccggagacccctttgggacatttggaaatgcccaaaacaagtcggcgctgctgggcaaggtgctgcgcatcgacgtggaccgtaaggagcgcggcctgccctacggcatcccgcccgacaacccgttcgtgggcgaccccgcggcgcagcccgaggtctacgccctgggcgtgcgcaacatgtggcgctgctccttcgaccgtggcgacccctcctcgggcactggccgcgggcgcctcttctgcggcgacgtgggccagaacaagttcgaggaggtggacgtggtggagcgcggcggcaactatggctggcgcgcgcgcgaagggttcgagtgctacgaccgcagcctgtgcgccaacacctctctcaatgacttgctgccgattttcgcctacccgcacacggttggcaagtcggtcacagggggctacgtgtaccggggctgcgagtaccccaacctgaacggcctctacatttttggggatttcatgagcgggcgtctgatgtccctccaagagaacccagggacaggccagtggcagtacagtgagatctgcatgggccacggccagacctgtgagttcccaggcctcatcaacaactactacccgtacatcatctccttcggggaggacgaggccggggagctgtacttcatgtcgacaggggagccgagtgccacagctccacgcggagttgtctacaaaataattgacgcatccagctgtaaggccagaagcgccatgcccggctatgtcccagctccttccgtgtgcagctcattgacgtctcagccgttcattttacagtggtggaaatgagcacaaagacacgaagtcatgggcctggggcccagggccagggtggggcccaggccactggctccagagccctgccctaaccccttggctgtgtgccttcacctcaccctcttcaagcaccttccccaacccacgttgccctccaggcctctgtccagcccttcctcagctctcatcactcagacttggtaatccctgggctacacgactgactctctcccagctgctctgggagtctcagggccaagcctgtatctcttcactctgcagaggccgcccaggtgctgggaatggcacggagcagagactcaggaacacttgatgaataaatgagtgatcagctttctaa

SEQ ID NO: 631 - DNA, 938 bp, Homo sapiens
  source 1..938: mol_type = genomic DNA
gaggagccagagagagctgcggagagctgccagctgcagcgggcgtgttccgcagctgtaggcacctgtcgtcctgccttcgatggctcctccctccgtccccctggtcctcctcctcgtcctcttgctgagcctggcagagactccagcatccgcacctgcccaccggggacgaggaggctggaccctcaatagtgctggctaccttctgggtcccgtcctccaccttccccaaatgggtgaccaagacggaaagagggagacagcccttgagatcctagacctgtggaaggccatcgacgggctcccctactcccaccctccacagccctccaagaggaatgtgatggagacgtttgccaaaccagagattggagatctgggcatgctcagcatgaaaattcccaaggaggaagatgtcctgaagtcatagatgtcttcaaatccctgttcctatccttcttctccagctcctcctgctccctctgaaaccttttctaggtaccctatgctgagactaagatcctgaagttaaatacccaggtctcatgaagacattgtaaagcatttgaattattctaaaaaatttctggagtttcttaggttttattgattcatccttgaaatcagtataatgtgctattaatggaaccaatagtaattcgaggactagttgggagattctggggtaatcagggaatattcctgcaacacatttaaaggaattgtgttcttttggaatcatcccaattataacacgagctattgcataatacaaataaccctcttaagtctgagagtctgtgtctttatttgaaaagattcttcaaattgcgtacttactcctccatattctttcaacccacatgagtctcctcgagaagtgaggagaggcagtttggagcagaatggagagaataaaatgtttcttgtcaaac

SEQ ID NO: 632 - DNA, 6052 bp, Homo sapiens
  source 1..6052: mol_type = genomic DNA
gtggcggcagcggcagcagcggcggctccattccccctcctcccccgggagcggcggcggcggccgggccggggccccagcgcgggccgggagggggcacggcggaggccacggaggcaggcgcgggagaagaccgcgctccgcttcccgggccgcgccgacctgctcggcggcctgcccgcccgcgcccaggggccccgaacggtggggccgggcaggcggctgaggcctgtcccctcagttcccaggtgccatgaggaagcctcgtcggaagtcccggcagaatgccgagggccggcgttccccgtccccctacagtctcaagtgctcacccacccgggagaccctgacatatgcccaggcccagcggattgtcgaggtagacattgatggacgcctgcatcgtatcagcatctatgacccactcaaaatcattactgaagatgagctaactgcccaggatatcaccgaatgcaatagtaacaaggaaaacagtgaacagcctcagttccctggcaagtccaagaaaccctcatccaagggcaaaaagaaggaatcctgctccaagcatgcatctggtacttccttccacctcccacagcccagcttccgtatggtggactcaggcatccagccagaagcacccccgctgcctgctgcctactaccgctacattgagaagccacctgaagacctggatgcagaggtagagtatgacatggatgaggaggaccttgcctggctggacatggtgaatgaaaaacggcgagtagatgggcacagtttggtgtctgcagatacctttgagctgctggtagaccggcttgagaaagagtcatacttggagagtcgcagcagtggggcccaacagtcactcatcgatgaagacgctttctgctgtgtgtgcctggatgatgaatgtcacaatagcaatgttattctcttctgtgacatctgcaacctggctgtacaccaggagtgctatggcgtcccatacatccctgagggccagtggctatgccgctgctgcctgcagtctccctcccggcctgtggattgcatcctttgccccaataagggtggcgccttcaaacagaccagtgatgggcactgggcccatgtggtgtgtgccatctggatccctgaagtctgctttgctaacaccgtgttcttggaacctattgagggcattgacaatatcccgcctgcccgctggaaactaacctgctatatctgcaagcagaaagggctaggtgcagccatccagtgccataaggtgaactgctacacagcattccatgtgacatgtgcacagcgggctgggctcttcatgaagattgagcccatgcgcgaaaccagcctcaatggcaccatctttacagtgcgcaagactgcctactgtgaggcccactcgccaccaggtgcggccactgctaggaggaagggcgactcccctagaagcatcagtgagactggcgatgaggaagggctgaaggagggtgatggagaggaggaagaagaggaagaggtggaggaagaagagcaggaagctcaaggcggggtgagtggctccctcaagggagtgcccaagaaaagcaagatgagtttgaagcagaagatcaagaaggagccagaggaagcaggccaagacacaccctccactctccccatgcttgctgtcccacagataccctcttacaggttgaacaagatctgtagtggtctctcctttcagaggaaaaaccagtttatgcagcggcttcacaattattggctgttgaagcggcaggcacggaatggtgtccctcttatccggcgcttgcactcccatctgcagtcccaaagaaacgctgagcagcgagagcaggatgagaagacaagtgcagtgaaggaggagctgaagtattggcagaagctccggcatgacttggagcgggcgcggctgctgattgagctgattcggaagagagagaagctcaaacgagagcaggtcaaagtccagcaggctgccatggagctggagctgatgccattcaatgttctgttgaggacaacactggacctgctgcaggagaaggatcctgcacacatcttcgcagaaccagtcaacttgagtgaggttccagattacctggaattcatatccaagccaatggatttttctactatgaggcggaagctggagtcccacctgtaccgcaccttggaggagtttgaggaggactttaaccttatagttaccaactgcatgaagtataatgctaaagacacaattttccaccgagcagctgtccgcctgcgggacctgggaggggccatcctacggcacgcccggcggcaggcagagaacatcggctatgaccccgagaggggcactcacctgcccgagtcacccaaattggaagacttttaccgcttctcctgggaagacgtggacaacatcctcatcccagagaaccgggcccatttgtccccagaggtgcagctgaaggagctgctggagaaactggacctggtgagcgccatgcggtccagtggggcccgcacccgtcgtgtccgcctgctacgccgggagatcaatgcccttcggcagaagctggcacagccaccaccaccacagccaccatcactcaacaagacagtatccaatggggagctgccagcagggccccagggggatgcagctgtgctggagcaggccttgcaggaggagccagaagacgatggggacagagatgactccaaactgcctcctccgccaaccctggagcccactgggcctgcaccttccttgtctgagcaagaatcccccccggagccccctactctgaaacccattaatgatagcaaacctccaagcaggttcctaaagcccagaaaggtggaagaagatgagctcttggaaaaatcaccactgcagctagggaatgagcctttgcaacgcttgctcagtgacaatggcatcaacagactatccctcatggcccctgacaccccggccggtaccccacttagtggtgtgggtcgccgcacatcagtcctcttcaagaaggccaagaatggggttaagctacagagaagcccagacagggtcctggagaatggcgaggaccatggtgtggcaggctctcctgcctctccagccagcatcgaggaagagcgccactcccggaagcggccaaggagcaggagctgtagtgagagcgaaggggagaggtccccccagcaggaggaagagacaggcatgaccaacggctttggaaaacacaccgaaagcgggtctgactctgaatgtagtttgggtctcagtggtggactggcatttgaagcttgcagtggtctgacgccccccaaacgcagccgtgggaagccagccctgtctcgagtgcccttcctggaaggtgtgaacggagactctgactacaatggctcaggcagaagcctcctgctgccctttgaagaccgcggagacctggagcccttggagctggtgtgggccaagtgccgaggctacccctcctaccctgccttgatcatcgatcccaagatgccccgggagggcctcctgcacaatggcgttcccatccctgtccccccgctggacgtgctgaagctgggagagcagaaacaggcagaggctggagagaagctcttccttgtcctcttctttgacaacaagcgcacctggcagtggcttccaagggacaaagtcctgcccttgggtgtggaagacaccgtggacaagctcaagatgctggaaggccgcaagaccagcatccgcaagtcagtgcaggtggcctatgaccgtgcgatgatccacctgagcagagtccgggggccccactccttcgtcacttccagctacctgtaagggcagggctgggcctgcatccgcttgccctgcctccatcccgcagggcacagagaagcctcttctgcccctgccagatgtatggccggcagcttccccctctcatggtaggccagggactgggctttctccccactaagggcaaggccccagttttgaccaatcgcatggttctcctggcaggcctgctgtgtgccaaaaactcccacccaaggtccctcaggggatatttcactgaagaaccagttagaagtagaaacagctgtggggcttgggcccagcttaggagattgcccagatggcaagaggtcctgggctccttcttgaggggctgcctggcccgctccatcctactcccactaactacacctcagggcgggtgaggttccgacactgatcccagagatgccgtggatacgccagggtcccagggggaatctccccaagctcacactctctcccgcttatcgcctattctcacacctcttctcggtcccatcttctgcacccattgcccagtcttgctttctctttcccatattccttttctttttctcttgtgccaaactgacagaaaccgtcaccacactggtctttttctttaatgtctcattccccttgaggccagctgctatgccaggtggtgtctctgccaggctcctcaggcccagacagaggccagcccacaacctatgaccccctcccccaggacaccacctcccacccacagaccttccctttagctgttgacacaacttcccagctctgcaagtgtgccccctggatcaaggcgggtcccctcttgtttttttctttgctgccacgaggtggtccaagccttcagggtgggctcctatcaggctgggtgtgcgagtgtccatctgtccacatggatgtcgagggtggtttgtgtggagctgtgctcgtcagctgggtctgccctcttcccccttttctccttcttctctcctcatggactttttctgcaattgcagtcttaagcttcactctccaccacctggatggcatggcgcctgccaccaaacatcttcctggcctgcgctctgccctgccctgcctagcctctgctactcccacttcccaactccagggaatgcattacttttatttcaaaccctctgcctccttccttctttctcttcaaccccctccccaccttcaccttctcaaaaatggaaggaaaaaaaaactgtgaatggggaatgctgactgacaaaccaacacaactttcagaggcttcagtgtctgttctctggacatttcttttcacctcctgagcaccaaagtcgcagggccagttgcaggccgctgattgccatgttgatttttaacctgatattctttttaattgttttaaatttttcataggggagttttggacaaaacagtcactggggagatcactgccatttttacacacttgactttttaaaaatacaaccaaccaaccaccacaacttcttatacatttgggacatgagccagagtttaaaagggaaccaacaaaacactataacttaaaaggatggggttttggattttgtataataataaaaacaatacagcatatggctagggaaggacatggtgtatataattgtaaaatactgttctaaattattcaggcctatagtttccattactggagtcctccattgtgtggccacacagtgtcgttgatttaaaggagccagtgcttcccctctccccaggtagttggtcagctgtggactctgtgacctttgtctaaacctgtgttgtaagatcttgggacttcctctctttctatgtctatctcttccccccaacactttctcttcttagtctctctctttatttttcaatctctgaatattttagtctctctctgagtctcattttttaaaatgctcttttagaacgggaaacggctcagatcctgctgtggcacggggcctatgtgtctctgtcgcgtctgctgtgaagcacatgatgctctatttattgtagagagtgactttatttgctttctagaattgtttataacagatggtataagagaggtaataaacagagaaaaatctatgcttgtaaagaatacaaaagttaattttacctactataatatgactgtctgaaacttattttctctctgagaaataaatgttctaatgggcagta

SEQ ID NO: 633 - DNA, 3403 bp, Homo sapiens
  source 1..3403: mol_type = genomic DNA
agaacagaggctgagctcgaagcgccgggcagtacagtgagggagagccgagggaaccagcgcggtgcctagcggaactccagggctggaatcccgagacacaagtgcatctgctagctgttagcacttggcagacggagttctcctctagggtagttctaactttgggtaataatgtttgtcagctacctgatattaacattgctccacgttcaaacagcagtgttagcaagacctgggggagagagcattggctgtgatgactacttaggctccgacaaagtcgtggacaaatgtggggtgtgtggaggagacaacacgggctgtcaggttgtgtcgggcgtgtttaagcatgccctcaccagcctgggctaccaccgcgtcgtggagattcccgagggagccacgaaaatcaacatcacggagatgtacaagagcaacaactatttggccctgagaagtcgttctggacgctccatcatcaatgggaactgggcaattgatcgaccaggaaaatacgagggcggagggaccatgttcacctacaagcgtccaaatgagatttcgagcactgccggagagtcctttttggcggaaggtcccaccaacgagatcttggatgtctacatgatacaccagcagccaaacccaggcgtgcactacgagtacgtgatcatggggaccaacgccatcagcccccaggtgccaccccacaggagaccaggggaacccttcaatggccagatggtgacagaaggcaggagccaggaggagggagaacagaaagggaggaacgaggagaaggaagacttgcgtggggaggcccctgagatgttcacctcagaatcggcacagaccttcccagtcaggcatccagacagattttctccccatcgaccggacaacttggtgccaccagcaccgcagcccccacggcgcagccgggatcacaactggaagcagcttgggacaacagaatgttccacgacctgtgggaaaggatcgcagtaccctattttccgctgtgtgcacagaagcactcatgaagaggctcctgagagttactgtgactccagcatgaagccgacccccgaggaggagccctgcaacatcttcccttgcccagccttctgggacatcggggagtggtctgagtgcagcaagacctgtggcctgggcatgcagcaccgccaggttctgtgccgccaggtgtacgccaaccgcagcctgacggtgcagccctaccgctgccagcacctggagaaacctgagaccaccagcacctgccaactcaagatctgcagcgagtggcagatccggaccgactggacctcgtgctcggtgccctgcggcgtgggacagaggacccgtgatgtgaagtgtgtgagcaacattggggatgtggttgacgatgaggaatgcaacatgaagctccggccgaatgacattgagaactgcgacatgggaccctgtgccaagagctggttcctcaccgagtggagcgaaaggtgctcagcggagtgtggggccggagtgcggacacgctcggtggtgtgcatgaccaaccatgtcagcagcctgcccctggagggctgtgggaacaaccggccggcagaggccaccccatgtgacaacggaccctgcacgggcaaggtggagtggtttgccgggagctggagtcagtgttccatcgagtgtgggagcgggacgcaacagagggaggtgatttgtgttagaaagaatgcagacacctttgaagtgttggacccctctgaatgttctttcctggagaaaccccccagccagcaatcctgccacctcaagccttgcggagccaaatggtttagcaccgaatggagcatgtgttccaagagctgccagggtggctttcgggtccgggaagtgcggtgtctgtctgatgacatgactctaagtaacctctgtgaccctcagttgaaaccagaagagagagaatcttgtaaccctcaggactgtgtccctgaagttgatgaaaactgcaaggacaagtactacaactgcaacgtggtggtccaggcaagactctgtgtctacaactactacaagaccgcctgctgtgcctcctgcacccgtgtggccaacaggcagacgggcttcctggggagcagataacactcctgcacccccatcagtagggcagcatcactgccttcccgggggcttcagcagtgcgcctggctggctgctgctccaccacgggccccctggcccaggcgctgccaaccaacttagtcaccacccctgcctccggtgaatgcaccccgtggtacccaggggctttttacacaagatgtttgaaagccacagtcagtcctttaagcatcaccatgtactgatgatcccctccttggacctggcatctgctaatggtgccctttgaaagtcaagcagtgggaagtacatggagctctcagccctgctcccatctggcaccttcaagtcagcagatgggccactgactgagcactgccccgtccctggtgctactggtctttctaaacttagcaccctggagagtccaaggaggcagcgcccccaacccagcgccccactaagccttgctgacacgcgtgcatccctctgtgacctcagcccagatgtgcctgttttcattctcaaagacattagactgttttcctgccctatgacacagatagctcacatgaatattgtgctttatttagcaggtgtactcacagatactagctccttagcagctcacaacatcccagaatgggaggcagggggtgactcattatccccattttactgacagggaaactgaggctcaacttaagtaattgacctgccaggtatattcacccatccagtggaagagctgagtccccgccccagtcatctaccagtatccagcctggggcctgtacttagatgtgaaaggtgctgcttcatttctgaccaagagactgagaagtttcccagaatgcaaacaaagcccaggcccctgaaatctttccggtcaagcctttatcccagcactcagttgttttggatgtctgttcctacttgcccttacccccaaagttacagatcctagttacaggactctgccagctttgttaaactgtccgtgagacaagaaagccattggggaaaccaggtgattgcctgaaattcttactccgttccaagtgctgttcctcccaggaaatcaaaggccagggtccttatggccgtggagccttcccgaccacagagccaacttgtgaagcacacagctctgcagcctgggctctgccctgcctcagccgcctcccccacgctcttcaccacgttcctggagagtccggccaacctgtcccagccgaaacactgctgtattagaaaaagtctctttctggtc

SEQ ID NO: 634 - DNA, 1088 bp, Homo sapiens
  source 1..1088: mol_type = genomic DNA
tttgcccgactggccgcgcacccagctggcccgcccctgcccgacacgaccgctgcccgccccttgccttcctgacccaggggctccgctggctgcggtcgcctgggagctgccgccagggccaggaggggagcggcacctggaagatgcgcccattggctggtggcctgctcaaggtggtgttcgtggtcttcgcctccttgtgtgcctggtattcggggtacctgctcgcagagctcattccagatgcacccctgtccagtgctgcctatagcatccgcagcatcggggagaggcctgtcctcaaagctccagtccccaaaaggcaaaaatgtgaccactggactccctgcccatctgacacctatgcctacaggttactcagcggaggtggcagaagcaagtacgccaaaatctgctttgaggataacctacttatgggagaacagctgggaaatgttgccagaggaataaacattgccattgtcaactatgtaactgggaatgtgacagcaacacgatgttttgatatgtatgaaggtgataactctggaccgatgacaaagtttattcagagtgctgctccaaaatccctgctcttcatggtgacctatgacgacggaagcacaagactgaataacgatgccaagaatgccatagaagcacttggaagtaaagaaatcaggaacatgaaattcaggtctagctgggtatttattgcagcaaaaggcttggaactcccttccgaaattcagagagaaaagatcaaccactctgatgctaagaacaacagatattctggctggcctgcagagatccagatagaaggctgcatacccaaagaacgaagctgacactgcagggtcctgagtaaatgtgttctgtataaacaaatgcagctggaatcgctcaagaatcttatttttctaaatccaacagcccatatttgatgagtattttgggtttgttgtaaaccaatgaacatttgctagttgtatcaaatcttggtacgcagtatttttataccagtattttatgtagtgaagatgtcaattagcaggaaactaaaatgaatggaaattcttaaa

SEQ ID NO: 635 - DNA, 2489 bp, Homo sapiens
  source 1..2489: mol_type = genomic DNA
aaagggtggggggcgggggtagggggagccaatcccggcagcgccaaagaggggaggaggcggtgacagccgcggggagggggcgggaggagagaggcagctcggctcggctccgcgctcagctccgctctgcctccggctctgcgctcacctgctgcctagtgttccctctcctgctccaggacctccgggtagacctcagaccccgggcccattcccagactcagcctcagcccggacttccccagccccgacagcacagtaggccgccagggggcgccgtgtgagcgccctatcccggccacccggcgccccctcccacggcccgggcgggagcggggcgccgggggccatgcggggccagggccgcaaggagagtttgtccgattcccgagacctggacggctcctacgaccagctcacgggccaccctccagggcccactaaaaaagcgctgaagcagcgattcctcaagctgctgccgtgctgcgggccccaagccctgccctcagtcagtgaaaacagcgtggacgatgaatttgaattgtccaccgtgtgtcaccggcctgagggtctggagcagctgcaggagcaaaccaaattcacgcgcaaggagttgcaggtcctgtaccggggcttcaagaacgaatgtcccagcggaattgtcaatgaggagaacttcaagcagatttactcccagttctttcctcaaggagactccagcacctatgccacttttctcttcaatgcctttgacaccaaccatgatggctcggtcagttttgaggactttgtggctggtttgtccgtgattcttcggggaactgtagatgacaggcttaattgggccttcaacctgtatgaccttaacaaggacggctgcatcaccaaggaggaaatgcttgacatcatgaagtccatctatgacatgatgggcaagtacacgtaccctgcactccgggaggaggccccaagggaacacgtggagagcttcttccagaagatggacagaaacaaggatggtgtggtgaccattgaggaattcattgagtcttgtcaaaaggatgagaacatcatgaggtccatgcagctctttgacaatgtcatctagcccccaggagagggggtcagtgtttcctggggggaccatgctctaaccctagtccaggcggacctcacccttctcttcccaggtctatcctcatcctacgcctccctgggggctggagggatccaagagcttggggattcagtagtccagatctctggagctgaaggggccagagagtgggcagagtgcatctcggggggtgttcccaactcccaccagctctcacccccttcctgcctgacacccagtgttgagagtgcccctcctgtaggaattgagcggttccccacctcctacccctactctagaaacacactagacagatgtctcctgctatggtgcttcccccatccctgacctcataaacatttcccctaagactcccctctcagagagaatgctccattcttggcactggctggcttctcagaccagccattgagagccctgtgggagggggacaagaatgtatagggagaaatcttgggcctgagtcaatggataggtcctaggaggtggctggggttgagaatagaagggcctggacagattatgattgctcaggcataccaggttatagctccaagttccacaggtctgctaccacaggccatcaaaatataagtttccaggctttgcagaagaccttgtctccttagaaatgccccagaaattttccacaccctcctcggtatccatggagagcctggggccagatatctggctcatctctggcattgcttcctctccttccttcctgcatgtgttggtggtggttgtggtgggggaatgtggatgggggatgtcctggctgatgcctgccaaaatttcatcccaccctccttgcttatcgtccctgttttgagggctatgacttgagtttttgtttcccatgttctctatagacttgggaccttcctgaacttggggcctatcactccccacagtggatgccttagaagggagagggaaggagggaggcaggcatagcatctgaacccagtgtgggggcattcactagaatcttcaatcaacctgggctctccccaccccaccccagataacctcctcagttccctagggtctcttcttgcttgactcaatctacccagagatgccccttagcacacctagagggcagggaccataggacccaggttccaaccccattgtcagcaccccagccatgcggccaccccttagcacacctgctcgtcccatttagcttaccctcccagttggccagaatctgaggggagagcccccagagagcccccttccccatcagaagactgttgactgctttgcattttgggctcttctatatattttgtaaagtaagaaatataccagatctaataaaacacaatggctatgc

SEQ ID NO: 636 - DNA, 1918 bp, Homo sapiens
  source 1..1918: mol_type = genomic DNA
acagtgggcagcccgattttctgctgagtaggcgctgtgatttcagaatgtctgggcgaggtaaaggtggcaaggggctgggtaagggaggcgccaagcgccaccggaaggtgctgcgggacaatatccaaggcattacaaagccggcgattcgccgtctcgcccgacgtgggggcgtcaagcgcatttctggtctcatctacgaggagacccggggagtcctcaaagtcttcctggagaacgtgatccgtgacgcggtgacttacacggagcacgccaagcgcaagaccgtcacggccatggatgtggtgtacgcgctgaaacgccagggtcgcaccctttatggtttcggcggttgagctgtccccacagcttctctacagactccaaaaggcccttttcagggcccccaaactgtcacagaaagagctgttaacacttcctagataacggaccaagtctagctctgccaccgaggctggagtgcagtggcacgatctcgcctccgcctcccgggttcaagcgattcacctgcctcagcttccggagtagctgggattacaggcctgcgccaccacgcctggctaatttttgtattttttttttttttggtagatacggggtttcaccatgttggccaggctggtcttgaactcctggcctcaagtgattcacccgcctccgcctcccaaagtgctggcatttcaggcgtgagccaccacgcttggtcttgctctagctattctaaacatgaagaagtcatatagcttccttggtgcggtgggctgaagtcactctaagggagtttcccagccccaggggttaaagaactggagtcaagattggaacccagctggcgaaggattccgcaccgctagatcttgacatttgcctcttcttctgccaggaaggctcccctgttcctttttgctgacgtgtcatttctaagtactttctcctactccataaagacttcaagtgagtacacaatactggtgttagtttaatttctaagacagtgagacactcggagaagttcaattttctttaatgcaagtgaaaaattgagttacttaaaagaaatagagtctggcatactttcgtgccctcgatatttgttgcatgaccaaatgagtgattttgggtttcacataaattaaggatgaaagttagggccccgatggaggatagaaatactgtagatatttgtatgacaattaaaactcttccttaagtatttaacttatatggaattgtttaaatatttcatggttttggggtttttttttatttttgtagtggtctcaattctttgattagaatagaacttatattttcccttgtagcatagttatttttttgtttgtgttttgttctttataaaatataacctaattatctaaacccaagaaatatttatttttgtctgtgactctgagtcctatggtatagtaagtacccagtcctgacagtaatcatatcttccaaaccaaaactgggtcacacggttcaataactgaacagaatatctcaaactgaaaacgatcaagattttctgaagtttactattaatagtaaaattgcttactaaaaatgttaaagaacttgatttaaaactctgtaatgcctcacttaaaatgtgaatgaggggggcggggtgggggtggctataatgccagcactttgggaaggctgaggcagtaggattgctggaggccaggagtttgagaccagcatggccaacatagtgagaccccatctctacataaaataagaattataaaatgtaaagtgaatggaatgcattgaaatttgatcctgtagcaaagtcatcccttttgaattttgaacatttgtttaatgcctcttttccaagcatattttgaatattcagagataaatgagcaagttactgcca

SEQ ID NO: 637 - DNA, 4885 bp, Homo sapiens
  source 1..4885: mol_type = genomic DNA
ggactccacttgtgtcaaataaataccaatggctgcaaattgaccttggagagagaatggaggtcactgctgtcgccacccaaggaggatatgggagctctgactgggtgaccagctacctcctgatgttcagtgatggtgggagaaactggaagcagtatcgccgagaagaaagcatctggggttttccaggaaacacaaacgcagacagtgtggtgcactacagactccagcctccctttgaagccaggttcctgcgctttctccctttagcctggaaccctaggggcaggattgggatgcggatcgaagtgtacggatgtgcatataaatctgaggtggtttattttgatggacaaagtgctctgctgtatagacttgataaaaaacctttaaaaccaataagagacgttatttctttgaaatttaaagccatgcagagcaatggaattctacttcacagagaaggacaacatggaaatcacattactctggaattaattaaaggaaagcttgtcttttttcttaattcaggcaatgctaagctgccttccactattgctcctgtgaccctcaccctgggcagcctgctggacgaccagcactggcattccgtcctcatcgagctcctcgacacgcaggtcaacttcaccgtggacaaacacactcatcatttccaagcaaagggagattccagttacttggatcttaattttgagatcagctttgggggaattccgacacccggaagatcgcgggcattcagacgtaaaagctttcatgggtgtttagaaaatctttattataatggagtggatgttaccgaattagccaagaaacacaaaccacagatcctcatgatgggaaatgtgtccttctcatgtccacagccacagactgtccctgtgacttttctgagctccaggagttatctggctctgccaggcaactctggggaggacaaagtgtctgtcacttttcaatttcgaacgtggaacagagcaggacatttgcttttcggcgaacttcgacgtggttcagggagtttcgtcctctttcttaaggatggcaagctcaaactgagtctcttccagccgggacagtcaccaaggaatgtcacagcaggtgctggattaaacgatgggcagtggcactctgtgtccttctctgccaagtggagccatatgaatgtggtggtggacgatgacacagctgttcagcccctggtggctgtgctcattgattcaggtgacacctattattttggaggctgcctggacaacagctctggctctggatgtaaaagccccctgggagggtttcagggctgcctaaggctcatcaccattggtgacaaagcggtggatcccatcttagtacagcagggggcgctggggagtttcagggacctccagatagactcctgcggcatcacagacaggtgcttgcccagctactgtgagcatgggggcgagtgttcccagtcgtgggacaccttctcctgtgactgtctaggcacaggctatacgggcgagacctgccattcctctctctacgagcagtcttgtgaagcccacaagcaccgagggaacccgtctgggctttactatattgatgcagatggaagtggccccctgggaccatttcttgtgtactgcaatatgacagcagacgccgcgtggacggtggtgcagcacggtggccccgacgcggtgaccctccgaggtgcccccagcgggcacccgcgctcggctgtgtccttcgcgtacgcagcgggcgcggggcagctgcggtccgcggtgaacctggcggagcgctgcgagcagcggctggctctgcgctgcgggacggcgcggcgcccggactcacgagatggaaccccactgagctggtgggttggaagaaccaatgaaacacacacttcctggggaggttctctgcctgatgctcaaaagtgtacttgtggattagaggggaactgcattgattctcagtattactgcaactgtgatgctggccggaatgaatggactagtgacacaatagtcctttcccaaaaggagcacctgccagtcactcagattgtgatgacagacgcaggccgaccacattccgaagcagcttatacactggggccactgctctgccgcggagatcagtcattctggaattcagcttccttcaacactgagacttcataccttcatttccctgctttccacggagaactcactgctgacgtgtgcttcttttttaagaccacagtttcctccggggtgtttatggagaacctggggatcacagatttcatcaggattgagctgcgtgctcccacagaagtgaccttttccttcgatgtggggaatggaccttgtgaggtcacggtgcagtcacccactccctttaatgacaatcagtggcaccacgtgagggcagagagaaatgttaaaggagcgtctcttcaagttgatcagcttcctcagaagatgcagcctgcccctgctgatgggcacgttcgtttacagctcaacagccagctcttcattggtggaacggccaccagacagagaggctttctaggatgcattcggtctctgcagttgaacggggtggccctggatctggaagaaagagccacagtgacgccaggagtggagccagggtgtgcaggacactgcagcacctatggacacttgtgtcgcaatggagggagatgcagagagaaacgcaggggggtcacctgtgactgtgccttctcagcctatgatgggccgttctgctccaatgagatttccgcatattttgcaactggctcctcaatgacataccattttcaagaacattacactttaagtgaaaactccagctctctcgtttcttcattacacagagatgtaacattgaccagagaaatgatcacactgagcttccgaaccacacgaactccgagcttattgctgtatgtgagctctttctatgaggaatacctttcagttatcctcgccaacaatggaagtttgcagattaggtacaagctagatagacatcaaaatcctgatgcatttacctttgattttaaaaacatggctgatgggcaacttcaccaagtgaagattaacagagaagaagctgtggtcatggtagaggtaatcccacaaatgcaaaagtcaaactaactaatattattattttaagaacaaataatctaatgaaaaaatttgataatattaatagaagagcaacccattcagtgctgctcttccataagtcaagaagaagccaaatatggccaggatctgggagagaggaggtggttgtttattctgtattgctttgttttgtttgtttagcaatgcaattctgtcaaaggtattattaatattttactatttaaaatatcaaaatatctatttgttttactttactcaataggggaatgttctctagtttatcatagtgactgctggtggaatctattcattgatactgcagtgggaacttgtcttattctgattataaaagaacaaatactttagcaacttaaaaacacggtttaaaagcacacaacatagttattaaaatgggaataagtaagaaaatagacctgagtcaccacagaggaagtaaattacacattgtcatcggcattggaaggaaaatatactgtatagagaacaacaatgcttggttttatgtttcagattttctccacagaatgagtacatatttaagtttaaaacaaccaattccatctttttcatggattctgccaattatagatccttccattatgaagaagagtaaagccagcaagtgggtacatcgtggatagagtggtagctgatggcatcataggaattgcttataaaatagcttctctttctaaatgattaattatttgaaggtggcttcttgagcttttgtaatggtacttaaaagtgatttattttcatctttcctttcctcatcttcctttgcttccttatcattaaaattgtactttctgttgatgtttgcttctcatgggacatctaataggttaaccagagcacaaagaaacaagtcatcttgtcctcagggacagaattcaacgccgtcaaatctctcatattgggaaaggttttaggtaagtaggagaaagagctttttcccaaataagtgtcatgtcacaaactctggaagcattcatcatgctgaaagaagctccttgtcttacttgaataataatttcacagtgagtgacaatcaaggtgcaaactgtactcttgcctgagtgtacatataatcatgactaagtgctacctgtgagatgtgcaagggcgttcctggaaaaatacctccacacttaacctctcacttggcaatcatgcataatgaatcacggtatttttctaatccttcttgaaaagtgaaatgttgtcaaagctgacacgaagttcacagattatgtatgtattaatcaacatcaactccggagaccatcattcaatgataaaactacgtttgagttgaacacaagagaaaaaactggtaatcttattacagcagatgaatacagttttatttttctctcaagccctgctttgcctgttgtttccatcctttttgactttagtatctaacaggaatggggaggcatattcataaatatctgttacgcaaggtagaaagttacagtaattgtctatcatattgtctatcataatctgttgtaaaagcacagttagctttacatttaataaaggaactgaggaaagtaatctttttttaaaaaaacccatcttatgtaactcaattaagaaaatgaactatactttaatattaggatcaaaaagttgaataatatttattatatacatctttgtttccttccaaataaaggaga

SEQ ID NO: 638 - DNA, 2225 bp, Homo sapiens
  source 1..2225: mol_type = genomic DNA
agagggaggggccgggggccggggaggttttgagggaggtctttggctttttttggcggagctggggcgccctccggaagcgtttccaactttccagaagtttctcgggacgggcaggagggggtggggactgccatatatagatcccgggagcaggggagcgggctaagagtagaatcgtgtcgcggctcgagagcgagagtcacgtcccggcgctagcccagcccgacccaggcccaccgtggtgcacgcaaaccacttcctggccatgcgctccctcctgcttctcagcgccttctgcctcctggaggcggccctggccgccgaggtgaagaaacctgcagccgcagcagctcctggcactgcggagaagttgagccccaaggcggccacgcttgccgagcgcagcgccggcctggccttcagcttgtaccaggccatggccaaggaccaggcagtggagaacatcctggtgtcacccgtggtggtggcctcgtcgctagggctcgtgtcgctgggcggcaaggcgaccacggcgtcgcaggccaaggcagtgctgagcgccgagcagctgcgcgacgaggaggtgcacgccggcctgggcgagctgctgcgctcactcagcaactccacggcgcgcaacgtgacctggaagctgggcagccgactgtacggacccagctcagtgagcttcgctgatgacttcgtgcgcagcagcaagcagcactacaactgcgagcactccaagatcaacttccgcgacaagcgcagcgcgctgcagtccatcaacgagtgggccgcgcagaccaccgacggcaagctgcccgaggtcaccaaggacgtggagcgcacggacggcgccctgctagtcaacgccatgttcttcaagccacactgggatgagaaattccaccacaagatggtggacaaccgtggcttcatggtgactcggtcctataccgtgggtgtcatgatgatgcaccggacaggcctctacaactactacgacgacgagaaggaaaagctgcaaatcgtggagatgcccctggcccacaagctctccagcctcatcatcctcatgccccatcacgtggagcctctcgagcgccttgaaaagctgctaaccaaagagcagctgaagatctggatggggaagatgcagaagaaggctgttgccatctccttgcccaagggtgtggtggaggtgacccatgacctgcagaaacacctggctgggctgggcctgactgaggccattgacaagaacaaggccgacttgtcacgcatgtcaggcaagaaggacctgtacctggccagcgtgttccacgccaccgcctttgagttggacacagatggcaacccctttgaccaggacatctacgggcgcgaggagctgcgcagccccaagctgttctacgccgaccaccccttcatcttcctagtgcgggacacccaaagcggctccctgctattcattgggcgcctggtccggcctaagggtgacaagatgcgagacgagttatagggcctcagggtgcacacaggatggcaggaggcatccaaaggctcctgagacacatgggtgctattggggttgggggggaggtgaggtaccagccttggatactccatggggtgggggtggaaaaacagaccggggttcccgtgtgcctgagcggaccttcccagctagaattcactccacttggacatgggccccagataccatgatgctgagcccggaaactccacatcctgtgggacctgggccatagtcattctgcctgccctgaaagtcccagatcaagcctgcctcaatcagtattcatatttatagccaggtaccttctcacctgtgagaccaaattgagctaggggggtcagccagccctcttctgacactaaaacacctcagctgcctccccagctctatcccaacctctcccaactataaaactaggtgctgcagcccctgggaccaggcacccccagaatgacctggccgcagtgaggcggattgagaaggagctcccaggaggggcttctgggcagactctggtcaagaagcatcgtgtctggcgttgtggggatgaactttttgttttgtttcttccttttttagttcttcaaagatagggagggaagggggaacatgagcctttgttgctatcaatccaagaacttatttgtacattttttttttcaataaaacttttccaatgaca

SEQ ID NO: 639 - DNA, 2638 bp, Homo sapiens
  source 1..2638: mol_type = genomic DNA
aaagacacaaatcgcctcccggagtggcgcctccagtcgcggcggagcgcggcgttggcggcggatggagggcgcgagcgggcggccgcggaggctgcacccggcggggcgctgatgcggcgcctggaccttcgctgcgcgacttcgggggcgtcggccgagttgggactccgcgatgcagctcctgaaggcgctctgggcactggcaggggccgcgctctgctgcttcctcgtcctagtgatccacgcgcagttcctcaaagaaggtcagctggccgccggcacctgtgagattgtgaccttggaccgggacagcagccagcctcggaggacgatcgcccggcagaccgcccgctgtgcgtgtagaaaggggcagatcgccggcaccacgagagcccggcccgcctgtgtggacgcaagaatcatcaagaccaagcagtggtgtgacatgcttccgtgtctggagggggaaggctgcgacttgttaatcaaccggtcaggctggacgtgcacgcagcccggcgggaggataaagaccaccacggtctcctgacaaacacagcccctgaggggccccgggagtggccttggctccctggagagcccacgtctcagccacagttctccactcgcctcggacttcacccgttctctgccgcccgcccactccgtttccctgtggtccgtgaaggacggcctcaggccttggcatcctgagcttcggtctgtccagccgacccgaggaggccggactcagacacataggcggggggcggcacctggcatcagcaatacgcagtctgtgggagcccggccgcgcccagcccccgccgaccgtggcgttggccctgctgtcctcagaggaggaggaggaggaggcagctccggcagccacagaaggctgcagcccagcccgcctgagacacgacgcctgccccaggggactgtcaggcacagaagcggcctcctcccgtgccccagactgtccgaattgcttttattttcttatactttcagtatactccatagaccaaagagcaaaatctatctgaacctggacgcaccctcactgtcagggtccctggggtcgcttgtgcgggcgggagggcaatggtggcagagacatgctggtggccccggcggagcggagagggcggccgtggtggaggcctccaccccaggagcaccccgcgcaccctcggaggacgggcttcggctgcgcggaggccgtggcacacctgcgggaggcagcgacggcccccacgcagacgccgggaacgcaggccgctttattcctctgtacttagatcaacttgaccgtactaaaatccctttctgttttaaccagttaaacatgcctcttctacagctccatttttgatagttggataatccagtatctgccaagagcatgttgggtctcccgtgactgctgcctcatcgataccccatttagctccagaaagcaaagaaaactcgagtaacacttgtttgaaagagatcattaaatgtattttgcaaagcctaaagttatatatttaacagtttttatatgttgtatatttgtagaaaatcctatttaacaattaacgtggcagtcccggccgtcctgagagtcgggccgagccccgtgtgtttctgaagactctgggggtgggacacggcggggaggtggtgccccgcggaccccggggtgccaggcacggaaggcgggactctgggagaagcgtgcggaggaccgtggcgtcggcgtcccggatgtgtcggtcgtgcccggggaggccgggttcccctcgctgcgggccaggcttggctcctgattccctctctggtccctgtattggtcaacacttgagcgtacaatatcttgaacatgcttcttccaatgggttttgtttcccatttcctgcccctttcgccactcacggaccttgaggccagttgacggcccttctccccacgcctgtgtccccgcgttctgagaagtcctctgtcttcgtgtcactaggtccagaaagtcgcgccgggcagaggcgcaggcggggccggcagggccgaggaataagcgacaattctggtttttctcccctggccgtcgttcgccagcctccttcattttcctgagttcccgctgaagtatatactacctatgagtccaattaacatgagtattatgctagttctatcctactaaaaaaaacgtaaaaaaataactatatagaagctgttccagcaaccatagactgaagatacgaaagaaaatccatttatttaagacctgttccggtatccatgaggacataatttacctttcagtcaccacaaatttataggcatttgtatcctggactaaaagaaggggctgaggttgggtttgtcatcacagagggggtgggcctggaaagggtccttcccaagctgccccggctccggcggcccgggccggcagcctctgccagccagcgtcctcacggcctccccctcgcctgtttcttttgaaagcaagtgtagacaccttcgagggcagagatcgggagatttaagatgttacagcatatttttttttcttgttttacagtattcaattttgtgttgattcagctaaattatgaaaaataaagaaaaactcctttgataa

SEQ ID NO: 640 - DNA, 6760 bp, Homo sapiens
  source 1..6760: mol_type = genomic DNA
gcccggccgacgcggctttgtctcctttgttcccggcggtggcagcgccgcgcgggaggggcgggcagcgggcgcagttttccgcccctcggtctccgggtaacagctgcggctccaccagacccggggagaggccgctgcgcgcggagcccgagcccggagcggccgacgcccgcctcggcgcgcacatcccgcggggcccggccgggtggtgactcccacacgggtcatgctgttgtctcctgatccagccggccctgccaggtgaccatgcctgctctgggcccagctcttctccaggctctctgggccgggtgggtcctcaccctccagccccttccaccaactgcattcactcccaatggcacgtatctgcagcacctggcaagggaccccacctcaggcaccctctacctgggggctaccaacttcctgttccagctgagccctgggctgcagctggaggccacagtgtccaccggccctgtgctagacagcagggactgcctgccacctgtgatgcctgatgagtgcccccaggcccagcctaccaacaacccgaatcagctgctcctggtgagcccaggggccctggtggtatgcgggagcgtgcaccagggggtctgtgaacagcggcgcctggggcagctcgagcagctgctgctgcggccagagcggcctggggacacacaatatgtggctgccaatgatcctgcggtcagcacggtggggctggtagcccagggcttggcaggggagcccctcctgtttgtggggcgaggatacaccagcaggggtgtggggggtggcattccacccatcacaacccgggccctgtggccgcccgacccccaagctgccttctcctatgaggagacagccaagctggcagtgggccgcctctccgagtacagccaccacttcgtgagtgcctttgcacgtggggccagcgcctacttcctgttcctgcggcgggacctgcaggctcagtctagagcttttcgtgcctatgtatctcgagtgtgtctccgggaccagcactactactcctatgtggagttgcctctggcctgcgaaggtggccgctacgggctgatccaggctgcagctgtggccacgtccagggaggtggcgcatggggaggtgctctttgcagctttctcctcggctgcaccccccactgtgggccggcccccatcggcggctgctggggcatctggagcctctgccctctgtgccttccccctggatgaggtggaccggcttgctaatcgcacgcgagatgcctgctacacccgggagggtcgtgctgaggatgggaccgaggtggcctacatcgagtatgatgtcaattctgactgtgcacagctgccagtggacaccctggatgcttatccctgtggctcagaccacacgcccagccccatggccagccgggtcccgctggaagccacaccaattctggagtggccagggattcagctaacagctgtggcagtcaccatggaagatggacacaccatcgctttcctgggtgatagtcaagggcagctgcacagggtctacttgggcccagggagcgatggccacccatactccacacagagcatccagcaggggtctgcagtgagcagagacctcacctttgatgggacctttgagcacctgtatgtcatgacccagagcacacttctgaaggttcctgtggcttcctgtgctcagcacctggactgtgcatcttgccttgctcacagggacccatactgtgggtggtgcgtgctccttggcaggtgcagtcgccgttctgagtgctcgaggggccagggcccagagcagtggctatggagcttccagcctgagctgggctgtctgcaagtggcagccatgagtcctgccaacatcagccgagaggagacgagggaggttttcctatcagtgccagacctgccacccctgtggccaggggagtcatattcctgccactttggggaacatcagagtcctgccctgctgactggttctggtgtgatgtgcccctccccagaccctagtgaggccccagtgctgccgagaggagccgactacgtatccgtgagcgtggagctcagatttggcgctgttgtgatcgccaaaacttccctctctttctatgactgtgtggcggtcactgaactccgcccatctgcgcagtgccaggcctgtgtgagcagccgctgggggtgtaactggtgtgtctggcagcacctgtgcacccacaaggcctcgtgtgatgctgggcccatggttgcaagccatcagagcccgcttgtctccccagaccctcctgcaagaggtgatggagactcagcagagcttgagggccctcccgcccccctcatcctcccgtccagcctcgactaccagtatgacacccccgggctctgggagctggaagaggcgaccttgggggcaagctcctgcccctgtgtggagagcgttcagggctccacgttgatgccggtccatgtggagcgggaaatccggctgctaggcaggaacctgcaccttttccaggatggcccaggagacaatgagtgtgtgatggagctggagggcctcgaggtggtggttgaggcccgggtcgagtgtgagccacctccagatacccagtgccatgtcacctgccagcagcaccagctcagctatgaggctctgcagccggagctccgtgtggggctgtttctgcgtcgggccggccgtctgcgtgtggacagtgctgaggggctgcatgtggtactgtatgactgttccgtgggacatggagactgcagccgctgccaaactgccatgccccagtatggctgtgtgtggtgtgagggggagcgtccacgttgtgtgacccgggaggcctgtggtgaggctgaggctgtggccacccagtgcccagcgcccctcatccactcggtggagccactgactgggcctgtagacggaggcacccgtgtcaccatcaggggctccaacctgggccagcatgtgcaggatgtgctgggcatggtcacggtggctggagtgccctgtgctgtggatgcccaggagtacgaggtctccagcagcctcgtgtgcatcaccggggccagtggggaggaggtggccggcgccacagcggtggaggtgccgggaagaggacgtggtgtctcagaacacgactttgcctaccaggatccgaaggtccattccatcttcccggcccgcggccccagagctgggggcacccgtctcaccctgaatggctccaagctcctgactgggcggctggaggacatccgagtggtggttggagaccagccttgtcacttgctgccggagcagcagtcagaacaactgcggtgtgagaccagcccacgccccacgcctgccacgctccctgtggctgtgtggtttggggccacggagcggaggcttcaacgcggacagttcaagtataccttggaccccaacatcacctctgctggccccaccaagagcttcctcagtggaggacgtgagatatgcgtccgtggccagaatctggacgtggtacagacgccaagaatccgggtgaccgtggtctcgagaatgctgcagcccagccaggggcttggacggaggcgtcgcgtggtcccggagacggcatgttcccttggaccctcctgcagtagccagcaatttgaggagccgtgccatgtcaactcctcccagctcatcacgtgccgcacacctgccctcccaggcctgcctgaggacccctgggtccgggtggaatttatccttgacaacctggtctttgactttgcaacactgaaccccacacctttctcctatgaggccgaccccaccctgcagccactcaaccctgaggaccccaccatgccattccggcacaagcctgggagtgtgttctccgtggagggggagaacctggaccttgcaatgtccaaggaggaggtggtggctatgataggggatggcccctgtgtggtgaagacgctgacgcggcaccacctgtactgcgagccccccgtggagcagcccctgccacggcaccatgccctccgagaggcacctgactctttgcctgagttcacggtgcagatggggaacttgcgcttctccctgggtcacgtgcagtatgacggcgagagccctggggcttttcctgtggcagcccaggtgggcttgggggtgggcacctctcttctggctctgggtgtcatcatcattgtcctcatgtacaggaggaagagcaagcaggccctgagggactataagaaggttcagatccagctggagaatctggagagcagtgtgcgggaccgctgcaagaaggaattcacagacctcatgactgagatgaccgatctcaccagtgacctcctgggcagcggcatccccttcctcgactacaaggtgtatgcggagaggatcttcttccctgggcaccgcgagtcgcccttgcaccgggacctgggtgtgcctgagagcagacggcccactgtggagcaagggctggggcagctctctaacctgctcaacagcaagctcttcctcaccaagttcatccacacgctggagagccagcgcaccttttcagctcgggaccgtgcctacgtggcatctctgctcaccgtggcactgcatgggaagcttgagtatttcactgacatcctccgcactctgctcagtgacctggttgcccagtatgtggccaagaaccccaagctgatgctgcgcaggacagagactgtggtggagaagctgctcaccaactggatgtccatctgtctgtataccttcgtgagggactccgtaggggagcctctgtacatgctctttcgagggattaagcaccaagtggataaggggccagtggacagtgtgacaggcaaggccaaatacaccttgaacgacaaccgcctgctcagagaggatgtggagtaccgtcccctgaccttgaatgcactattggctgtggggcctggggcaggagaggcccagggcgtgcccgtgaaggtcctagactgtgacaccatctcccaggcaaaggagaagatgctggaccagctttataaaggagtgcctctcacccagcggccagaccctcgcacccttgatgttgagtggcggtctggggtggccgggcacctcattctttctgacgaggatgtcacttctgaggtccagggtctgtggaggcgcctgaacacactgcagcattacaaggtcccagatggagcaactgtggccctcgtcccctgcctcaccaagcatgtgctccgggaaaaccaggattatgtccctggagagcggaccccaatgctggaggatgtagatgaggggggcatccggccctggcacctggtgaagccaagtgatgagccggagccgcccaggcctcggaggggcagccttcggggcggggagcgtgagcgcgccaaggccatccctgagatctacctgacccgcctgctgtccatgaagggcaccctgcagaagttcgtggatgacctgttccaggtgattctcagcaccagccgccccgtgccgctcgctgtgaagtacttctttgacctgctggatgagcaggcccagcagcatggcatctccgaccaggacaccatccacatctggaagaccaacagcttgcctctgaggttctggatcaatataataaaaaacccgcagtttgtgttcgacgtgcaaacatctgataacatggatgcggtgctccttgtcattgcacagaccttcatggacgcctgcaccctggccgaccacaagctgggccgggactccccgatcaacaaacttctgtatgcacgggacattccccggtacaagcggatggtggaaaggtactatgcagacatcagacagactgtcccagccagcgaccaagagatgaactctgtcctggctgaactgtcctggaactactccggagacctcggggcgcgagtggccctgcatgaactctacaagtacatcaacaagtactatgaccagatcatcactgccctggaggaggatggcacggcccagaagatgcagctgggctatcggctccagcagattgcagctgctgtggaaaacaaggtcacagatctataggaacccaggagccacggcctgctgttgcttcagcctggcctgggcagccctggaagctcggaggagaggccaccttcttaggtgcctgtagtgactgacaagcagagttagtggaaggtgactcccagtctcctggtggctctggcctcggccctgctggatccacctcctagacccggggcctcaaggctcatggggtagtacccagcctgctccccgagtccagcgaccctgtgacaccggtctgcagggagttggggactaagggcttccagagagtggctggaagagactccaggcccctggggagactgtactgttcctgaacactggccttggccacactgggattcggagaggaaggaggagagccccatgcttcctgtctgcctcctccaccatccctgacctcagttgagctgcctctggccttgttgctgctgccacatcctaggtctaagagttgaacgcctctcctaggccactacaaactgacccctcagcagggctggctgccacagggctgccctgcctcataggtagccatggtgagggctatctgctgcaggggggtcttggggagagtggtgactccattgacccagcttttcattaaaggataacacactgc

SEQ ID NO: 641 - DNA, 1657 bp, Homo sapiens
  source 1..1657: mol_type = genomic DNA
caacttgctccttccacaggaagctgcacctgacagaagctccaggatgcttgttctctttctcctgggcacagtctttctgctctgcccatattggggtgaacttcatgaccctataaaagcgactgaaataatgtgttatgaatgtaaaaaatatcatcttgggttatgctatggtgtcatgacatcctgctccctgaagcataaacagtcctgtgcagttgagaacttttacatccttacaaggaaagggcagagcatgtatcattattcaaaactgtcgtgtatgaccagctgtgaggacatcaacttcctggggttcacgaagagggtagagctcatctgttgtgatcatagtaactactgcaacctccctgagggagtttagttctacgtctctcctggattttgggttctttttcaaccactacgctctttttctcttccctgaacctgaattttgctctcctcttctatgcattggtagagagtgagaaagccagctcatagtgaaaagacaagcaggcataaggagacgcagtgtggacagcggagcctattgatgatggagcactagactcactctttgcacatccctgtcgctaacaggtgggaggggttttgctctccttacgtgatactgccatgaataagctcagacttggtcatttattatctcctgtatgaaaatgtgaacacttgggccataataatctccaatttgtactgagaattctgtgactatcctctatcctcatctacacacacactcctctccgttggaattctctttggattagccctgacactttctggcactgtccttttctgcccgtgggttctggagagggctaaccccagcttcccagtgtgttggcagcatgggccaagtctttctctgatagagctcttgggggaacctcagggcagaaaaaaaaaaactgaacagacatagggatgagcatcaaagaaaacttcagggggcatttcaactggtaaaaactaagatctgagaaataacttgctgtgggtggaattggcttgaattatcattgccctggctggccaggcagccttgggcacatggttgaactaggtgattggattgggaacagagtgtttttttaaggatggctagtcaggttcttctcatgggactgagcaaacaaaatgctgataatgtggcaggtggtgtagtagttgaagataataggatgtaaatagataccatgaggtagtgttcaagtaacagagtgccctgtgtaagaggaagttatgagtttgcagaaagtgtgagaaaggtagcatatatgggtaacagtggtgggaagagaagaaggaagacacagaaacagataggaagagaaactgagtagcattgatgttggagcacacctgtggccaaggtggcacattttccttggatacacactaaccctggtgtttctgtccttataaggctgactgcaccctagatgacgggttgatgggtgcagcaaaccaccatggcacatgtatacctatgtaacaaacctgcatgctgcactttctttcatgtatcccagaacttaaagtaaaataaaaaaataaataaataaataaaggccagaaaaattggccaaaaaatctgaatagaaaaagatatacagatagtaaa

SEQ ID NO: 642 - DNA, 7308 bp, Homo sapiens
  source 1..7308: mol_type = genomic DNA
gcccggccgacgcggctttgtctcctttgttcccggcggtggcagcgccgcgcgggaggggcgggcagcgggcgcagttttccgcccctcggtctccgggtaacagctgcggctccaccagacccggggagaggccgctgcgcgcggagcccgagcccggagcggccgacgcccgcctcggcgcgcacatcccgcggggcccggccgggtggtgactcccacacgggtcatgctgttgtctcctgatccagccggccctgccaggtgaccatgcctgctctgggcccagctcttctccaggctctctgggccgggtgggtcctcaccctccagccccttccaccaactgcattcactcccaatggcacgtatctgcagcacctggcaagggaccccacctcaggcaccctctacctgggggctaccaacttcctgttccagctgagccctgggctgcagctggaggccacagtgtccaccggccctgtgctagacagcagggactgcctgccacctgtgatgcctgatgagtgcccccaggcccagcctaccaacaacccgaatcagctgctcctggtgagcccaggggccctggtggtatgcgggagcgtgcaccagggggtctgtgaacagcggcgcctggggcagctcgagcagctgctgctgcggccagagcggcctggggacacacaatatgtggctgccaatgatcctgcggtcagcacggtggggctggtagcccagggcttggcaggggagcccctcctgtttgtggggcgaggatacaccagcaggggtgtggggggtggcattccacccatcacaacccgggccctgtggccgcccgacccccaagctgccttctcctatgaggagacagccaagctggcagtgggccgcctctccgagtacagccaccacttcgtgagtgcctttgcacgtggggccagcgcctacttcctgttcctgcggcgggacctgcaggctcagtctagagcttttcgtgcctatgtatctcgagtgtgtctccgggaccagcactactactcctatgtggagttgcctctggcctgcgaaggtggccgctacgggctgatccaggctgcagctgtggccacgtccagggaggtggcgcatggggaggtgctctttgcagctttctcctcggctgcaccccccactgtgggccggcccccatcggcggctgctggggcatctggagcctctgccctctgtgccttccccctggatgaggtggaccggcttgctaatcgcacgcgagatgcctgctacacccgggagggtcgtgctgaggatgggaccgaggtggcctacatcgagtatgatgtcaattctgactgtgcacagctgccagtggacaccctggatgcttatccctgtggctcagaccacacgcccagccccatggccagccgggtcccgctggaagccacaccaattctggagtggccagggattcagctaacagctgtggcagtcaccatggaagatggacacaccatcgctttcctgggtgatagtcaagggcagctgcacagggtctacttgggcccagggagcgatggccacccatactccacacagagcatccagcaggggtctgcagtgagcagagacctcacctttgatgggacctttgagcacctgtatgtcatgacccagagcacacttctgaaggttcctgtggcttcctgtgctcagcacctggactgtgcatcttgccttgctcacagggacccatactgtgggtggtgcgtgctccttggcaggtgcagtcgccgttctgagtgctcgaggggccagggcccagagcagtggctatggagcttccagcctgagctgggctgtctgcaagtggcagccatgagtcctgccaacatcagccgagaggagacgagggaggttttcctatcagtgccagacctgccacccctgtggccaggggagtcatattcctgccactttggggaacatcagagtcctgccctgctgactggttctggtgtgatgtgcccctccccagaccctagtgaggccccagtgctgccgagaggagccgactacgtatccgtgagcgtggagctcagatttggcgctgttgtgatcgccaaaacttccctctctttctatgactgtgtggcggtcactgaactccgcccatctgcgcagtgccaggcctgtgtgagcagccgctgggggtgtaactggtgtgtctggcagcacctgtgcacccacaaggcctcgtgtgatgctgggcccatggttgcaagccatcagagcccgcttgtctccccagaccctcctgcaagaggtggacccagcccctccccacccacagcccccaaagccctggccacccctgctcctgacacccttcccgtggagcctggggctccctccacagccacagcttcggacatctcacctggggctagtccttccctgctcagcccctgggggccatgggcaggttctggctccatatcttcccctggctccacagggtcgcctctccatgaggagccctcccctcccagcccccaaaatggacctggaaccgctgtccctgcccccactgacttcagaccctcagccacacctgaggacctcttggcctccccgctgtcaccgtcagaggtagcagcagtgccccctgcagaccctggccccgaggctcttcatcccacagtgcccctggacctgccccctgccactgttcctgccaccactttcccaggggccatgggctccgtgaagcccgccctggactggctcacgagagaaggcggcgagctgcccgaggcggacgagtggacggggggtgacgcacccgccttctccacttccaccctcctctcaggtgatggagactcagcagagcttgagggccctcccgcccccctcatcctcccgtccagcctcgactaccagtatgacacccccgggctctgggagctggaagaggcgaccttgggggcaagctcctgcccctgtgtggagagcgttcagggctccacgttgatgccggtccatgtggagcgggaaatccggctgctaggcaggaacctgcaccttttccaggatggcccaggagacaatgagtgtgtgatggagctggagggcctcgaggtggtggttgaggcccgggtcgagtgtgagccacctccagatacccagtgccatgtcacctgccagcagcaccagctcagctatgaggctctgcagccggagctccgtgtggggctgtttctgcgtcgggccggccgtctgcgtgtggacagtgctgaggggctgcatgtggtactgtatgactgttccgtgggacatggagactgcagccgctgccaaactgccatgccccagtatggctgtgtgtggtgtgagggggagcgtccacgttgtgtgacccgggaggcctgtggtgaggctgaggctgtggccacccagtgcccagcgcccctcatccactcggtggagccactgactgggcctgtagacggaggcacccgtgtcaccatcaggggctccaacctgggccagcatgtgcaggatgtgctgggcatggtcacggtggctggagtgccctgtgctgtggatgcccaggagtacgaggtctccagcagcctcgtgtgcatcaccggggccagtggggaggaggtggccggcgccacagcggtggaggtgccgggaagaggacgtggtgtctcagaacacgactttgcctaccaggatccgaaggtccattccatcttcccggcccgcggccccagagctgggggcacccgtctcaccctgaatggctccaagctcctgactgggcggctggaggacatccgagtggtggttggagaccagccttgtcacttgctgccggagcagcagtcagaacaactgcggtgtgagaccagcccacgccccacgcctgccacgctccctgtggctgtgtggtttggggccacggagcggaggcttcaacgcggacagttcaagtataccttggaccccaacatcacctctgctggccccaccaagagcttcctcagtggaggacgtgagatatgcgtccgtggccagaatctggacgtggtacagacgccaagaatccgggtgaccgtggtctcgagaatgctgcagcccagccaggggcttggacggaggcgtcgcgtggtcccggagacggcatgttcccttggaccctcctgcagtagccagcaatttgaggagccgtgccatgtcaactcctcccagctcatcacgtgccgcacacctgccctcccaggcctgcctgaggacccctgggtccgggtggaatttatccttgacaacctggtctttgactttgcaacactgaaccccacacctttctcctatgaggccgaccccaccctgcagccactcaaccctgaggaccccaccatgccattccggcacaagcctgggagtgtgttctccgtggagggggagaacctggaccttgcaatgtccaaggaggaggtggtggctatgataggggatggcccctgtgtggtgaagacgctgacgcggcaccacctgtactgcgagccccccgtggagcagcccctgccacggcaccatgccctccgagaggcacctgactctttgcctgagttcacggtgcagatggggaacttgcgcttctccctgggtcacgtgcagtatgacggcgagagccctggggcttttcctgtggcagcccaggtgggcttgggggtgggcacctctcttctggctctgggtgtcatcatcattgtcctcatgtacaggaggaagagcaagcaggccctgagggactataagaaggttcagatccagctggagaatctggagagcagtgtgcgggaccgctgcaagaaggaattcacagacctcatgactgagatgaccgatctcaccagtgacctcctgggcagcggcatccccttcctcgactacaaggtgtatgcggagaggatcttcttccctgggcaccgcgagtcgcccttgcaccgggacctgggtgtgcctgagagcagacggcccactgtggagcaagggctggggcagctctctaacctgctcaacagcaagctcttcctcaccaagttcatccacacgctggagagccagcgcaccttttcagctcgggaccgtgcctacgtggcatctctgctcaccgtggcactgcatgggaagcttgagtatttcactgacatcctccgcactctgctcagtgacctggttgcccagtatgtggccaagaaccccaagctgatgctgcgcaggacagagactgtggtggagaagctgctcaccaactggatgtccatctgtctgtataccttcgtgagggactccgtaggggagcctctgtacatgctctttcgagggattaagcaccaagtggataaggggccagtggacagtgtgacaggcaaggccaaatacaccttgaacgacaaccgcctgctcagagaggatgtggagtaccgtcccctgaccttgaatgcactattggctgtggggcctggggcaggagaggcccagggcgtgcccgtgaaggtcctagactgtgacaccatctcccaggcaaaggagaagatgctggaccagctttataaaggagtgcctctcacccagcggccagaccctcgcacccttgatgttgagtggcggtctggggtggccgggcacctcattctttctgacgaggatgtcacttctgaggtccagggtctgtggaggcgcctgaacacactgcagcattacaaggtcccagatggagcaactgtggccctcgtcccctgcctcaccaagcatgtgctccgggaaaaccaggattatgtccctggagagcggaccccaatgctggaggatgtagatgaggggggcatccggccctggcacctggtgaagccaagtgatgagccggagccgcccaggcctcggaggggcagccttcggggcggggagcgtgagcgcgccaaggccatccctgagatctacctgacccgcctgctgtccatgaagggcaccctgcagaagttcgtggatgacctgttccaggtgattctcagcaccagccgccccgtgccgctcgctgtgaagtacttctttgacctgctggatgagcaggcccagcagcatggcatctccgaccaggacaccatccacatctggaagaccaacagcttgcctctgaggttctggatcaatataataaaaaacccgcagtttgtgttcgacgtgcaaacatctgataacatggatgcggtgctccttgtcattgcacagaccttcatggacgcctgcaccctggccgaccacaagctgggccgggactccccgatcaacaaacttctgtatgcacgggacattccccggtacaagcggatggtggaaaggtactatgcagacatcagacagactgtcccagccagcgaccaagagatgaactctgtcctggctgaactgtcctggaactactccggagacctcggggcgcgagtggccctgcatgaactctacaagtacatcaacaagtactatgaccagatcatcactgccctggaggaggatggcacggcccagaagatgcagctgggctatcggctccagcagattgcagctgctgtggaaaacaaggtcacagatctataggaacccaggagccacggcctgctgttgcttcagcctggcctgggcagccctggaagctcggaggagaggccaccttcttaggtgcctgtagtgactgacaagcagagttagtggaaggtgactcccagtctcctggtggctctggcctcggccctgctggatccacctcctagacccggggcctcaaggctcatggggtagtacccagcctgctccccgagtccagcgaccctgtgacaccggtctgcagggagttggggactaagggcttccagagagtggctggaagagactccaggcccctggggagactgtactgttcctgaacactggccttggccacactgggattcggagaggaaggaggagagccccatgcttcctgtctgcctcctccaccatccctgacctcagttgagctgcctctggccttgttgctgctgccacatcctaggtctaagagttgaacgcctctcctaggccactacaaactgacccctcagcagggctggctgccacagggctgccctgcctcataggtagccatggtgagggctatctgctgcaggggggtcttggggagagtggtgactccattgacccagcttttcattaaaggataacacactg

SEQ ID NO: 643 - DNA, 1217 bp, Homo sapiens
  source 1..1217: mol_type = genomic DNA
tggccccaggcaccgcctcccgttcccgccccgcgccccgcagcgcttaggcttcggcacactgaggaccgagtcccagtgcagctccagccgacccccgggacgtagacaagggcaggcgcgcggtgaagactgcggccggccgcgtagccgcgctgtggtcccgctggccttctcttgggccgcgcaccctccggacctgcgtcgggatcctcccggagtctcccgctctctcctcccggcttgcgaacatgcggccccttaagcccggcgcccctttgcccgcactcttcctgctggcgctggctttgtccccgcacggagcccacgggaggccccgggggcgcaggggagcgcgcgtcacggataaggagcccaagccgttgcttttcctccccgcggccggggccggccggactcccagcggctcccggagcgcagaaatattcccaagagactctaacttaaaagacaaattcataaagcatttcacagggccggtcacattttcaccagaatgcagcaaacatttccaccgactctattacaataccagggagtgctcaacgccagcttattacaaaagatgtgctagattgttaacaagattagcagtgagtccactgtgctcccagacctagcaaaactaccctacatttcctaagaatgtacatctaatttgaagaaaaagtgcctcaaatcatgcaaaatgtaaaaaaagatgaaatttatatttttatggatattaagatgagtaaaataagagacttcccagaaataactggttagctgtttcctgtcatagaatggagtctttcttgctttatctttttgtgtatacagtaatttataattttgtaaaacagagtttgaatcgcatattgaaaattagatattaaaaattgtgtgattgtattttatttttactagatatattattttctttatatggttaacattctaattaaacatttaattgtgtaaattatatctgtgagtgccagtgagaaataatgatttttttgtatatgactgttagtatatatttgtcaaatcatcgtgtaccaagttaaattttataattcttatttaatatttaaatacatttatttagaacttgttgtcttcacttgcattaatttgaactgtgaattttattaaagttgaaatatgaaaaaatgtgttgtttcctttgaattaaagatgtttgtaataga

SEQ ID NO: 644 - DNA, 434 bp, Homo sapiens
  source 1..434: mol_type = genomic DNA
gtcgaatccaaatcactcattgtgaaagctgagctcacagccgaataagccaccatgaggctgtcagtgtgtctcctgatggtctcgctggccctttgctgctaccaggcccatgctcttgtctgcccagctgttgcttctgagatcacagtcttcttattcttaagtgacgctgcggtaaacctccaagttgccaaacttaatccacctccagaagctcttgcagccaagttggaagtgaagcactgcaccgatcagatatcttttaagaaacgactctcattgaaaaagtcctggtggaaatagtgaaaaaatgtggtgtgtgacatgtaaaaatgctcaacctggtttccaaagtctttcaacgacaccctgatcttcactaaaaattgtaaaggtttcaacacgttgctttaataaatcacttgccctgc

SEQ ID NO: 645 - DNA, 2111 bp, Homo sapiens
  source 1..2111: mol_type = genomic DNA
agctccggccccgaccggaagccccaccgcaccgtcagggacgcggactcgggagtgcgcacattcgcagcccgggcagccctgctgcgcaccgggcctcgcgccccgcgccccgcgccccgcgccccgcgccccgcaccggcctccaggatcatgtggtatgtcagcaccaggggcgtagccccacgggtcaactttgagggggccctcttctctggctatgcacctgacgggggcctctttatgcctgaagagctcccacagttggacagagggaccctgtgccagtggagcacactctcctatcctggcctggtgaaggagctgtgtgccctcttcattggctctgagctccttccaaaagatgaattaaatgatctgatcgaccgagccttcagcagattccgtcacagagaagtggtccatctgtccaggttgaggaatgggctgaacgtgttggagctgtggcatggcgtcacatatgcatttaaggacctgtccctgtcctgcacaacacagttcctgcagtacttcctggagaagagggagaagcacgtcactgtggttgtaggaacatctggggacacaggaagtgctgccattgagagtgttcaaggggcaaagaacatggacattatcgttctgctgcccaaaggtcactgcacaaagattcaggagctccagatgacaacggtgctgaagcagaacgtacatgtgtttggagtggagggaaacagcgatgagctcgatgagccgatcaagactgtgtttgccgatgtggcttttgtcaagaagcacaatctgatgagcctgaattcgatcaactggtcccgggtcctggtgcagatggcccatcacttctttgcttacttccagtgtacgccatccttggacacacatcccctacccctggtggaggtggttgtgccaacaggggctgccggtaaccttgcagctgggtacattgctcaaaagataggcctgcccatccgtctggtcgtggcagtgaaccgcaatgacatcatccacaggactgtccagcagggagacttctctctctctgaggctgttaaatcaaccttggcatcagctatggacattcaggtgccctacaacatggagagggtgttctggctgctctctggctctgacagccaggtgacaagagccctcatggagcagtttgaaaggacccaaagtgtgaatctgcccaaggaactgcacagcaagctttcagaggcagtgacatccgtgtcagtgtcggatgaagccatcacccagaccatgggccgctgctgggatgagaaccagtacttgctgtgcccccactcagcggtggccgtgaactaccattaccagcagatagacaggcagcagcccagcactccccggtgctgcctcgcccctgcctctgcagccaagttcccggaagctgtcctggctgctggcctgacccctgagactcccgcggagatcgtagccctggagcacaaggagacacgctgcaccctgatgcggagaggtgacaactggatgctgatgcttcgggacaccattgaggaccttagccgacagtggaggagtcatgccctcaacacctcccagtagcctggctggaggtggctttctttaggcttcagatcccaggaagatgcaccttctgagctgccttgtgcaccctccccattaagcgtaggttaggaggtttccgggaggctgctcagctggatctggagccagctggctttgctccgttccctggctagtctgtgcctggtcaccagggaggctgagtgaggggctgtgaacagttgccggaagcaccccctccctccccggcccgtgcagcagtgtctgagctgtagtgaaagtttcagggcctgcaaaagaagaggcttgggcacaggactgaccatggctccaggggtttaggaccccagacctgtgaaggtgggagcagctcaccaccttcacgcaggctttgtatgttctctgagccttagttgattttggcccccaaaccaaatccaaaggttctggcccaccttgtcagaggcttccaccctgctcacatgttgggaatccctggaataaaatgcttgttcagtgtg

SEQ ID NO: 646 - DNA, 159 bp, Homo sapiens
  source 1..159: mol_type = genomic DNA
atgaagctctgcgtgactgtcctgtctctcctcgtgctagtagctgccttctgctctctagcactctcagcaccaagtaacaagccccttgaggcaagcaagtctgcgctgaccccagtgagtcctgggtccaggagtacgtgtatgacctggaactga

SEQ ID NO: 647 - DNA, 1319 bp, Homo sapiens
  source 1..1319: mol_type = genomic DNA
gttgatggcaaacttcctcaaaggaggggcagagcctgcgcagggcaggagcagctggcccactggcggcccgcaacactccgtctcaccctctgggcccactgcatctagaggagggccgtctgtgaggccactacccctccagcaactgggaggtgggactgtcagaagctggcccagggtggtggtcagctgggtcagggacctacggcacctgctggaccacctcgccttctccatcgaagcagggaagtgggagcctcgagccctcgggtggaagctgaccccaagccacccttcacctggacaggatgagagtgtcaggtgtgcttcgcctcctggccctcatctttgccatagtcacgacatggatgtttattcgaagctacatgagcttcagcatgaaaaccatccgtctgccacgctggctggcagcctcgcccaccaaggagatccaggttaaaaagtacaagtgtggcctcatcaagccctgcccagccaactactttgcgtttaaaatctgcagtggggccgccaacgtcgtgggccctactatgtgctttgaagaccgcatgatcatgagtcctgtgaaaaacaatgtgggcagaggcctaaacatcgccctggtgaatggaaccacgggagctgtgctgggacagaaggcatttgacatgtactctggagatgttatgcacctagtgaaattccttaaagaaattccggggggtgcactggtgctggtggcctcctacgacgatccagggaccaaaatgaacgatgaaagcaggaaactcttctctgacttggggagttcctacgcaaaacaactgggcttccgggacagctgggtcttcataggagccaaagacctcaggggtaaaagcccctttgagcagttcttaaagaacagcccagacacaaacaaatacgagggatggccagagctgctggagatggagggctgcatgcccccgaagccattttagggtggctgtggctcttcctcagccaggggcctgaagaagctcctgcctgacttaggagtcagagcccggcaggggctgaggaggaggagcagggggtgctgcgtggaaggtgctgcaggtccttgcacgctgtgtcgcgcctctcctcctcggaaacagaaccctcccacagcacatcctacccggaagaccagcctcagagggtccttctggaaccagctgtctgtggagagaatggggtgctttcgtcagggactgctgacggctggtcctgaggaaggacaaactgcccagacttgagcccaattaaattttatttttgctggttttgaa

SEQ ID NO: 648 - DNA, 1497 bp, Homo sapiens
  source 1..1497: mol_type = genomic DNA
ccggtgggagggaacatctggaacattagacaggatgctgatcttctggacaatcacacttttcctgctgggagcagccaaaggaaaagaagtttgctatgaggacctcgggtgcttttctgacactgagccctggggcgggacagcaatcaggcccctgaaaattctcccctggagccctgagaagatcggcacccgcttcctgctgtacaccaatgaaaacccaaacaactttcaaattctcctcctctctgatccatcaacaattgaggcatcaaattttcaaatggacagaaagacccggttcatcatccatggcttcatagacaaaggagatgagagctgggtgacagacatgtgcaagaaactgttcgaggtggaggaggtgaactgcatctgcgtggactggaagaagggctcccaagccacctacacacaggctgccaacaacgtgcgagtggtgggcgcccaggtggcccagatgctcgacatcctcttgacagagtatagctaccccccttccaaagttcacctcattggccacagcctgggagcccacgtggctggagaggcaggaagcaagactccaggcctgagcaggattacagggttggatcctgtagaagcaagtttcgagagtactcctgaagaggtgcgacttgatccctctgatgctgactttgttgatgtgattcacacggatgcagctcccctgatcccattcttgggttttggaacgaaccaacagatgggtcatcttgacttcttccccaatggaggagagagcatgccgggatgcaagaagaatgccctgtctcagatcgtggatctagatggcatctgggcgggaacccgggactttgtggcttgcaatcacctaagaagctacaagtattacttggaaagcatcctcaatcccgatgggtttgctgcatatccctgcacttcctacaagtcctttgagtctgacaagtgcttcccgtgtccagatcaaggatgcccacagatgggtcactatgctgataaatttgctggcaggacaagtgaagagcagcagaaattcttcttgaacacaggagaggctagcaatttcgctcgctggagatatggggtttccatcacactgtctggaagaacagccactggtcagatcaaagttgctttgtttggaaataagggaaacactcaccagtacagtatcttcagggggattctcaaaccaggctcaacccattcctatgagtttgatgcaaagctggatgttggaacaattgagaaagtcaagtttctttggaataacaatgtgataaatccaaccctccccaaagtgggtgccaccaagatcactgtgcaaaagggagaagagaagacagtgtacaacttctgtagcgaagacacagtgcgggaagacacgctgctcaccctcacgccctgctaagctcccggggcgacgaggctgctgcgttcacactaataaaatccactggtgcatctgta

SEQ ID NO: 649 - DNA, 451 bp, Homo sapiens
  source 1..451: mol_type = genomic DNA
ggggtgtagaaacaggcctgttaaggagaggccaccgggacttcagtgtctcctccatcccaggagcgcagtggccactatggggtctgggctgccccttgtcctcctcttgaccctccttggcagctcacatggaacagggccgggtatgactttgcaactgaagctgaaggagtcttttctgacaaattcctcctatgagtccagcttcctggaattgcttgaaaagctctgcctcctcctccatctcccttcagggaccagcgtcaccctccaccatgcaagatctcaacaccatgttgtctgcaacacatgacagccattgaagcctgtgtccttcttggcccgggcttttgggccggggatgcaggaggcaggccccgaccctgtctttcagcaggcccccaccctcctgagcggcaataaataaaattcggtatgctgaattcaa

SEQ ID NO: 650 - DNA, 1173 bp, Homo sapiens
  source 1..1173: mol_type = genomic DNA
tctcatgtaagtcaacaacatcctgggattgggacacactttctgggcactgctggccagtcccaaaatggaacataaggaagtggttcttctacttcttttatttctgaaatcaggtcaaggagagcccctggatgactatgtgaatacccaggggccttcactgttcagtgtcactaagaagcagctgggggcaggaagcagagaagaatgtgcagcaaaatgtgaagaggacaaagaattcacctgcagggcattccaatatcacagtaaagagcaacaatgtgtgataatggctgaaaacaggaagtcctccataatcattaggatgagagatgcagttttatttgaaaagtaaatgtatctttcagagtgcaagactgggaatggaaagaactacagagggacgatgtccaaaacaaaaaatggcatcacctgtcaaaaatggagttccacttctccccgcagacctaggtcagacttttcctttcatctttgtgttcatctactgtaaagtgtccgtctgtgtctgtgagggattggttccaggacccctgtggctaccaaaatccatgcttctcaagtcccttatgtaaaatggtgcagtatttgcatataacctacataccttctcttgtgcaatccctaatataatgtaaatgctatgtaatcgttgttatactgtattgtttttatttgtattatgttttattgtcatattgttattttctctcatctttttcaagtcttttccatccacagttggttgaatttgtggatgtggaacccatggatacagagggccaactgtatttaggataatttcatcacttttaattcaaaccagaatatgtgaataagcagacagaaagaatctttttgatgtcgatgttcaactatttttggcaccatagtagaacatggttgctttctattttttcttgggtatggaggtttcttgaagacctagaacatagaagaatgcctagttaaaaaaaaaaatcaatgaaactacgagttttaggccaaatctgagaaaagaccaaagatgactatgtttgggactgaagtaaacatatcaagttagaactctcatcacatgtttgactcaaattgtggagcaaaatagtaaataaaatataaaaatgaaaatgaagatacgtgaaattcaaa

SEQ ID NO: 651 - DNA, 1980 bp, Homo sapiens
  source 1..1980: mol_type = genomic DNA
aaaggtgcgcgtgttcctttaaggggctggtctggcgggagcgcgggggtttttctgctgccgcttcctttctgcccttttaatttccccgaaatcagactgctgccttggaccgggacagctcgcggcccccgagagctctagccgtcgaggagctgcctggggacgtttgccctggggccccagcctggcccgggtcaccctggcatgaggagatgggcctgttgctcctggtcccgttgctcctgctgcccggctcctacggactgcccttctacaacggcttctactactccaacagcgccaacgaccagaacctaggcaacggtcatggcaaagacctccttaatggagtgaagctggtggtggagacacccgaggagaccctgttcacctaccaaggggccagtgtgatcctgccctgccgctaccgctacgagccggccctggtctccccgcggcgtgtgcgtgtcaaatggtggaagctgtcggagaacggggccccagagaaggacgtgctggtggccatcgggctgaggcaccgctcctttggggactaccaaggccgcgtgcacctgcggcaggacaaagagcatgacgtctcgctggagatccaggatctgcggctggaggactatgggcgttaccgctgtgaggtcattgacgggctggaggatgaaagcggtctggtggagctggagctgcggggtgtggtctttccttaccagtcccccaacgggcgctaccagttcaacttccacgagggccagcaggtctgtgcagagcaggctgcggtggtggcctcctttgagcagctcttccgggcctgggaggagggcctggactggtgcaacgcgggctggctgcaggatgccacggtgcagtaccccatcatgttgccccggcagccctgcggtggcccgggcctggcacctggcgtgcgaagctacggcccccgccaccgccgcctgcaccgctatgatgtattctgcttcgctactgccctcaaggggcgggtgtactacctggagcaccctgagaagctgacgctgacagaggcaagggaggcctgccaggaagatgatgccacgatcgccaaggtgggacagctctttgccgcctggaagttccatggcctggaccgctgcgacgctggctggctggcagatggtagcgtccgctaccctgtggttcacccgcatcctaactgtgggcccccagagcctggggtccgaagctttggcttccccgacccgcagagccgcttgtacggtgtttactgctaccgccagcactaggacctggggccctcccctgccgcattccctcactggctgtgtatttattgagtggttcgttttcccttgtgggttggagccattttaactgtttttatacttctcaatttaaattttctttaaacatttttttactattttttgtaaagcaaacagaacccaatgcctccctttgctcctggatgccccactccaggaatcatgcttgctcccctgggccatttgcggttttgtgggcttctggagggttccccgccatccaggctggtctccctcccttaaggaggttggtgcccagagtgggcggtggcctgtctagaatgccgccgggagtccgggcatggtgggcacagttctccctgcccctcagcctgggggaagaagagggcctcgggggcctccggagctgggctttgggcctctcctgcccacctctacttctctgtgaagccgctgaccccagtctgcccactgaggggctagggctggaagccagttctaggcttccaggcgaaagctgagggaaggaagaaactcccctccccgttccccttcccctctcggttccaaagaatctgttttgttgtcatttgtttctcctgtttccctgtgtggggaggggccctcaggtgtgtgtactttggacaataaatggtgctatgactgccttccgccatcccca

SEQ ID NO: 652 - DNA, 919 bp, Homo sapiens
  source 1..919: mol_type = genomic DNA
cttacagaactcccacggacacaccatgataaggacgctgctgctgtccactttggtggctggagccctcagttgtggggaccccacttacccaccttatgtgactagggtggttggcggtgaagaagcgaggcccaacagctggccctggcaggtctccctgcagtacagctccaatggcaagtggtaccacacctgcggagggtccctgatagccaacagctgggtcctgacggctgcccactgcatcagctcctccaggacctaccgcgtggggctgggccggcacaacctctacgttgcggagtccggctcgctggcagtcagtgtctctaagattgtggtgcacaaggactggaactccaaccaaatctccaaagggaacgacattgccctgctcaaactggctaaccccgtctccctcaccgacaagatccagctggcctgcctccctcctgccggcaccattctacccaacaactacccctgctacgtcacgggctggggaaggctgcagaccaacggggctgttcctgatgtcctgcagcagggccggttgctggttgtggactatgccacctgctccagctctgcctggtggggcagcagcgtgaaaaccagtatgatctgtgctgggggtgatggcgtgatctccagctgcaacggagactctggcgggccactgaactgtcaggcgtctgacggccggtggcaggtgcacggcatcgtcagcttcgggtctcgcctcggctgcaactactaccacaagccctccgtcttcacgcgggtctccaattacatcgactggatcaattcggtgattgcaaataactaaccaaaagaagtccctgggactgtttcagacttggaaaggtcacagaaggaaaataatataataaagtgacaactatgcaaatca

SEQ ID NO: 653 - DNA, 1834 bp, Homo sapiens
  source 1..1834: mol_type = genomic DNA
acaggacccacagatatctgctgccatccacactctccagattggtgtcctgggaccacgtggggatgctgccgtggcttcttgtcttctctgctctgggtatccaggcctggggtgattcctcctggaacaaaacacaagctaaacaggtatcagaggggctccagtacctatttgagaacatctcccagctcactgaaaaaggccttcccacagatgtctccaccacggtctctcgcaaggcatggggggcagaagctgttggctgcagtattcagctgaccacgccagtgaatgtccttgttatacaccatgtccctggactggagtgtcacgaccagacagtctgcagccagagactgcgggaactgcaggcccatcatgtccacaacaacagtgggtgtgatgtggcctacaacttcctggttggggatgatggcagggtgtatgaaggtgttggctggaatatccaaggagtgcacacccaaggctacaacaacatctccctgggctttgccttctttggcactaagaaaggccacagtcccagccctgctgccctgtcggccatggaaaacctaatcacctatgctgtccagaagggccacctgtcatccagttatgttcagccacttcttgggaaaggcgagaactgcctggcccctcggcagaagacaagcctgaagaaggcttgccccggcgttgtcccacggtctgtgtggggagccagggagacccactgtcccaggatgactctcccagcgaagtatggcatcattatccacactgccgggaggacctgcaacatttctgatgagtgccgcctgctggtccgggacatccagtctttctacatagacaggctcaagtcatgcgacattggttataacttcctggtgggccaggatggcgccatttatgaaggggtgggctggaatgtccaaggctcctccacccctggctacgatgacattgccctgggcattaccttcatgggcaccttcacaggtataccacccaatgctgcagcactagaggcagcccaagacctgatccagtgtgccatggtcaaagggtacctgactcccaactacctgctggtgggccacagtgatgtggcccgaaccttgtctcctgggcaggctttgtacaacatcatcagcacctggcctcatttcaaacactgagagaagccccaggtccttctgagactgctttccctcccctgtcaggtctctcctgtcctaaccatccagcttggctcaacaccttttgccctcctcccctgccacacagtcctgtgcctcctttttcaggttgggatgatcatgccctctcctgccaacatcctccaagggcctccaaacctcatagctggacattcacagccctctgagtctgagtccagatttcttctctccttaccttcctctcccttggaaacccaactcctcagccaggtgagacaatgggctggttcttgtttcatttctctctctctctccattcccctctgcctggtgagccttcccctggtgtctgcctggcagcccccacctcccacctatcacccctcacccataactcaggtcaacgtgaccaaccttccttgcttacacataaacttgtatatatttggatgtagcccttatttaatggctgtcattatttatagatatgtctatccttgctacttggttgtgagtttctccaggggaggaactgtgttttattcatctctatgtcctctgtttctcagcagtgtctgaaatttaatgggttctactgatgtttattagagaaatggatgaataaatgaatgaagagatccaaa

SEQ ID NO: 654 - DNA, 612 bp, Homo sapiens
  source 1..612: mol_type = genomic DNA
ggcttgcagtgctcttggcagacatgaggcaacgattgctcccgtccgtcaccagccttctccttgtggccctgctgtttccaggatcgtctcaagccagacatgtgaaccactcagccactgaggctctcggagaactcagggaaagagcccctgggcaaggcacaaacgggtttcagctgctacgccacgcagtgaaacgggacctcttaccaccgcgcaccccaccttaccaaggggatgttccaccgggaattagaaataccatctgccatatgcagcaagggatctgcagactttttttctgccattctgggacaggccagcagcacagacaacgctgtggataaggagagtagagacttcctcttcctgcctcctgtcttctggagttgtgacctcagggtggcccaggtggatcggcttcagaggccaggaggcagctctctgcagccgaagagcaggagcctcacccagggtctgtggctctgactaagcctggactgcctctcggctgtgctccatggactggctccccagggatccatgtgagagaccggagtatgatcctcagtgcgaggacaaataaaagtagtgattatgtccacccca

SEQ ID NO: 655 - DNA, 779 bp, Homo sapiens
  source 1..779: mol_type = genomic DNA
cacgcctcccgctgccagcccggcaccgggatcttaatcagtcactatgaaaactcattagctccacagcaatgagtcctccactgctgaagcttggcgctgtgcttagtaccatggcaatgatctcaaactggatgtcccaaactctcccatccttggtgggactgaacaccacgaggctgtcgactccggataccttaactcagattagtcctaaagaagggtggcaggtgtacagctcagctcaggatcctgatgggcggtgcatttgcacagttgttgctccagaacaaaacctgtgttcccgggatgccaaaagcaggcaacttcgccaactactggaaaaggttcagaacatgtcccagtctattgaagtcttaaacttgagaactcagagagatttccaatatgttttaaaaatggaaacccaaatgaaagggctgaaggcaaaatttcggcagattgaagatgatcgaaagacacttatgaccaagcattttcaggagttgaaagagaaaatggacgagctcctgcctttgatccccgtgctggaacagtacaaaacagatgctaagttaatcacccagttcaaggaggaaataaggaatctgtctgctgtcctcactggtattcaggaggaaattggtgcctatgactacgaggaactacaccaaagagtgctgagcttggaaacaagacttcgtgactgcatgaaaaagctaattgatttaaaaaagagaaaagaagaagaaaaaaggcaacagaaaggagaagcataa

SEQ ID NO: 656 - DNA, 2586 bp, Homo sapiens
  source 1..2586: mol_type = genomic DNA
aaagggtggggggcgggggtagggggagccaatcccggcagcgccaaagaggggaggaggcggtgacagccgcggggagggggcgggaggagagaggcagctcggctcggctccgcgctcagctccgctctgcctccggctctgcgctcacctgctgcctagtgttccctctcctgctccaggacctccgggtagacctcagaccccgggcccattcccagactcagcctcagcccggacttccccagccccgacagcacagtaggccgccagggggcgccgtgtgagcgccctcccgggcgggagcggggcgccgggggccatgcggggccagggccgcaaggagagtttgtccgattcccgagacctggacggctcctacgaccagctcacgggccaccctccagggcccactaaaaaagcgctgaagcagcgattcctcaagctgctgccgtgctgcgggccccaagccctgccctcagtcagtgaaattggccgggtcttccgctttctcggtgacagttcgctcccttcagcattagccgccccagcctccctccgcccccacagaccccgcctgctggacccagacagcgtggacgatgaatttgaattgtccaccgtgtgtcaccggcctgagggtctggagcagctgcaggagcaaaccaaattcacgcgcaaggagttgcaggtcctgtaccggggcttcaagaactcttccctcccatcacatgagccacgtggaatgtcccagcggaattgtcaatgaggagaacttcaagcagatttactcccagttctttcctcaaggagactccagcacctatgccacttttctcttcaatgcctttgacaccaaccatgatggctcggtcagttttgaggactttgtggctggtttgtccgtgattcttcggggaactgtagatgacaggcttaattgggccttcaacctgtatgaccttaacaaggacggctgcatcaccaaggaggaaatgcttgacatcatgaagtccatctatgacatgatgggcaagtacacgtaccctgcactccgggaggaggccccaagggaacacgtggagagcttcttccagaagatggacagaaacaaggatggtgtggtgaccattgaggaattcattgagtcttgtcaaaaggatgagaacatcatgaggtccatgcagctctttgacaatgtcatctagcccccaggagagggggtcagtgtttcctggggggaccatgctctaaccctagtccaggcggacctcacccttctcttcccaggtctatcctcatcctacgcctccctgggggctggagggatccaagagcttggggattcagtagtccagatctctggagctgaaggggccagagagtgggcagagtgcatctcggggggtgttcccaactcccaccagctctcacccccttcctgcctgacacccagtgttgagagtgcccctcctgtaggaattgagcggttccccacctcctacccctactctagaaacacactagacagatgtctcctgctatggtgcttcccccatccctgacctcataaacatttcccctaagactcccctctcagagagaatgctccattcttggcactggctggcttctcagaccagccattgagagccctgtgggagggggacaagaatgtatagggagaaatcttgggcctgagtcaatggataggtcctaggaggtggctggggttgagaatagaagggcctggacagattatgattgctcaggcataccaggttatagctccaagttccacaggtctgctaccacaggccatcaaaatataagtttccaggctttgcagaagaccttgtctccttagaaatgccccagaaattttccacaccctcctcggtatccatggagagcctggggccagatatctggctcatctctggcattgcttcctctccttccttcctgcatgtgttggtggtggttgtggtgggggaatgtggatgggggatgtcctggctgatgcctgccaaaatttcatcccaccctccttgcttatcgtccctgttttgagggctatgacttgagtttttgtttcccatgttctctatagacttgggaccttcctgaacttggggcctatcactccccacagtggatgccttagaagggagagggaaggagggaggcaggcatagcatctgaacccagtgtgggggcattcactagaatcttcaatcaacctgggctctccccaccccaccccagataacctcctcagttccctagggtctcttcttgcttgactcaatctacccagagatgccccttagcacacctagagggcagggaccataggacccaggttccaaccccattgtcagcaccccagccatgcggccaccccttagcacacctgctcgtcccatttagcttaccctcccagttggccagaatctgaggggagagcccccagagagcccccttccccatcagaagactgttgactgctttgcattttgggctcttctatatattttgtaaagtaagaaatataccagatctaataaaacacaatggctatgc

SEQ ID NO: 657 - DNA, 1712 bp, Homo sapiens
  source 1..1712: mol_type = genomic DNA
cgccattgccgggcctgcctggccaccctgcgcagcggccttgcgtcctctccgggggcggagcgggtcggcgggcctgacagggaacctccctgaccgagcccacgtctccccacggccagagaaatctccggcccggcccgcatcgccagcccccaggcccggaggaacggcccgagcccaggagaaccacatcttcgtcccagccccggaggctcctgtgggcaagatcgtgagccaacgggttcctgaggcccctcctggccaggcagggtttccccgcgcgtttccgaggagccctgcctggccgggcggctggacaaacagtgcacttgccggcggtcccaacccagcaggagaagtggacatgaggttggcaggccctctccgcattgtggtcctagtcgtcagtgtgggtgtcacatggatcgtggtcagcatcctcctgggtgggcctggcagtggctttcctcgcatccagcaactcttcaccagtccagagagctcggtgactgcagcgccacgggccaggaagtacaagtgtggcctgccccagccgtgtcctgaggagcacctggccttccgcgtggtcagcggggccgccaacgtcattgggcccaagatctgcctcgaggacaagatgctgatgagcagcgtcaaggacaacgtgggccgcgggctgaacatcgccctggtgaacggggtcagcggcgagctcatcgaggcccgggcctttgacatgtgggccggagatgtcaacgacctgttgaagtttattcggccactgcacgaaggcaccctggtgttcgtggcatcctacgacgacccagccaccaagatgaatgaagagaccagaaagctcttcagtgagctgggcagcaggaacgccaaggagctggccttccgggacagctgggtgtttgtcggggccaagggtgtgcagaacaagagcccctttgagcagcacgtgaagaacagtaagcacagcaacaagtacgaaggctggcccgaggcgctggagatggaaggctgtatcccgcggagaagcacggccagctagcacggccagtgccaggaccgggccgagggaggccagaccaagggaggcacgcgcgctgccgggcggacagaggctgaggctcacaccccacacccgggcaggagcgctccctggccccaacacatcggggctccgaggcagtgaccagaacgtggtctcaaggtggtgggggctatgggggctgcagggggtagccctgccgcactttgtcacgggagcccagggtacccgcctccttttcgtaacactgttccccccggtcagcccatctagccctgtcctccattcctcacgccatctccatccccatcttgagtcctggaacggccctgggtgcctgcccctcactgtgcaactctgggagcagcccggcaggttggggcgtcttccagaacctctcccttctggagccactctgcactgcgggctaaacatgtttccagtgtgattccttccagtgagccaaacccggtggctgcttcatgagcctgactgcctctcgcctgctctcagcaggaagggacccctggagcaggctggcccggggtggtgaagtagctggagcccgatcacagtcccgcggtttgtcagggggcccaccttctagatgaccccttaataaagtgatggccccacagaagaaatgccttca

SEQ ID NO: 658 - DNA, 2508 bp, Homo sapiens
  source 1..2508: mol_type = genomic DNA
agcggcgagctggctttctcctggccacttgccggggtgaggggcagccggaggagtccgagaggaagcggaggcgcgagctggaggcggcggctcccgtcggcctccggcaggactgagcgctgggaggccggaaggcgggcgcgcgcggcggagaggcgggcgggaggccggagcatattaatgaaaagtgccataaactgaaaaaccaaacatgagggtagcaggtgctgcaaagttggtggtagctgtggcagtgtttttactgacattttatgttatttctcaagtatttgaaataaaaatggatgcaagtttaggaaatctatttgcaagatcagcattggacacagctgcacgttctacaaagcctcccagatataagtgtgggatctcaaaagcttgccctgagaagcattttgcttttaaaatggcaagtggagcagccaacgtggtgggacccaaaatctgcctggaagataatgttttaatgagtggtgttaagaataatgttggaagagggatcaatgttgccttggcaaatggaaaaacaggagaagtattagacactaaatattttgacatgtggggaggagatgtggcaccatttattgagtttctgaaggccatacaagatggaacaatagttttaatgggaacatacgatgatggagcaaccaaactcaatgatgaggcacggcggctcattgctgatttggggagcacatctattactaatcttggttttagagacaactgggtcttctgtggtgggaagggcattaagacaaaaagcccttttgaacagcacataaagaacaataaggatacaaacaaatatgaaggatggcctgaagttgtagaaatggaaggatgcatcccccagaagcaagactaatggaaatgtggagagaattgaagaaagcgcactttcactcttaatgggagagctataaatggcagagctatgtgtaaatattttaagagcatgcagccatcttggtgtgtgcatgagtattgtctcttttgatatcaggattatttattgctaacgtaaatagatagcattgtaaataatcatcacaatgatcaaatcactgaaccatgtctccgcacatttccctaaaagtacaatgtttagactgctatggtaatacatattttaaattctaaaagcatacacaatgtgtaactgaatggtttgtgaaaaatatattgatatatatactagttgctatgaaaatatcatggaataatagggattttagggtggatactttattttcttttatgtttctatatgttgcgttgtgatgacattatcttttaaattaaaaagagatttggctagttgtgtgtgtaatgttactttacagtccgactctcctgatgtacctcttttcatgatctttttctttccttcccaagaaactgaggaatgtttaatatgaaaacatacatcggatatgtgaaaagcacaacaaaattcttaatgtacacagtaaaaaagtaaatatataaatgtagatggcatttaggaccacagcttgctggatttgtgttagctatgggaataacttgattttgtataagctatttagagtgaggctggaggtggcagcttcacagaactggagaaccaggccaagtcccctccccaacctaattaggtcattcaggacagctaagtcagtatatttagagcaatactagcatacgtttttcttaattgttatcagcattgaccaagtggtttggaaggaggcatgctttaatatcacaataattttgatttgtaaaccaagaaattaatcctgtgtttatctaacttcataatagcaattattgcccgaagctatagtggcatatttacaaaagttcttattactgggcggactgataacatttaaaaaataattgtgtttgaccccaaatgactttatacccaattctacataaaaatatagaagatctatctttttttgttaccttcagatgttcactaaataactcagtttttaagcagaagttttcagggcattaaatatatgttgtgtatgaagtatctcaaactggaacataaatttagtgatcaaactgccattcacagtgtaaggcagcacttaaatttcgaacctaaagtttagatgcattgtataaaaaaacctaaaagcagtatctgttatttagctgtaaaccaagttggaagctattcggataatttcttaaatattgatgaactttggagtactgtttcttccttcaaactgaatgtaattaattcatgaataaatgcaccttatatgtttaaacaatctttgtatacttttgggatttttggtgcttatatgctaaatcacattcagcatgtgtattttgacatttaaaatacttccctcaattctgtaaattaaaagaatagttattttacagttccagggattgtgaaataaatgttgcagttttttaaaataatgaaaataaatactcttggttttgctttgtgaa

SEQ ID NO: 659 - DNA, 1973 bp, Homo sapiens
  source 1..1973: mol_type = genomic DNA
atggaggactcggactcggcggcaaagcagctgggcctggctgaggcggccgcggcaggaggcgaggcggaggagccggtgctgagcagggacgaggactcggaggaggacgcagactcggaggcggagcgggagacgccgcgggtcacggcagtggcggtgatggcggcggagcccgggcacatggacatgggcgccgaggccctgcccggccccgacgaggccgccgctgccgcagccttcgcagaggtgaccacagtgacagtggccaacgtgggggctgctgcagacaatgtcttcaccacgtctgtggcgaacgcggcatccatctcaggacatgttctgtctggtaggacggcccttcagatcggggacagcctgaacaccgaaaaagcgacactgattgtcgtccacacagatgggagcatcgtggagaccaccgggctgaaaggcccggcagctcccctcaccccaggtcctcagtctcctccaacccctctggctcccggccaagaaaaaggtggaactaaatacaactgggacccttctgtgtacgacagtgagctgcccgtacggtgccggaacatcagcggcactctgtacaagaacaggctcggctcaggcggccggggacggtgcatcaagcagggggagaactggtacagtcccaccgagtttgaggccatggcaggaagagccagcagtaaggactggaaaagaagcattcgctacgcgggccgacccttgcagtgcctcatccaggatgggatcttaaaccctcacgctgcctcttgcacctgtgctgcctgctgcgacgacatgaccttaagtggcccagtcaggctttttgtgccttacaaaaggcgcaagaaggagaatgaactgcccacaactcccgtgaagaaggactcccccaagaacatcacattgcttccagccaccgcggctaccaccttcaccgtgaccccctcgggacagatcacgacctcgggggcactgacctttgaccgagcgtccacggtagaggccactgctgtcatatcagagagtccggcccagggcgacgtcttcgcaggggccacagtccaagaggccagcgtgcagcccccatgcagggccagccaccctgagcctcactaccccggctatcaggacagctgccagatcgcaccgtttccagaagctgcgttgccaacgtcacatcccaaaatagtgttgacatccctgcctgcgctggcggtcccacccccgactcccaccaaagcggcacctcccgcgttggtcaatgggctggagctgtcagagccgcggagctggctgtacctagaagagatggtcaactccttgctcaacacagcgcagcagctgaagacgctgtttgagcaagccaagcatgccagcacctaccgagaagctgccacaaaccaggccaagatccacgctgacgcagagcggaaggagcagtcctgcgttaactgcggccgggaggctatgagcgagtgcaccggctgccacaaggtcaactactgctccaccttctgccaacgcaaggactggaaggatcaccagcacatatgcggccagtcagcagctgtcaccgtccaggcagacgaagtccacgtggctgaaagcgtgatggagaaggtgaccgtgtgaggctccatcggccgccctgggagctggggcccctcgcactcctgtgaggcttttgcaggtcgaaggcccccctgaggactctggggggacgttgagaagaggggtgtgggaaggtaaagaaacttgctggacaagtcattaacacactttaagcgaatggtgccctgggaagcgcactccccctgcccgggccccctgcccgctcgcggacagattttttatccctgggatcatgagcgtccggtcttgcccacagggcctgtgctgcgacgcacatacatacgtgttgtgtctgtcaataaagtgtaaataaggtc

SEQ ID NO: 660 - DNA, 4875 bp, Homo sapiens
  source 1..4875: mol_type = genomic DNA
gcagccgcggcggcggtggcacagcagcgggcagcggcggctcagggagctggagcctcaacagcctccagcgagcccgggacccgccgacagcccgagaaaccagccgaaggacgcggggcggggtcgccgccgccgccacggggtgctccctccctcccgcccaagtccggccacctggtcttcccctcggccccggccgtctcagactcatcaaaatgaaaccaggaggcttttggctgcatctcacactgctcggagcctccctgccggctgcgctgggatggatggacccaggaaccagcagaggcccggatgtgggtgtgggggagtcacaggcagaggagcccagaagctttgaagtcacaagaagagaagggctttccagccacaacgagctgctggcctcctgcgggaagaagttctgcagccgagggagccggtgcgtgctcagcctcgcccccgaggacagggtcagtgtgaccacagtgaccgtggggctgagcacagtgctgacctgcgccgtccatggagacctgaggccaccaatcatctggaagcgcaacgggctcaccctgaacttcctggacttggaagacatcaatgactttggagaggatgattccctgtacatcaccaaggtgaccaccatccacatgggcaattacacctgccatgcttccggccacgagcagctgttccagacccacgtcctgcaggtgaatgtgccgccagtcatccgtgtctatccagagagccaggcacaggagcctggagtggcagccagcctaagatgccatgctgagggcattcccatgcccagaatcacttggctgaaaaacggcgtggatgtctcaactcagatgtccaaacagctctcccttttagccaatgggagcgaactccacatcagcagtgttcggtatgaagacacaggggcatacacctgcattgccaaaaatgaagtgggtgtggatgaagatatctcctcgctcttcattgaagactcagctagaaagacccttgcaaacatcctgtggcgagaggaaggcctcagcgtgggaaacatgttctatgtcttctccgacgacggtatcatcgtcatccatcctgtggactgtgagatccagaggcacctcaaacccacggaaaagattttcatgagctatgaagaaatctgtcctcaaagagaaaaaaatgcaacccagccctgccagtgggtatctgcagtcaatgtccggaaccggtacatctatgtggcccagccagcactgagcagagtccttgtggtcgacatccaagcccagaaagtcctacagtccataggtgtggaccctctgccggctaagctgtcctatgacaagtcacatgaccaagtgtgggtcctgagctggggggacgtgcacaagtcccgaccaagtctccaggtgatcacagaagccagcaccggccagagccagcacctcatccgcacaccctttgcaggagtggatgatttcttcattcccccaacaaacctcatcatcaaccacatcaggtttggcttcatcttcaacaagtctgatcctgcagtccacaaggtggacctggaaacaatgatgcccctcaagaccatcggcctgcaccaccatggctgcgtgccccaggccatggcacacacccacctgggcggctacttcttcatccagtgccgacaggacagccccgcctctgctgcccgacagctgctcgttgacagtgtcacagactctgtgcttggccccaatggtgatgtaacaggcaccccacacacatcccccgacgggcgcttcatagtcagtgctgcagctgacagcccctggctgcacgtgcaggagatcacagtgcggggcgagatccagaccctgtatgacctgcaaataaactcgggcatctcagacttggccttccagcgctccttcactgaaagcaatcaatacaacatctacgcggctctgcacacggagccggacctgctgttcctggagctgtccacggggaaggtgggcatgctgaagaacttaaaggagccacccgcagggccagctcagccctgggggggtacccacagaatcatgagggacagtgggctgtttggacagtacctcctcacaccagcccgagagtcactgttcctcatcaatgggagacaaaacacgctgcggtgtgaggtgtcaggtataaagggggggaccacagtggtgtgggtgggtgaggtatgaagggcccagagcagagccctgggccaaggaacaccccctagtcctgacactgcagcctcaagcaggtacgctgtacatttttacagacaaaagcaaaaacctgtactcgctttgtggttcaacactggtctccttgcaagtttcctagtataaggtatgcgctgctaccaagattggggttttttcgttaggaagtatgatttatgccttgagctacgatgagaacatatgctgctgtgtaaagggatcatttctgtgccaagctgcacaccgagtgacctggggacatcatggaaccaagggatcctgctctccaagcagacacctctgtcagttgccttcacatagtcattgtcccttactgccagacccagccagactttgccctgacggagtggcccggaagcagaggctgaccaggagcaggggcctccctcccgaactgaaagcccatccgtcctcgcgtgggaccgcatcttctccctcgcagctgcttcttgcttttctttccatttgacttgctgtaagcctgagggagagccaacaagacttactgcatcttgggggatggggaaatcactcactttattttggaaatttttgattaaaaaaaaattttataatctcaaatgctagtaagcagaaagatgctctccgaggtccaactatatccttccctgccttaggccgagtctcgggggtggtcacaaccccacatcccacagccagaaagaacaatggtcatctgagaatactggccctgtcgactattgccaccctgcttctccaagagcagaccaggccacctcatccgtaaggactcggttctgtgttgggaccccaaaaaaccagaacaagttctgtgtgcctcctttcagcacagaagggagacatctcattagtcaggtctggtaccccagattcagggcagactgggcttgcctggcaaggtatgggtggcctccaggctcaatgcagaaaccccaaggacacgagtggggccaggtgagttcctgaagctataccttttcaaaacagattttgttttcctacctgtggcccatccactcctctctggtaccccatccccgcatcagcactgcagagagaacacatttcggcgagggttttcttacccacattccccaatcaatacacacacactgcagaacccagaacagaaggccacaggctggcactactgcattctccttatgtgtctcaggctgtggtgactctcacatgggcatcgaagaagtacaacccacatagccctctggagaccgcctagatcagagactcagcaaaaacaggctcgccttccctctcccacatatgagtggaacttacatgtgtcctggtttgaatgatcattttgcaagccacacgggttgggagaggtggtctcaccacagacgtctttgctaatttggccaccttcacctactgacatgaccaggattttcctttgccattaaggaatgaactctttcaaggagaggaaaccctagactctgtgtcactctcaacacacacagctcctttcactcctgcctgactgccaagccacctgcatcccccgccccagatctcatgagatcaatcacttgtatgtctcacgcaacttggtccaccaaacgcctgtcccctgtaactcctaggggtgcgcctagacaggtacgtctgttttttattttaaaagatatgctatgtagatataagttgaggaagctcacctcaaaagcctagaatgcagtttcacagtagctgggatgcatggatgacccatctcacccctttttttttcctgcctcaatatcttgatatgttatgtttactcccaatctcccatttttaccactaaaattctccaactttcataaacttttttttggaaaaatttccattgtatcagcccctgacagaaaaaggatctctgagcctaaaggaggaaaagtcccaccaactaccagaccagaacacgagcccctctgggcagcaggattcctaagtcaaagaccagtttgacccaaactggccttttaaaataatcaggagtgacagagtcaacttctgcagcacctgcttctcccccactgtcccttccatcttggaatgtgtctaaaaaagcatagctgccctttgctgtcctcagagtgcatttcctggagacggcaggcttaggtctcactgacagcatgccagacacaactgaatcgaagcaggcctgaagcctaggtcagggtttcaggagtccagccccaggaggcaaagtcaccaatgcagggaggtaaatgccttttggcaggaaaaccaatagagttggttgggtggggagtcaggggtgggaggagaaggaggaagaggaggaaggccagactggcctgccctttctcccatacttcaccccagcagaggttcatgggacacagttggaaagccactgggaggaaatgcctcactacaggggggcctcctgtagcaagcccagccggtaatcctcctaatgaacccacaaggtcaattcacaactgatatcttagctattaaagaagtactgactttaccaaaagaatcatcaagaaagctatttatataaaccccctcagtcattttgaaataaaattaattttac

SEQ ID NO: 661 - DNA, 2203 bp, Homo sapiens
  source 1..2203: mol_type = genomic DNA
agcccagcgctcctccccgcaaatgatcccgccccaggggcctatcccagtccccccagtgcctttggttgctggagggaagaacacaatggatctggtgctaaaaagatgccttcttcatttggctgtgataggtgctttgctggctgtgggggctacaaaagtacccagaaaccaggactggcttggtgtctcaaggcaactcagaaccaaagcctggaacaggcagctgtatccagagtggacagaagcccagagacttgactgctggagaggtggtcaagtgtccctcaaggtcagtaatgatgggcctacactgattggtgcaaatgcctccttctctattgccttgaacttccctggaagccaaaaggtattgccagatgggcaggttatctgggtcaacaataccatcatcaatggtgaccaggtgtggggaggacagccagtgtatccccaggaaactgacgatgcctgcatcttccctgatggtggaccttgcccatctggctcttggtctcagaagagaagctttgtttatgtctggaagacctggggccaatactggcaagttctagggggcccagtgtctgggctgagcattgggacaggcagggcaatgctgggcacacacaccatggaagtgactgtctaccatcgccggggatcccggagctatgtgcctcttgctcattccagctcagccttcaccattactgaccaggtgcctttctccgtgagcgtgtcccagttgcgggccttggatggagggaacaagcacttcctgagaaatcagcctctgacctttgccctccagctccatgaccccagtggctatctggctgaagctgacctctcctacacctgggactttggagacagtagtggaaccctgatctctcgggcacttgtggtcactcatacttacctggagcctggcccagtcactgcccaggtggtcctgcaggctgccattcctctcacctcctgtggctcctccccagttccaggcaccacagatgggcacaggccaactgcagaggcccctaacaccacagctggccaagtgcctactacagaagttgtgggtactacacctggtcaggcgccaactgcagagccctctggaaccacatctgtgcaggtgccaaccactgaagtcataagcactgcacctgtgcagatgccaactgcagagagcacaggtatgacacctgagaaggtgccagtttcagaggtcatgggtaccacactggcagagatgtcaactccagaggctacaggtatgacacctgcagaggtatcaattgtggtgctttctggaaccacagctgcacaggtaacaactacagagtgggtggagaccacagctagagagctacctatccctgagcctgaaggtccagatgccagctcaatcatgtctacggaaagtattacaggttccctgggccccctgctggatggtacagccaccttaaggctggtgaagagacaagtccccctggattgtgttctgtatcgatatggttccttttccgtcaccctggacattgtccagggtattgaaagtgccgagatcctgcaggctgtgccgtccggtgagggggatgcatttgagctgactgtgtcctgccaaggcgggctgcccaaggaagcctgcatggagatctcatcgccagggtgccagccccctgcccagcggctgtgccagcctgtgctacccagcccagcctgccagctggttctgcaccagatactgaagggtggctcggggacatactgcctcaatgtgtctctggctgataccaacagcctggcagtggtcagcacccagcttatcatgcctgtgcctgggattcttctcacaggtcaagaagcaggccttgggcaggttccgctgatcgtgggcatcttgctggtgttgatggctgtggtccttgcatctctgatatataggcgcagacttatgaagcaagacttctccgtaccccagttgccacatagcagcagtcactggctgcgtctaccccgcatcttctgctcttgtcccattggtgagaacagccccctcctcagtgggcagcaggtctgagtactctcatatgatgctgtgattttcctggagttgacagaaacacctatatttcccccagtcttccctgggagactactattaactgaaataaatactcagagcctg

SEQ ID NO: 662 - DNA, 2070 bp, Homo sapiens
  source 1..2070: mol_type = genomic DNA
tcagcccacttccggggagggaggcagaggaacccctccccgccgctcacccctaagcccagccctcggctcccacccttgtgtacctgggccgaaccattcaccggagcgcgcagcgggtggagtgtggctcggaggaccgcggcgggtcaagcacctttctcccccatatctgaaagcatgccctttgtccacgtcgtttacgctcattaaaacttccagaatgcaacaggacggacttggagtagggacaaggaacggaagtgggaaggggaggagcgtgcacccctcctggccttggtgcgcgccgcgccccctaaggtactttggaagggacgcgcgggccagacgcgcccagacggccgcgatggcgctgttggccggcgggctctccagagggctgggctcccacccggccgccgcaggccgggacgcggtcgtcttcgtgtggcttctgcttagcacctggtgcacagctcctgccagggccatccaggtgaccgtgtccaacccctaccacgtggtgatcctcttccagcctgtgaccctgccctgtacctaccagatgacctcgacccccacgcaacccatcgtcatctggaagtacaagtctttctgccgggaccgcatcgccgatgccttctccccggccagcgtcgacaaccagctcaatgcccagctggcagccgggaacccaggctacaacccctacgttgagtgccaggacagcgtgcgcaccgtcagggtcgtggccaccaagcagggcaacgctgtgaccctgggagattactaccagggccggaggattaccatcaccggaaatgctgacctgacctttgaccagacggcgtggggggacagtggtgtgtattactgctccgtggtctcagcccaggacctccaggggaacaatgaggcctacgcagagctcatcgtccttgtgtatgccgccggcaaagcagccacctcaggtgttcccagcatttatgcccccagcacctatgcccacctgtctcccgccaagaccccacccccaccagctatgattcccatgggccctgcctacaacgggtaccctggaggataccctggagacgttgacaggagtagctcagctggtggccaaggctcctatgtacccctgcttcgggacacggacagcagtgtggcctctgaagtccgcagtggctacaggattcaggccagccagcaggacgactccatgcgggtcctgtactacatggagaaggagctggccaacttcgacccttctcgacctggcccccccagtggccgtgtggagcgggccatgagtgaagtcacctccctccacgaggacgactggcgatctcggccttcccggggccctgccctcaccccgatccgggatgaggagtggggtggccactccccccggagtcccaggggatgggaccaggagcccgccagggagcaggcaggcgggggctggcgggccaggcggccccgggcccgctccgtggacgccctggacgacctcaccccgccgagcaccgccgagtcagggagcaggtctcccacgagtaatggtgggagaagccgggcctacatgcccccgcggagccgcagccgggacgacctctatgaccaagacgactcgagggacttcccacgctcccgggacccccactacgacgacttcaggtctcgggagcgccctcctgccgaccccaggtcccaccaccaccgtacccgggaccctcgggacaacggctccaggtccggggacctcccctatgatgggcggctactggaggaggctgtgaggaagaaggggtcggaggagaggaggagaccccacaaggaggaggaggaagaggcctactacccgcccgcgccgcccccgtactcggagaccgactcgcaggcgtcccgagagcgcaggctcaagaagaacttggccctgagtcgggaaagtttagtcgtctgatctgacgttttctacgtagcttttgtatttttttttttaatttgaaggaacactgatgaagccctgccatacccctcccgagtctaataaaacgtataatc

SEQ ID NO: 663 - DNA, 2267 bp, Homo sapiens
  source 1..2267: mol_type = genomic DNA
agcggcatcctctctctagcttctggcgctgcccactgtaacccgactccggcatttgcgtttggggcgccctccctgcgccgggggcgggagcccagcgagcgcagagccccggccccgcgcggcccgagtgccacatcactgcgctggccgtccaaggtccgccgccccaccatgccgcccccgctgccgctgctgctccttacagtcctggtcgtcgccgctgcccggccggggtgcgagtttgagcggaaccccgccggtgaatgccacaggccaccagctgcagacagcgccacctgcgtggacctgcagctcaggacctgcagtgatgccgcctacaaccacaccaccttccccaacctgcttcagcaccggtcatgggaggtggtggaggccagctccgagtacatcctgctgagcgttctacaccagctcctggaaggccagtgcaacccggacctgcggctgctgggctgtgctgtgctggccccccggtgtgagggcggctgggtgcgcagaccctgccggcacatctgcgagggcctgcgggaggtctgccagcccgccttcgacgccattgacatggcctggccctacttccttgactgccaccgctacttcacgagagaggacgagggctgctatgacccgctggagaagcttcggggaggcctggaggctgacgaggcactgccctcagggctgccgcccaccttcatccgcttcagccaccactcctacgcccagatggtgcgtgtgctgaggcggacggcctcccgctgcgcccacgtggccaggacctacagcatcgggcgcagcttcgacggcagggagctgctggtcatcgagttctccagccgccccggccagcacgagctgatggagcccgaggtgaagctcatcggcaacattcatggcaacgaggtggcgggccgggagatgctcatctacctagcccagtacctgtgctctgagtacctgcttggtaacccccgcatccagcgcctgctcaacaccacccgcatccacctgctgccctccatgaaccctgacggctatgaggtggcagctgccgagggtgccggctacaacgggtggacgagcgggaggcagaacgcgcagaacctggatctgaaccgaaatttcccggacctgacgtccgagtactaccggctggcggagacccgcggcgcacgcagcgaccacatccccatcccccagcactactggtggggtaaggtggccccggagacaaaggcaatcatgaagtggatgcagaccataccctttgtgctctcagccagccttcatgggggcgacctggtggtgtcctaccccttcgacttctccaagcacccccaggaggagaagatgttttctcccacgcccgacgagaagatgttcaagctgctgtccagagcctacgctgacgtccaccccatgatgatggacaggtcggagaataggtgtggaggcaatttcctgaagagggggagcatcatcaacggggcggactggtacagcttcacgggaggcatgtccgatttcaactacctgcacaccaactgctttgagatcacggtagagctgggctgtgtgaagttcccccccgaggaggccctgtacatactctggcagcacaacaaggagtcactcctgaatttcgtggagacggtgcaccggggcatcaaaggtgtggtgacagataaattcggcaagccagtcaaaaacgcccggatctcagtcaaaggcattcgccacgacatcaccacagccccagatggtgactactggagactgctgcccccaggtatccacattgtcattgcccaagcccctggctacgccaaagtcatcaagaaagtcatcatccccgcccggatgaagagggctggccgtgtggacttcattctgcaacctctggggatgggacccaagaactttattcatgggctgcggaggactgggccccacgacccactgggaggtgccagctctttgggggaggccacggagcccgacccgctccgggcgcgcaggcagccctcggccgacgggagtaagccctggtggtggtcctacttcacatcgctgagcacccacaggccacgctggctgctcaagtactagccccggccccagcacccgccaggatgtggagaccgaggcccatctccgcatcccgggctcctggctcttgattttgtctgccacagacatcccacaaagccgctgccattttattaaagtgttttgatccactt

SEQ ID NO: 664 - DNA, 510 bp, Homo sapiens
  source 1..510: mol_type = genomic DNA
ccctggggaagagaagctgagaggaactcctcactcagctagcttcaggagccatgacatcatctctaccatggaaattccactcactctcctgtgcccccacatttgtcctaggcctcagagtccctataaagagagattcccaactcagtatcagcacaggacacagctaggttctgaagcttctgagttctgcagcctcacctctgagaaaacctctttgccaccaataccatgaagctctgcgtgactgtcctgtctctcctcgtgctagtagctgccttctgctctctagcactctcagcaccaatgggctcagaccctcccaccgcctgctgcttttcttacaccgcgaggaagcttcctcgcaactttgtggtagattactatgagaccagcagcctctgctcccagccagctgtggtggggttcctggggaggaaaggcaagcaagtctgcgctgaccccagtgagtcctgggtccaggagtacgtgtatgacctggaactg

SEQ ID NO: 665 - DNA, 534 bp, Homo sapiens
  source 1..534: mol_type = genomic DNA
ggcttgcagtgctcttggcagacatgaggcaacgattgctcccgtccgtcaccagccttctccttgtggccctgctgtttccaggatcgtctcaagccagacatgtgaaccactcagccactgaggctctcggagaactcagggaaagagcccctgggcaaggcacaaacgggtttcagctgctacgccacgcagtgaaacgggacctcttaccaccgcgcaccccaccttaccaagggacaggccagcagcacagacaacgctgtggataaggagagtagagacttcctcttcctgcctcctgtcttctggagttgtgacctcagggtggcccaggtggatcggcttcagaggccaggaggcagctctctgcagccgaagagcaggagcctcacccagggtctgtggctctgactaagcctggactgcctctcggctgtgctccatggactggctccccagggatccatgtgagagaccggagtatgatcctcagtgcgaggacaaataaaagtagtgattatgtccacccca

SEQ ID NO: 666 - DNA, 1189 bp, Homo sapiens
  source 1..1189: mol_type = genomic DNA
agagagcgggaagccgagctgggcgagaagtaggggagggcggtgctccgccgcggtggcggttgctatcgcttcgcagaacctactcaggcagccagctgagaagagttgagggaaagtgctgctgctgggtctgcagacgcgatggataacgtgcagccgaaaataaaacatcgccccttctgcttcagtgtgaaaggccacgtgaagatgctgcggctggcactaactgtgacatctatgaccttttttatcatcgcacaagcccctgaaccatatattgttatcactggatttgaagtcaccgttatcttatttttcatacttttatatgtactcagacttgatcgattaatgaagtggttattttggcctttgcttgatattatcaactcactggtaacaacagtattcatgctcatcgtatctgtgttggcactgataccagaaaccacaacattgacagttggtggaggggtgtttgcacttgtgacagcagtatgctgtcttgccgacggggcccttatttaccggaagcttctgttcttgcgttagtttgctgagaataatggtttccagcttcatccatgtccccgcaaaggacatgaactcatccttttttatggctgcatagtattccatggtgtatatgtgccacattttctttatccagtctatcattgatggacatttgggttggttcagtttcctctcacaaaggaaattagggaagcaatgaagataataggaatttataagttaggaaacaaaaataatagaatcagtcaatacaagagctgtcgtttgaaagtcctattaaattgataagccattggccaaccaagaaaaaaagggggaagaaaagacatatatttaaaattagaaaccagaaggggaaaataatcacaaacatcagcaaaactgaaaggatctacaggagtaccttgcaaaatagatgtgaataattggatgaaatggttgattttccagaataatgtaaatcaccaaaactgatcccagaatagggaaaaatctaaacagggcaatataaacatagaagaaaatgagaattttagcaaatgagtatctttcaaaaatgtatcaggcccagacctttttacaagttaactctttcaagccttcatgggatataattctgacactactctaactttgtcaaagaatagag

SEQ ID NO: 667 - DNA, 1230 bp, Homo sapiens
  source 1..1230: mol_type = genomic DNA
agcctgcaaaaaccacagagggcaaagccagaaagatggaaaggcacccatgcagctcaccacttgcctcagggagaccctcttcacaggggcttctcaaaagacctccctatggtggttgggcattgcctccttcggggttccagagaagctgggctgcgccaatttgccgctgaacagccgccagaaggagctgtgcaagaggaaaccgtacctgctgccgagcatccgagagggcgcccggctgggcattcaggagtgcgggagccagttcagacacgagagatggaactgcatgatcaccgccgccgccactaccgccccgatgggcgccagccccctctttggctacgagctgagcagcggcaccaaagagacagcatttatttatgctgtgatggctgcaggcctggtgcattctgtgaccaggtcatgcagtgcaggcaacatgacagagtgttcctgtgacaccaccttgcagaacggcggctcagcaagtgaaggctggcactgggggggctgctccgatgatgtccagtatggcatgtggttcagcagaaagttcctagatttccccatcggaaacaccacgggcaaagaaaacaaagtactattagcaatgaacctacataacaatgaagctggaaggcaggctgtcgccaagttgatgtcagtagactgccgctgccacggagtttccggctcctgtgctgtgaaaacatgctggaaaaccatgtcttcttttgaaaagattggccatttgttgaaggataaatatgaaaacagtatccagatatcagacaaaacaaagaggaaaatgcgcaggagagaaaaagatcagaggaaaataccaatccataaggatgatctgctctatgttaataagtctcccaactactgtgtagaagataagaaactgggaatcccagggacacaaggcagagaatgcaaccgtacatcagagggtgcagatggctgcaacctcctctgctgtggccgaggttacaacacccatgtggtcaggcacgtggagaggtgtgagtgtaagttcatctggtgctgctatgtccgttgcaggaggtgtgaaagcatgactgatgtccacacttgcaagtaaccactccatccagccttgggcaagatgcctcagcaatatacaatggcattgcaaccagagaggtgcccatccctgtgcagcgctagtaaagttgactcttgcagtggaatccc

SEQ ID NO: 668 - DNA, 4647 bp, Homo sapiens
  source 1..4647: mol_type = genomic DNA
gagagagagcgccgccgccatcttagttgctgccgctgccttcagcaagacgctgctctgaggcggggagggcgccgcgtcctgagcgcgcggcccagcgtcacggcggcggcggcggcggctcctccttggacccccggagctccccgcgccgcggagcagctagccccaggcccctagagccccgagagctccgagagctccgctcggcgtcccgcgcgcctccctgccgctcccgccccgggctggcgatgctgcgccgccccgctcccgcgctggccccggccgcccggctgctgctggccgggctgctgtgcggcggcggggtctgggccgcgcgagttaacaagcacaagccctggctggagcccacctaccacggcatagtcacagagaacgacaacaccgtgctcctcgaccccccactgatcgcgctggataaagatgcgcctctgcgatttgcaggtgagatttgtggatttaaaattcacgggcagaatgtcccctttgatgcagtggtagtggataaatccactggtgagggagtcattcgctccaaagagaaactggactgtgagctgcagaaagactattcattcaccatccaggcctatgattgtgggaagggacctgatggcaccaacgtgaaaaagtctcataaagcaactgttcatattcaggtgaacgacgtgaatgagtacgcgcccgtgttcaaggagaagtcctacaaagccacggtcatcgaggggaagcagtacgacagcattttgagggtggaggccgtggatgccgactgctcccctcagttcagccagatttgcagctacgaaatcatcactccagacgtgccctttactgttgacaaagatggttatataaaaaacacagagaaattaaactacgggaaagaacatcaatataagctgaccgtcactgcctatgactgtgggaagaaaagagccacagaagatgttttggtgaagatcagcattaagcccacctgcacccctgggtggcaaggatggaacaacaggattgagtatgagccgggcaccggcgcgttggccgtctttccaaatatccacctggagacatgtgacgagccagtcgcctcagtacaggccacagtggagctagaaaccagccacatagggaaaggctgcgaccgagacacctactcagagaagtccctccaccggctctgtggtgcggccgcgggcactgccgagctgctgccatccccgagtggatccctcaactggaccatgggcctgcccaccgacaatggccacgacagcgaccaggtgtttgagttcaacggcacccaggcagtgaggatcccggatggcgtcgtgtcggtcagccccaaagagccgttcaccatctcggtgtggatgagacatgggccattcggcaggaagaaggagacaattctttgcagttctgataaaacagatatgaatcggcaccactactccctctatgtccacgggtgccggctgatcttcctcttccgtcaggatccttctgaggagaagaaatacagacctgcagagttccactggaagttgaatcaggtctgtgatgaggaatggcaccactacgtcctcaatgtagaattcccgagtgtgactctctatgtggatggcacgtcccacgagcccttctctgtgactgaggattacccgctccatccatccaagatagaaactcagctcgtggtgggggcttgctggcaagagttttcaggagttgaaaatgacaatgaaactgagcctgtgactgtggcctctgcaggtggcgacctgcacatgacccagtttttccgaggcaatctggctggcttaactctccgttccgggaaactcgcggataagaaggtgatcgactgtctgtatacctgcaaggaggggctggacctgcaggtcctcgaagacagtggcagaggcgtgcagatccaagcacaccccagccagttggtattgaccttggagggagaagacctcggggaattggataaggccatgcagcacatctcgtacctgaactcccggcagttccccacgcccggaattcgcagactcaaaatcaccagcacaatcaagtgttttaacgaggccacctgcatttcggtccccccggtagatggctacgtgatggttttacagcccgaggagcccaagatcagcctgagtggcgtccaccattttgcccgagcagcttctgaatttgaaagctcagaaggggtgttccttttccctgagcttcgcatcatcagcaccatcacgagagaagtggagcctgaaggggacggggctgaggaccccacagttcaagaatcactggtgtccgaggagatcgtgcacgacctggatacctgtgaggtcacggtggagggagaggagctgaaccacgagcaggagagcctggaggtggacatggcccgcctgcagcagaagggcattgaagtgagcagctctgaactgggcatgaccttcacaggcgtggacaccatggccagctacgaggaggttttgcacctgctgcgctatcggaactggcatgccaggtccttgcttgaccggaagtttaagctcatctgctcagagctgaatggccgctacatcagcaacgaatttaaggtggaggtgaatgtaatccacacggccaaccccatggaacacgccaaccacatggctgcccagccacagttcgtgcacccggaacaccgctcctttgttgacctgtcaggccacaacctggccaacccccacccgttcgcagtcgtccccagcactgcgacagttgtgatcgtggtgtgcgtcagcttcctggtgttcatgattatcctgggggtatttcggatccgggccgcacatcggcggaccatgcgggatcaggacaccgggaaggagaacgagatggactgggacgactctgccctgaccatcaccgtcaaccccatggagacctatgaggaccagcacagcagtgaggaggaggaggaagaggaagaggaagaggaaagcgaggacggcgaagaagaggatgacatcaccagcgccgagtcggagagcagcgaggaggaggagggggagcagggcgacccccagaacgcaacccggcagcagcagctggagtgggatgactccaccctcagctactgacccgtgcccccggccacctcggtttctgctttcgaagactctgctgccatccgttctcccagtcccaagggtccacgatgtacaaagtcatttcggccagtaggtgtgcagacccctccccgccacgatcgtcgctgtgcttggtgtgtaggaccctaggctccccgcccaccctctgcctggtcgcgctcttcagtcccacgaggagctgacacgtcctctctggccgccatccggctcgcacaggggcctcccagcgcctcaggccccgcgtttgtgtctggagtctccccccggggagaggacactggcccctcgcactccagaaaagccatgccagctgggctcgttgacaaagggtaaaacatgctcactcccacccggtaatcatttttttctttttttaaaaaaagtttttattttttccaaactagtgcatgtataaataatggcaggatggggggtactgtgtagatgattaactgactttttaatattttgtaaataaatcggattccttgtgtcctttgtgctagtgtaacccgggactggaatgtaaagtgaagttcggagctctgagcacgggctcttcccgccgggtcctccctccccagaccccagagggagaggcccaccccgcccagccccgccccagcccctgctcaggtctgagtatggctgggagtcgggggccacaggcctctagctgtgctgctcaagagactggatcagggtagctacaagtggccgggccttgcctttgggattctacctgttcctaatttggtgtggggtgcggggtccctggccccttttccacactcctcctccgacagcagctccctgggcagtggcctggtctcaccgtgtgcagccttgtggtttatgcttaaatgtacattttcctgctggtaaaaggagaaactgagaggtgtcctgcagaccggctgaccactccttttggagacggcaggaggcctgagcgatccgtactcagaacgtccaggagagacgcatggcccgaagtcaaagtgctggaattttccaaaacagcctgttctctcctctctcctccccagagcaccccctgccatcaggggggttgaaatccctctcccccaggagccctgctgctttgcttggtggtagggcaggagagcaaacaaacagtcatggtctaaaacccacatagcactttgctcttagttacatgtaaaattttagatttctaaaacaggtgggcaatcattttgaatactgttctgtgaccctgactgctagttctgaggacactggtggctgtgctatgtgtggccatcctccatgtcccgtccctgtagctgctctgtttagacagcggacagacgctcacgcccaggggatgtcctcacgctgtcgccgcgcggtttcccttcgcagatgtgtatactcatgataggtcagaaagtgtatccgctacaataaagttctggttctaact

SEQ ID NO: 669 - DNA, 1228 bp, Homo sapiens
  source 1..1228: mol_type = genomic DNA
tctttgccctcgcgacgccgccacctccggaacaagccatggtggcggcgacggtggcagcggcgtggctgctcctgtgggctgcggcctgcgcgcagcaggagcaggacttctacgacttcaaggcggtcaacatccggggcaaactggtgtcgctggagaagtaccgcggatcggtgtccctggtggtgaatgtggccagcgagtgcggcttcacagaccagcactaccgagccctgcagcagctgcagcgagacctgggcccccaccactttaacgtgctcgccttcccctgcaaccagtttggccaacaggagcctgacagcaacaaggagattgagagctttgcccgccgcacctacagtgtctcattccccatgtttagcaagattgcagtcaccggtactggtgcccatcctgccttcaagtacctggcccagacttctgggaaggagcccacctggaacttctggaagtacctagtagccccagatggaaaggtggtaggggcttgggacccaactgtgtcagtggaggaggtcagaccccagatcacagcgctcgtgaggaagctcatcctactgaagcgagaagacttataaccaccgcgtctcctcctccaccacctcatcccgcccacctgtgtggggctgaccaatgcaaactcaaatggtgcttcaaagggagagacccactgactctccttcctttactcttatgccattggtcccatcattcttgtgggggaaaaattctagtattttgattatttgaatcttacagcaacaaataggaactcctggccaatgagagctcttgaccagtgaatcaccagccgatacgaacgtcttgccaacaaaaatgtgtggcaaatagaagtatatcaagcaataatctcccacccaaggcttctgtaaactgggaccaatgattacctcatagggctgttgtgaggattaggatgaaatacctgtgaaagtgcctaggcagtgccagccaaataggaggcattcaatgaacattttttgcatataaaccaaaaaataacttgttatcaataaaaacttgcatccaacatgaatttccagccgatgataatccaggccaaaggtttagttgttgttatttcctctgtattattttcttcattacaaaagaaatgcaagttcattgtaacaatccaaacaatacctcacgatataaaataaaaatgaaagtatcctcctca

SEQ ID NO: 670 - DNA, 1027 bp, Homo sapiens
  source 1..1027: mol_type = genomic DNA
aggactttctgtgtcctgggattcctcaggatgtggggctttttagtgttaaaagccagatggttggtcacaccagtgaggaccctggcaacggaggcaggccagaaaccatccctcagagggctgctggatgtaggcaatatccagcacagggcagcccgcgctcggggtttaacacgtggggtgatccgggtgtcacctcaggaacggagccaacaaaaccagagtgccccaaaaggccctaccccctcaaccaggccaaagcctcgcactttagggccccaggcccactctctggctctacagtctgtagacctccttttcagaccctgagctcctggaggggcaaggctgaacaggttcacctgaggcctgcatggaggaggaagggaaggaactagaatggaagggttgcctgtggaggggaagcagatcaggccccgacctcgggcaacgccccctgggtgaggagacaggctgcagctgactaaccaagtcccatccagtgggtgcaggggacacaggaggaagtggggcaagcagtaatcagaaatggggaaatgtgagctgcaacatcacccaagggctgcaactctgagaggcaaagaagctgccaggtattgggagttccagagctcctggcagcagcacaggcaggcgggtcccccagcgagccctgtccccttgctgctggctccaccctcaactccatagccccagaaacagacccaggaggagagggattgcccgggccacagccagtttgctgggcagagaccaggccagaccccacctacagcatggcgcttcccccaccagcacggcaggaggtggcaagtcccagcagcacagcgggcaccctggctctaaccagagggtgggcatcgtcccaccccttcctctcccaccccctgccgcccatgaaatgggaactgagttgcccaagagttaatcacttttctgacggtttattttattcatctttggtaacaaatggctgaaatcaattaaacttgctttcccctca

SEQ ID NO: 671 - DNA, 3558 bp, Homo sapiens
  source 1..3558: mol_type = genomic DNA
agcggggagcaagagaatttgaaaagagacatccgctccctctcacacgctgagggggaggcattcgcgtttccccaaatgagaaagaaccacaagaaatcatgaagtaaaaactttggaaagctgccactggagatgttgcacaaaaacctggaatcttttaggagtctcctcccagtcgttgaaggtttggggagcagctgatacagcaaggagggctcttgcaaggattcaagctccgagccctggaggagcagcacggagcgggagagcgtggcgagagaatgaagaaaccaatcgcccgggagaagcatgaggtggcagtgtggcactcggtttagagggcttcggccggcggtggccccatggacagccctgctggcactgggcctgcctggctgggtgttggctgtctcagccacggcggctgctgtggtccccgagcagcatgcctccgtagctggccagcatcccctggactggctgctcacagaccggggccccttccaccgcgctcaggagtatgctgacttcatggagcggtaccgccagggtttcaccaccaggtacaggatttatagggagtttgcccgttggaaggtgaacaacttggctctggaaaggaaggacttcttcagtttgccattgcctcttgccccagagtttatccggaacattcgcctccttggaaggagacccaatctgcaacaggttacagaaaatctgattaaaaagtacggcactcatttcttactttctgccacccttggaggagaagagtccctgaccatttttgtggacaagcagaaactgggaagaaagacagagacaacaggaggtgcctctataatcgggggcagtgggaacagcacagctgtgtccctggagaccctgcaccagctggccgcctcctacttcatcgacagagagagcacgctgcgacggctgcaccatatccagatagccacgggggccatcaaggtcaccgagaccaggaccggtcctctgggctgcagcaactatgacaatctggactcagtcagttctgtcttggtacagagtccagagaacaaagtacagttacttggccttcaggtgctgctgcctgagtatctgcgtgagcgctttgtagctgcagcactcagctacatcacatgcagctctgagggtgagctcgtctgcaaggagaatgactgctggtgcaagtgcagccccaccttccctgaatgcaactgccctgatgctgacatccaggccatggaggacagcctgctgcagatccaggactcctgggccactcacaaccggcagtttgaagagtcagaagagttccaggccctgctgaaaaggctgcccgatgaccggttcctgaactccacagctatctcccagttctgggccatggacaccagccttcagcaccgctaccagcagctgggagctggcttgaaagtgctgttcaaaaagacccatcggatcctacgccggctcttcaacctctgcaagcgctgccatcgccagcctcgcttccgcctgcccaaggagaggtccttgtcctactggtggaaccgaatccagtccctcctctactgtggggaaagcacctttcctggcactttcctggaacagagccacagctgcacctgcccctatgaccaatcttcctgccagggccccatcccatgtgccttgggcgaagggcccgcgtgtgcccactgtgctccagacaatagcacacgctgtgggagctgcaacccgggctatgtgctggcccaggggctgtgccggccagaggtggccgagtccctggaaaactttcttgggctggagacagacttgcaggacctggagctaaagtacctgctgcagaagcaggatagccgcattgaggtacactccatcttcatcagcaatgacatgcggctgggcagctggtttgacccttcctggaggaagcgcatgctgctcaccctgaagagcaacaagtacaagcctgggctggtgcacgtgatgttggccttgtccttgcagatctgtctcaccaagaacagcaccctggagcctgtcatggccatctacgtcaacccctttgggggcagccactctgagagctggttcatgcctgtgaatgagggcagctttcctgactgggaaaggactaacgtggatgcagctgcccagtgccaaaactggactatcaccttggggaataggtggaagactttctttgagacagttcatgtttacctacggagccgaatcaagtccctggatgacagctccaatgagacaatctactatgagcccctggagatgactgatccctctaagaatttgggttacatgaaaattaacaccttgcaggtctttggctacagcctgccctttgacccagatgctatccgggacttaattctccagttggactacccatatactcaaggttcccaggactctgcactcttgcagctcattgagctcagggaccgggtgaaccagctttctccacctggcaaagtccgacttgaccttttctcctgcttgctccggcatcggcttaagctggccaacaatgaggtgggcaggatccagtcctccctgagggctttcaattctaagctgccaaaccctgtggaatatgagaccggcaaactctgtagctaatgggcggcccacttcagcactgggcaaggaggggatccatgaatctggggtacaaagataatctaagccctcaccttagtgccaacagggtgtgctcccacgagactttcagcatccagtagatgggacctcgaggctcgagctgaagcaggcgagagagaaacagctactgcgtgcgtgcgcgcacgcatacacacacacacacacacactggcacagggaggctacaactaagcagcctcagatctgtaaagttgattggtgctttctaaaatgaatgcaattgaaagaaaggagccaaggaagagattaagaaaaagaaccagctgaaccatgaaacaaacaaaaatcctaaaagtgattcttgtcattcaagaaagcaagaggggacaacaatgggaggggtcggagctcttccttcccctctgtggagtcacttttgtattctttttaaccagatttcttaaaatgttgttgttttgtgaatcctgacattggttcttacttttgtatgctgcctcctctgtgccctcccagacgctgactgggaaacacaagaagtacaaccaacaggaaccagcgccaagggcaggcagcggcctccttgctcccctcccttactcctccctctgctgcctcctccccccaccaagtttcagggccctggattgttcccagttcccattgtggtcccttcagagctcctttccaacagcatctctctgtcgaagaaagaagctctgtcaagttagagagagacaatgtgtaggaaatgttcttttttaaaaaaaaataacaaaaacaaaacaaaactatttattttgtgattgttttccttgttaatctgctccaaccacctgaacatctaagtaaacatttatctggtttaatata

SEQ ID NO: 672 - DNA, 2563 bp, Homo sapiens
  source 1..2563: mol_type = genomic DNA
gcagtgccgcgacccaaccccagccctgggtagcctgcagcatggcccagctgttcctgcccctgctggcagccctggtcctggcccaggctcctgcagctttagcagatgttctggaaggagacagctcagaggaccgcgcttttcgcgtgcgcatcgcgggcgacgcgccactgcagggcgtgctcggcggcgccctcaccatcccttgccacgtccactacctgcggccaccgccgagccgccgggctgtgctgggctctccgcgggtcaagtggactttcctgtcccggggccgggaggcagaggtgctggtggcgcggggagtgcgcgtcaaggtgaacgaggcctaccggttccgcgtggcactgcctgcgtacccagcgtcgctcaccgacgtctccctggcgctgagcgagctgcgccccaacgactcaggtatctatcgctgtgaggtccagcacggcatcgatgacagcagcgacgctgtggaggtcaaggtcaaaggggtcgtctttctctaccgagagggctctgcccgctatgctttctccttttctggggcccaggaggcctgtgcccgcattggagcccacatcgccaccccggagcagctctatgccgcctaccttgggggctatgagcaatgtgatgctggctggctgtcggatcagaccgtgaggtatcccatccagaccccacgagaggcctgttacggagacatggatggcttccccggggtccggaactatggtgtggtggacccggatgacctctatgatgtgtactgttatgctgaagacctaaatggagaactgttcctgggtgaccctccagagaagctgacattggaggaagcacgggcgtactgccaggagcggggtgcagagattgccaccacgggccaactgtatgcagcctgggatggtggcctggaccactgcagcccagggtggctagctgatggcagtgtgcgctaccccatcgtcacacccagccagcgctgtggtgggggcttgcctggtgtcaagactctcttcctcttccccaaccagactggcttccccaataagcacagccgcttcaacgtctactgcttccgagactcggcccagccttctgccatccctgaggcctccaacccagcctccaacccagcctctgatggactagaggctatcgtcacagtgacagagaccctggaggaactgcagctgcctcaggaagccacagagagtgaatcccgtggggccatctactccatccccatcatggaggacggaggaggtggaagctccactccagaagacccagcagaggcccctaggacgctcctagaatttgaaacacaatccatggtaccgcccacggggttctcagaagaggaaggtaaggcattggaggaagaagagaaatatgaagatgaagaagagaaagaggaggaagaagaagaggaggaggtggaggatgaggctctgtgggcatggcccagcgagctcagcagcccgggccctgaggcctctctccccactgagccagcagcccaggaggagtcactctcccaggcgccagcaagggcagtcctgcagcctggtgcatcaccacttcctgatggagagtcagaagcttccaggcctccaagggtccatggaccacctactgagactctgcccactcccagggagaggaacctagcatccccatcaccttccactctggttgaggcaagagaggtgggggaggcaactggtggtcctgagctatctggggtccctcgaggagagagcgaggagacaggaagctccgagggtgccccttccctgcttccagccacacgggcccctgagggtaccagggagctggaggccccctctgaagataattctggaagaactgccccagcagggacctcagtgcaggcccagccagtgctgcccactgacagcgccagccgaggtggagtggccgtggtccccgcatcaggtaattctgcccaaggctcaactgccctctctatcctactccttttcttccccctgcagctctgggtcacctgacctgtagtcctttaacccaccatcatcccaaactctcctgtcctttgccttcattctcttacccacctctacctatgggtctccaatctcggatatccaccttgtgggtatctcagctctccgcgtctttaccctgtgatcccagccccgccactgaccatctgtgacccttccctgccattgggccctccacctgtggctcacatctcgccagccccacagagcatcctcaggcctctccaagggtcctcatcacctattgcagccttcagggctcggcctattttccactactcccttcatccgcctgtgtgccgtcccctttagctgcctcctattgatctcagggaagcctgggagtcccttctcacccctcaacctccggagtccaggagaacccgtacccccacagagccttaagcaactacttctgtgaagtattttttgactgtttcatggaaaacaagccttggaaataaatctctattaaaccgctttgtaaccaa

SEQ ID NO: 673 - DNA, 551 bp, Homo sapiens
  source 1..551: mol_type = genomic DNA
ccaagaaggaagccgtctatcttgtggcgatcatgtataagctggcctcctgctgtttgcttttcataggattcttaaatcctctcttatctcttcctctccttgactccagggaaatatcctttcaactctcagcacctcatgaagacgcgcgcttaactccggaggagctagaaagagcttcccttctacagatactgccagagatgctgggtgcagaaagaggggatattctcaggaaagcagactcaagtaccaacatttttaacccaagaggaaatttgagaaagtttcaggatttctctggacaagatcctaacattttactgagtcatcttttggccagaatctggaaaccatacaagaaacgtgagactcctgattgcttctggaaatactgtgtctgaagtgaaataagcatctgttagtcagctcagaaacacccatcttagaatatgaaaaataacacaatgcttgatttgaaaacagtgtggagaaaaactaggcaaactacaccctgttcattgttacctggaaaataaatcctctat

SEQ ID NO: 674 - DNA, 1593 bp, Homo sapiens
  source 1..1593: mol_type = genomic DNA
tctgaggccgtgtacctcaacgactccacctatgacggacataccgtgggcggactgcagtatgggggtctgggccagctggcagatggtgtggtggggctggatgactttaggaagagtcaggagctgcgggtctggccaggctatgactatgtgggatggagcaaccacagcttctccagtggctatgtggagatggagtttgagtttgaccggctgagggccttccaggctatgcaggtccactgtaacaacatgcacacgctgggagcccgtctgcctggcggggtggaatgtcgcttccggcgtggccctgccatggcctgggagggggagcccatgcgccacaacctagggggcaacctgggggaccccagagcccgggctgtctcagtgccccttggcggccgtgtggctcgctttctgcagtgccgcttcctctttgcggggccctggttactcttcagcgaaatctccttcatctctgatgtggtgaacaattcctctccggcactgggaggcaccttcccgccagccccctggtggccgcctggcccacctcccaccaacttcagcagcttggagctggagcccagaggccagcagcccgtggccaaggccgaggggagcccgaccgccatcctcatcggctgcctggtggccatcatcctgctcctgctgctcatcattgccctcatgctctggcggctgcactggcgcaggctcctcagcaaggtcctagagagccacccccgtaccaggagccccggcctcgtgggaatccgccccactccgctccctgtgtccccaatggctctgcgttgctgctctccaatccagcctaccgcctccttctggccacttacgcccgtccccctcgaggcccgggcccccccacacccgcctgggccaaacccaccaacacccaggggcgtcaccgggggcaacacctatgctgtgcctgcactgcccccaggggcagtcggggatgggccccccagagtggatttccctcgatctcgactccgcttcaaggagaagcttggcgagggccagtttggggaggtgcacctgtgtgaggtcgacagccctcaagatctggttagtcttgatttcccccttaatgtgcgtaagggacaccctttgctggtagctgtcaagatcttacggccagatgccaccaagaatgccaggaatgatttcctgaaagaggtgaagatcatgtcgaggctcaaggacccaaacatcattcggctgctgggcgtgtgtgtgcaggacgaccccctctgcatgattactgactacatggagaacggcgacctcaaccagttcctcagtgcccaccagctggaggacaaggcagccgagggggcccctggggacgggcaggctgcgcaggggcccaccatcagctacccaatgctgctgcatgtggcagcccagatcgcctccggcatgcgctatctggccacactcaactttgtacatttttggggggagagacacagatttttacactaatatatggacctagcttgaggcaattttaatcccctgcactaggcaggtaataataaaggttgagttttccac

SEQ ID NO: 675 - DNA, 2274 bp, Homo sapiens
  source 1..2274: mol_type = genomic DNA
tcagcccacttccggggagggaggcagaggaacccctccccgccgctcacccctaagcccagccctcggctcccacccttgtgtacctgggccgaaccattcaccggagcgcgcagcgggtggagtgtggctcggaggaccgcggcgggtcaagcacctttctcccccatatctgaaagcatgccctttgtccacgtcgtttacgctcattaaaacttccagaatgcaacaggacggacttggagtagggacaaggaacggaagtgggaaggggaggagcgtgcacccctcctggccttggtgcgcgccgcgccccctaaggtactttggaagggacgcgcgggccagacgcgcccagacggccgcgatggcgctgttggccggcgggctctccagagggctgggctcccacccggccgccgcaggccgggacgcggtcgtcttcgtgtggcttctgcttagcacctggtgcacagctcctgccagggccatccaggtgaccgtgtccaacccctaccacgtggtgatcctcttccagcctgtgaccctgccctgtacctaccagatgacctcgacccccacgcaacccatcgtcatctggaagtacaagtctttctgccgggaccgcatcgccgatgccttctccccggccagcgtcgacaaccagctcaatgcccagctggcagccgggaacccaggctacaacccctacgttgagtgccaggacagcgtgcgcaccgtcagggtcgtggccaccaagcagggcaacgctgtgaccctgggagattactaccagggccggaggattaccatcaccggaaatgctgacctgacctttgaccagacggcgtggggggacagtggtgtgtattactgctccgtggtctcagcccaggacctccaggggaacaatgaggcctacgcagagctcatcgtccttgggaggacctcaggggtggctgagctcttacctggttttcaggcggggcccatagaagactggctcttcgtggttgtggtatgcctggctgccttcctcatcttcctcctcctgggcatctgctggtgccagtgctgcccgcacacttgctgctgctacgtcaggtgcccctgctgcccagacaagtgctgctgccccgaggccctgtatgccgccggcaaagcagccacctcaggtgttcccagcatttatgcccccagcacctatgcccacctgtctcccgccaagaccccacccccaccagctatgattcccatgggccctgcctacaacgggtaccctggaggataccctggagacgttgacaggagtagctcagctggtggccaaggctcctatgtacccctgcttcgggacacggacagcagtgtggcctctgaagtccgcagtggctacaggattcaggccagccagcaggacgactccatgcgggtcctgtactacatggagaaggagctggccaacttcgacccttctcgacctggcccccccagtggccgtgtggagcgggccatgagtgaagtcacctccctccacgaggacgactggcgatctcggccttcccggggccctgccctcaccccgatccgggatgaggagtggggtggccactccccccggagtcccaggggatgggaccaggagcccgccagggagcaggcaggcgggggctggcgggccaggcggccccgggcccgctccgtggacgccctggacgacctcaccccgccgagcaccgccgagtcagggagcaggtctcccacgagtaatggtgggagaagccgggcctacatgcccccgcggagccgcagccgggacgacctctatgaccaagacgactcgagggacttcccacgctcccgggacccccactacgacgacttcaggtctcgggagcgccctcctgccgaccccaggtcccaccaccaccgtacccgggaccctcgggacaacggctccaggtccggggacctcccctatgatgggcggctactggaggaggctgtgaggaagaaggggtcggaggagaggaggagaccccacaaggaggaggaggaagaggcctactacccgcccgcgccgcccccgtactcggagaccgactcgcaggcgtcccgagagcgcaggctcaagaagaacttggccctgagtcgggaaagtttagtcgtctgatctgacgttttctacgtagcttttgtatttttttttttaatttgaaggaacactgatgaagccctgccatacccctcccgagtctaataaaacgtataatc

SEQ ID NO: 676 - DNA, 1056 bp, Homo sapiens
  source 1..1056: mol_type = genomic DNA
gtggagtgagtctgaggacagcagatgaacagacagaaactgaaagatccccaaaaaggatgagtgagagggtcgagcggaactggagcacgggcggctggctgctggcactgtgcctggcctggctgtggacccacctgaccttggctgccttgcagcctcccactgccacagtgcttgtgcagcagggcacctgcgaggtgattgcggctcaccgctgctgcaaccggaaccgcatcgaggagcgctcccagacggtgaaatgctcctgtttttctggccaggtggccggcaccacgcgggcaaagccctcctgcgtggacgcctccatcgtcctgcagagatggtggtgtcagatggagccctgcctgccgggggaggagtgtaaggtgctcccggacctgtcgggatggagctgcagcagtggacacaaagtcaaaaccaccaaggtcacacgatagctcttgggggtcacggcctggacaagaaaggcttgactgagccgtgaactgaagaatggtatccagtcatcagccaggaaagatggggattcacttacatgcctcatgtcaaatgcagcatcagtctttccggggcatttcagttaagctgctcagcagatatggatggatctgcaatcacatacctaatgtggagctgggcttttctggagacacgaaggtcaacacacaattcctgcccttaaggaatgtccagttgaattggagagttgatgacagacaatttagataatttaggttaaagtacttgataccagactgcggcttctgggccacatgctatggcatgatgggggtttgggaatgagattcccacagttcttcagataccctgtggccacagggcatagaaacaagaggtcacattcagcacccaccacctccctctttcgcatcagttctgaatccccagcaagctgttaacatgttgcaggaaaacactctccccttatgccagaccagcagtatctcatttggatgggattggattgacttgcggaaggaaagtaaaaataaagccaaataacttcccaaa

SEQ ID NO: 677 - DNA, 4246 bp, Homo sapiens
  source 1..4246: mol_type = genomic DNA
ccgcgactccgctccaggcaggacccccaacccgcccagcccgctccgccttgcgccccggacccgcggccgaccccagacccgctgcccgcttcgcgcccgaggcctgcgccccgacggacgcccgtgcccagcttgccacgcccacgcccggcgccccgaccgcggaggactccccgaggtgccggcggagggggtggctcgcggctcaggctgcccccgacgtgcccggctcaccgccccctcccctgcagccccgcccgccatggcccggatcccgacggccgccctgggttgcatcagcctcctctgcctgcagctccctggctcgctgtcccgcagcctgggcggggacccgcgacccgtcaaacccagggagcccccagcccggagcccttccagcagcctgcagcccaggcaccccgcaccccgacctgtggtctggaagcttcaccgggccctccaggcacagaggggtgccggcctggcccctgttatgggtcagcctctccgggatggtggccgccaacactcgggcccccgaagacactcgggcccccgcaggacccaagcccagctcctgcgagtgggctgtgtgctgggcacctgccaggtgcagaatctcagccaccgcctgtggcaactcatgggaccggccggccggcaggactcagctcctgtggaccccagcagcccccacagctatggctgaggtggggccgggccacacccctgcccatcccagccagggtgctgtgcccccgtccagagctgcagctgagccccatctgaagcccagtccctcggagctgcagacagcaggtcctgcagcaacaatacctgcacggctttgcacacgtaaacctaggctggtctacacgcagtgctggtacgtcaaggagcctaaacaccctgaaattgtgaccccctgggggacagctgccagacacagctggcggcagcaccagatgctaagcgcttcagagaggaggtgtctgcccagagatgtggagcagaagctgggccctgaacacacggggccatgtctggacgagcaggggagagaggctgaactggccagaagtggcccctccgctgctggtccagtcagactgaagcccggccttgtgcctgggctgttcctgctctcatgcacaaccagcccttccacgtgcctgcctgtgggacaggagggggagcgtgggatgctgtagcccccggggttgggcaagggaaggatggtggccctccagaggtcatgaagggacctctgtggctccagctgccaaccctggagcccagaccgaggtggccatggagactccacctggatcccctgtaggaggccagggaggggaactcagcagttcaggagccaccccaaaccattctgggacagggacacccctttctaccccagggcagggcagggctgggtggggcaagatcccccagcccgactagacccacctcacctgaagggggtgagacccttgttggcagccagacaagggtggggctccacaggcagcacaggcgccccaccaccacccagtttggggacccagtgggaccaggtgcgggggcagagggtgacttaccaagagccagggagggcagcccaggcccaagtgacagcaagaacaagaaccactgccggcgtgcacagacttggtgtgtgtccttccctggggggacgggggactcacatgtgcctgccactggagcctctcaaccgtccagcagaacacggggttcagaaagggctccttctgctatttagcgaacactgagcatttaatttacaaatgtttgctagggtcaccctctcggccatcccacgagggtcgccatgatcaccccaactctagaggccgcagcagagctcaggacattcccccacagagcttgcccctcagttcctacctccaagggggagggtcctggaagcgcccacccaggcgccgcccctgtgcttgctccccgagctcagggattgccgagtccacgtaactgacctgtactccacgaggccctgtgggaacggtccaggctggtcctgccctgtggaggcctccgtgcactgagagatgtactaggattgcagcaaaggtggtcagggtgatgggccgcacagcgaggcagtcaaggccagctccctgggagaagcactgggtcaggtgaggtctgaggacagcaggccttccctaggggaaggagctgggagtgccaaggccccaggtgcacaggaggcgtggctgctgagaggctgcagggtggaggggcctcggcctcagagtcatgtgccctgtgaccactgaagggtgtcagcagagcacacggcatgaggacagagggaggggcacggggagtgaaggagggggccctggggcaaggctcgggggtcaggagctcagcgtccgctactcagcccagccaaaaccctcccagacgtctcctctcctgcctgggcaaagtccagcttggcaccccgtctggggcctgcctgtggtcagggccaagtgttccctcctccaggaaagcctttaccctcctcatgccctgtagtcaggaggccgcctgctgtaaccctccgtgtcgcctcgggtgcgaaatcagacccacctgacaccatcacgcggaggcccagcagcacctgcacccacttccagctgctctggccaaaatctccgctcggccaggccccgtggctcacacctgtaatcctagcacattgggaggccaaggcaggcacatcacctgagttcaggagttcaagaccagcctggccaacatggtgaaatcccgtctctactaaaaacagaaaattatccgggcgtggtggcacatgactgtaatcccagctactcaggaggctgaggcaggaggatcacttgaacctgggaggcggaggttgcagtgagctgagattgcgccattgcactccagcctgggcaacaagagcaaaattctgcctcaaaaaaaaaaatagtaataatacaaaaattagctgggcgtggtggcacatgccagtaattccatctactcgggaggctgaggcaggagaatcgtctaagcccgggaggtggaggttgcagtgagcccagatggcgctgctgcactcaagcttggatgacagagcaagactccgtttcaaaaaaaaaaaacctcctctcttccttcacaccttcctctgaatcccacccggtcccacctcctgaacctatccagacaccttctcctgacccaggcaccacctgctttcggggcgatggccgtagcctcctcccaggcacctgtctgcatccctctggccagtgcatgctgagcacgtgacctacccgtgttgggacacgtgaggatacagccttgacccccaggggctgacattctagggggagatagaaggagacaaacgtagaaggtagaataagtgggtggtggagtggcagggagtgctgagtgccacaggaagtcagacaaggaaggagagtgtggggcaggtgccgtttaaatggggggcgctggggtctcctcacagttgcttctcagctcagctgtgccaggatcttgttgagtcaggtcagctgcccacagccctcttgcctgacccctgaagcccagaactctgatcttcacagccctaggtatggccccagcaccccactgccctctctcctgccccagccgactgctgttcccagacttccctggccacgctccaagacgccagctctgccgcgggcactttgttctcacggtgtcctccatgcctgcagggcccatgcatgggaagttgcgttggcggcctgggtgttggcggttccgtgcctgctccaactctccgtgaggcccctctcccagagcctgacacactctgtggccgaactctaggcaggtgcccctgagtcctttcctcgacgaggcctgaccccatccccatcctcgctgggcccgccgaccccggtgttagcaagaatcctctaaatcagtttatggagaattacccaccctcgatatctgatcccattcctcatctcccacccttgatctcatcaccctgccggcctcctgcaagatcctcattgagccactccagtgagaatccccctaccctcgaaggccgccctaacaacttcccatccgctgacccctccaacgccatcaatctccagctgtggttgttgaactcggaggtgagctcctctcaccactctcttgaataaagcttttctcaccattttaa

SEQ ID NO: 678 - DNA, 1874 bp, Homo sapiens
  source 1..1874: mol_type = genomic DNA
gctgcacacccgagaaagtttcagccaaacttcgggcggcggctgaggcggcggccgaggagcggcggactcggggcgcggggagtcgaggcatttgcgctgggcttcggagcgtagcgccagggcctgagcctttgaagcaggaggaggggaggagagagtggggctcctctatcgggaccccctccccatgtggatctgcccaggcggcggcggcggcggcggcggaggaggcgaccgagaagatacccgccctgcgccccgctctgctgtgggcgctgctggcgctctggctgtgctgcgcgacccccgcgcatgcattgcagtgtcgagatggctatgaaccctgtgtaaatgaaggaatgtgtgttacctaccacaatggcacaggatactgcaaatgtccagaaggcttcttgggggaatattgtcaacatcgagacccctgtgagaagaaccgctgccagaatggtgggacttgtgtggcccaggccatgctggggaaagccacgtgccgatgtgcctcagggtttacaggagaggactgccagtactcgacatctcatccatgctttgtgtctcgaccttgcctgaatggcggcacatgccatatgctcagccgggatacctatgagtgcacctgtcaagtcgggtttacaggtaaggagtgccaatggaccgatgcctgcctgtctcatccctgtgcaaatggaagtacctgtaccactgtggccaaccagttctcctgcaaatgcctcacaggcttcacagggcagaagtgtgagactgatgtcaatgagtgtgacattccaggacactgccagcatggtggcacctgcctcaacctgcctggttcctaccagtgccagtgccttcagggcttcacaggccagtactgtgacagcctgtatgtgccctgtgcaccctcgccttgtgtcaatggaggcacctgtcggcagactggtgacttcacttttgagtgcaactgccttccagaaacagtgagaagaggaacagagctctgggaaagagacagggaagtctggaatggaaaagaacacgatgagaattagacactggaaaatatgtatgtgtggttaataaagtgctttaaactgaattgacattaacagtgggtgatcaactttactatgtgcttgtgcttttgcttttgatggagtaattcattgttttcttatccacctaaatgcacccagctgcccttgattttctctgggctactggccttcacaaccctctcccatgtaccctctctgactttggggtaaccctcccctaacttaaagctagagaattctgaaactgaggaggggatcctctgttaatcagtgagcactttttgatgagctgatagatgatatatgagagactatgcgtggcacaatactttgttacactcttcactgatacaagtgttctagagtgtacacacaacccaaagatagaaataaaaagaggagcagtgtcggggagcttggggcctggtgttccatggagagggagaaaggaacaagcttgaccaattcattcaactccttataaaaatgatgaggaggctgaaaaccaagaattttgattgggaacagaatacaagcagctgaatcagatgaattactaagcaacaaagatcctgtttttatacaaatatccttagtacaaaaacaaaagaaggaaaactgtaggggggagtaatgtgctaagtaagcagaattgcctcaaaaagaagttgttctagttactctttcagagtgggaatcttagattctggtattgtggatatggttcacatataatgggattgtgtgttttattttggagggattaaaggtcatagtttggtcctcagtataaaa

SEQ ID NO: 679 - DNA, 412 bp, Homo sapiens
  source 1..412: mol_type = genomic DNA
gcaagagagcgggaagccgagctgggcgagaagtaggggagggcggtgctccgccgcggtggcggttgctatcgcttcgcagaacctactcaggcagccagctgagaagagttgagggaaagtgctgctgctgggtctgcagacgcgatggataacgtgcagccgaaaataaaacatcgccccttctgcttcagtgtgaaaggccacgtgaagatgctgcggctggtgtttgcacttgtgacagcagtatgctgtcttgccgacggggcccttatttaccggaagcttctgttcaatcccagcggtccttaccagaaaaagcctgtgcatgaaaaaaaagaagttttgtaattttatattactttttagtttgatactaagtattaaacatatttctgtattcttccacata

SEQ ID NO: 680 - DNA, 1176 bp, Homo sapiens
  source 1..1176: mol_type = genomic DNA
ccctactggtccttctgccttagccacaggttctgaaaccaaagcaaaaccaccagagagtgattcatgtggagacaggataacccaataaaatcgccccttaggtggggtgtgttggctcacacctgtagcctgtaatcccagcactttggaaggctgaggcaggtggatcacctgaggtcagcagtttgagaccagcctgaccaacaagttgaagccccatgtctactaaaaatagaaaaattagcagggcgtggtggtaggtgcctgtagtcccagctacttgggaggctgagacaggagaattacttgaacctgggaggcagaggttgcaatgagctgagatcatgccactgcactccagcctggacgacagagcgagactctgtataaaacaaaaacaacaacaacgaaaaattaccccttaatggtggttggttggtcagacagccagcttgaattgctgtctttttcccaaacccagattccctggctgaggcaccagttaaaacttttatcttagggaagctctgggagttgcctcttgcaggtcaggggttccaaagggcagaagctccagcataccatcttcttgagcatttccggttcagatttctatgggattaatggctcctgcaccttctacctcccagggaggctccctgagctctgctttatataagattttcaggttctgaacacaagcccagtttctgcttctgatgatcattttcaatagagcataaaaaacagagccatgttccacgtttttacggcctctgcacttggcaaaatattcttcccgaatggcctcacgtgtgctccctatcatcacgccttttcagctaggcaacgctcagagtcacacctgagtggaggccgacgcccctttggaggcgactccagccataaaaagtcctgcttggagctggttttagccacagagggccaataaatggccccttctgaatgaggtgcccctgcacctctgcagagcctgctgccagcctccaggatctaactgggctctgattcaccgctcccaaccccacatccagtcccgtggagtctccatctgagccctttcctagtccaggcatcccgatgttggtggatggcccatctgagcggccagccctgtgcttcttgctgttggctgtggcaatgtctttcttc

SEQ ID NO: 681 - DNA, 5412 bp, Homo sapiens
  source 1..5412: mol_type = genomic DNA
accgggtttgcgggaccgcagttcgggaacatgttggcctcgagcagccggatccgggctgcgtggacgcgggcgctgctgctgccgctgctgctggcggggcctgtgggctgcctgagccgccaggagctctttcccttcggccccggacagggggacctggagctggaggacggggatgacttcgtctctcctgccctggagctgagtggggcgctccgcttctacgacagatccgacatcgacgcagtctacgtcaccacaaatggcatcattgctacgagtgaacccccggccaaagaatcccatcccgggctcttcccaccaacattcggtgcagtcgcccctttcctggcggacttggacacgaccgatggcctggggaaggtttattatcgagaagacttatccccctccatcactcagcgagcagcagagtgtgtccacagagggttcccggagatctctttccagcctagtagcgcggtggttgtcacttgggaatccgtggccccctaccaagggcccagcagggacccagaccagaaaggcaagagaaacacgttccaggctgttctagcctcctctgattccagctcctatgccattttcctttatcctgaggatggtctgcagttccatacgacattctcaaagaaggaaaacaaccaagttcctgccgtggttgcattcagtcaaggttcagtgggattcttatggaagagcaacggagcttataacatatttgctaatgacagggaatcagttgaaaatttggccaagagtagtaactctgggcagcagggtgtctgggtgtttgagattgggagtccagccaccaccaatggcgtggtgcctgcagacgtgatcctcggaactgaagatggggcagagtatgatgatgaggatgaagattatgacctggcgaccactcgtctgggcctggaggatgtgggcaccacgcccttctcctacaaggctctgagaaggggaggtgctgacacatacagtgtgcccagcgtcctctccccgcgccgggcagctaccgaaaggccccttggacctcccacagagagaaccaggtctttccagttggcagtggagacttttcaccagcagcaccctcaggtcatagatgtggatgaagttgaggaaacaggagttgttttcagctataacacggattcccgccagacgtgtgctaacaacagacaccagtgctcggtgcacgcagagtgcagggactacgccacgggcttctgctgcagctgtgtcgctggctatacgggcaatggcaggcaatgtgttgcagaaggttccccccagcgagtcaatggcaaggtgaaaggaaggatctttgtggggagcagccaggtccccattgtctttgagaacactgacctccactcttacgtagtaatgaaccacgggcgctcctacacagccatcagcaccattcccgagaccgttggatattctctgcttccactggccccagttggaggcatcattggatggatgtttgcagtggagcaggacggattcaagaatgggttcagcatcaccgggggtgagttcactcgccaggctgaggtgaccttcgtggggcacccgggcaatctggtcattaagcagcggttcagcggcatcgatgagcatgggcacctgaccatcgacacggagctggagggccgcgtgccgcagattccgttcggctcctccgtgcacattgagccctacacggagctgtaccactactccacctcagtgatcacttcctcctccacccgggagtacacggtgactgagcccgagcgagatggggcatctccttcacgcatctacacttaccagtggcgccagaccatcaccttccaggaatgcgtccacgatgactcccggccagccctgcccagcacccagcagctctcggtggacagcgtgttcgtcctgtacaaccaggaggagaagatcttgcgctatgctctcagcaactccattgggcctgtgagggaaggctcccctgatgctcttcagaatccctgctacatcggcactcatgggtgtgacaccaacgcggcctgtcgccctggtcccaggacacagttcacctgcgagtgctccatcggcttccgaggagacgggcgaacctgctatgaggtggagaaaacccggtgccagcacgagcgagaacacattctcggggcagcgggggcgacagacccacagcgacccattcctccggggctgttcgttcctgagtgcgatgcgcacgggcactacgcgcccacccagtgccacggcagcaccggctactgctggtgcgtggatcgcgacggccgcgaggtggagggcaccaggaccaggcccgggatgacgcccccgtgtctgagtacagtggctcccccgattcaccaaggacctgcggtgcctaccgccgtgatccccttgcctcctgggacccatttactctttgcccagactgggaagattgagcgcctgcccctggagggaaataccatgaggaagacagaagcaaaggcgttccttcatgtcccggctaaagtcatcattggactggcctttgactgcgtggacaagatggtttactggacggacatcactgagccttccattgggagagctagtctacatggtggagagccaaccaccatcattagacaagatcttggaagtccagaaggtatcgctgttgatcaccttggccgcaacatcttctggacagactctaacctggatcgaatagaagtggcgaagctggacggcacgcagcgccgggtgctctttgagactgacttggtgaatcccagaggcattgtaacggattccgtgagagggaacctttactggacagactggaacagagataaccccaagattgaaacttcctacatggacggcacgaaccggaggatccttgtgcaggatgacctgggcttgcccaatggactgaccttcgatgcgttctcatctcagctctgctgggtggatgcaggcaccaatcgggcggaatgcctgaaccccagtcagcccagcagacgcaaggctctcgaagggctccagtatccttttgctgtgacgagctacgggaagaatctgtatttcacagactggaagatgaattccgtggttgctctcgatcttgcaatttccaaggagacggatgctttccaaccccacaagcagacccggctgtatggcatcaccacggccctgtctcagtgtccgcaaggccataactactgctcagtgaacaatggcggctgcacccacctatgcttggccaccccagggagcaggacctgccgttgccctgacaacaccttgggagttgactgtatcgaacagaaatgaagacaagagtgccttatttcctttccaagtatttcacagcaacactctacttgaagcaacttggtccagattgaaaagtgtcctctggctgagtggccactaggcccagacccagcccagcctgagccccaacaacttttccctcactgttccccaaaacatgcaccctggacttctctaatagaaaagtctccacccctacacaaggacagaaccctccacccctacccccaaccctcagacagacttatacacccctgagtgaggattacatgcccatcccagtgtcctaggaccttttcccaatactagccccccagtggtgaacagaacctcccaaatttgagttgcacccttccctgtggccttatgagctcagcctcgctttgaggtacccaccgtcctgtcagctccttgacctatgagccggggcctgactaggaaaagttgggagttaaggaggaaattagcattccttaatgttttgttttggtgctctgaatttcttctttattatagtcctatagttttactcctcagttcctcaccatcatcatcttgtctaagacccccattataatattcatgcgctgctttttcatcaaaacctaccctgtcctagagatctatgggcatttggtggatgataatgagcagcccctcccagatagaatgtcaatatttgagcagtaggatattggcatttgttagttaaaggcttaaatcaaaagaatgtccaatggtaggaatttcaaggtgtaggtcagatatttgagaataggggatttttttgatgtgccttaaattataccaaagattactaattattcctctttgcccaaaatacttgcatccaaggttctagtctctgttgctgtgctggtctttagccccactgcttgcactgatgtccctccttttcacggagacctatctgaggtacaggatggggctggcaccagatgatgtcccaccacagtccctcacctccggcctccacatgacagaaccaatttacactcaaccatgacctcacccctccttggtttctccctcgatctgtggccctttttggatgtattcttatctaacaacacaatccggaaagactgaattgaatatttatactaatggttcatatcctttattgctcaatgatctaattaaagggatcattgccacatttcatgtttatatttctacaatttgtttagaaaacatctcctgaccatatcagtagctcgtgttatctttttatcaactgcttcccagagtcctaaaacaatagaaattttggattgaaaagttcagcataaggagtttgagtcagtaaaggatgggataaaggagtcgagatgattcaatgaaaagtatcacaaaaaagagattgatcaacaagagaaataaaaaagcccaagaggaagtggtaggggaaggaatttaagaacagcaataagtaaaactcttaagtaactccaaaaagaaaatggtacattttgccaaagaccacttatacttgagaacatggaagaatttgcctgatactctctttggggaaaagagtctctcctcttttcctcaaaccccagtacactcagcctctctgccccaccttctcctgactttgtcctcacttgcttctgcagtacattggaacctgaattgaaagaaagtcttccttgaataattggagtttgtcttgagaggcaaatatagccccaagaatcacaagattcgaggaccatgtaggtcttttacgtagcccaaatccataaattagtctcactttttgtatttatcgtttcatattaaaccctctatatcaaatgttcatcatgattttgtatgatttttataactattttattcattttattagatttattctaaaattttttaatggtaaattcttaaactgtggaaaccactgaaggtgcttattaactgttctcccagatttgtacaagtattggatgattccttgagtttacagctgtacaaatagtgtggaaaataaactttttttaaaaaagaaaa

SEQ ID NO: 682 - DNA, 3174 bp, Homo sapiens
  source 1..3174: mol_type = genomic DNA
aaaccaggaagccggcgaccctcacctcctcgggggctgggaggaaggaggaaaacgaaagtcgccgccgccgcgctgtcccccgagagctgcctttcctcgggcatccctggggctgccgcgggacctcgcagggcggatataaagaaccgcggccttgggaagaggcggagaccggcttttaaagaaagaagtcctgggtcctgcggtctggggcgaggcaagggcgcttttctgcccacgctccccgtggcccatcgatcccccgcgcgtccgccgctgttctaaggagagaagtgggggccccccaggctcgcgcgtggagcgaagcagcatgggcagtcggtgcgcgctggccctggcggtgctctcggccttgctgtgtcaggtctggagctctggggtgttcgaactgaagctgcaggagttcgtcaacaagaaggggctgctggggaaccgcaactgctgccgcgggggcgcggggccaccgccgtgcgcctgccggaccttcttccgcgtgtgcctcaagcactaccaggccagcgtgtcccccgagccgccctgcacctacggcagcgccgtcacccccgtgctgggcgtcgactccttcagtctgcccgacggcgggggcgccgactccgcgttcagcaaccccatccgcttccccttcggcttcacctggccgggcaccttctctctgattattgaagctctccacacagattctcctgatgacctcgcaacagaaaacccagaaagactcatcagccgcctggccacccagaggcacctgacggtgggcgaggagtggtcccaggacctgcacagcagcggccgcacggacctcaagtactcctaccgcttcgtgtgtgacgaacactactacggagagggctgctccgttttctgccgtccccgggacgatgccttcggccacttcacctgtggggagcgtggggagaaagtgtgcaaccctggctggaaagggccctactgcacagagccgatctgcctgcctggatgtgatgagcagcatggattttgtgacaaaccaggggaatgcaagtgcagagtgggctggcagggccggtactgtgacgagtgtatccgctatccaggctgtctccatggcacctgccagcagccctggcagtgcaactgccaggaaggctgggggggccttttctgcaaccaggacctgaactactgcacacaccataagccctgcaagaatggagccacctgcaccaacacgggccaggggagctacacttgctcttgccggcctgggtacacaggtgccacctgcgagctggggattgacgagtgtgaccccagcccttgtaagaacggagggagctgcacggatctcgagaacagctactcctgtacctgcccacccggcttctacggcaaaatctgtgaattgagtgccatgacctgtgcggacggcccttgctttaacgggggtcggtgctcagacagccccgatggagggtacagctgccgctgccccgtgggctactccggcttcaactgtgagaagaaaattgactactgcagctcttcaccctgttctaatggtgccaagtgtgtggacctcggtgatgcctacctgtgccgctgccaggccggcttctcggggaggcactgtgacgacaacgtggacgactgcgcctcctccccgtgcgccaacgggggcacctgccgggatggcgtgaacgacttctcctgcacctgcccgcctggctacacgggcaggaactgcagtgcccccgtcagcaggtgcgagcacgcaccctgccacaatggggccacctgccacgagaggggccaccgctatgtgtgcgagtgtgcccgaggctacgggggtcccaactgccagttcctgctccccgagctgcccccgggcccagcggtggtggacctcactgagaagctagagggccagggcgggccattcccctgggtggccgtgtgcgccggggtcatccttgtcctcatgctgctgctgggctgtgccgctgtggtggtctgcgtccggctgaggctgcagaagcaccggcccccagccgacccctgccggggggagacggagaccatgaacaacctggccaactgccagcgtgagaaggacatctcagtcagcatcatcggggccacgcagatcaagaacaccaacaagaaggcggacttccacggggaccacagcgccgacaagaatggcttcaaggcccgctacccagcggtggactataacctcgtgcaggacctcaagggtgacgacaccgccgtcagggacgcgcacagcaagcgtgacaccaagtgccagccccagggctcctcaggggaggagaaggggaccccgaccacactcaggggtggagaagcatctgaaagaaaaaggccggactcgggctgttcaacttcaaaagacaccaagtaccagtcggtgtacgtcatatccgaggagaaggatgagtgcgtcatagcaactgaggtgtaaaatggaagtgagatggcaagactcccgtttctcttaaaataagtaaaattccaaggatatatgccccaacgaatgctgctgaagaggagggaggcctcgtggactgctgctgagaaaccgagttcagaccgagcaggttctcctcctgaggtcctcgacgcctgccgacagcctgtcgcggcccggccgcctgcggcactgccttccgtgacgtcgccgttgcactatggacagttgctcttaagagaatatatatttaaatgggtgaactgaattacgcataagaagcatgcactgcctgagtgtatattttggattcttatgagccagtcttttcttgaattagaaacacaaacactgcctttattgtcctttttgatacgaagatgtgctttttctagatggaaaagatgtgtgttattttttggatttgtaaaaatatttttcatgatatctgtaaagcttgagtattttgtgatgttcgttttttataatttaaattttggtaaatatgtacaaaggcacttcgggtctatgtgactatatttttttgtatataaatgtatttatggaatattgtgcaaatgttatttgagttttttactgttttgttaatgaagaaattcctttttaaaatatttttccaaaataaattttatgaatgacaa

SEQ ID NO: 683 - DNA, 1267 bp, Homo sapiens
  source 1..1267: mol_type = genomic DNA
gctgggggcgctgcctcgagcctcatggctgcccctgcttccgtcatgggcccactcgggccctctgccctgggccttctgctgctgctcctggtggtggcccctccccgggtcgcagcattggtccacagacagccagagaaccagggaatctccctaactggcagcgtggcctgtggtcggcccagcatggaggggaaaatcctgggcggcgtccctgcgcccgagaggaagtggccgtggcaggtcagcgtgcactacgcaggcctccacgtctgcggcggctccatcctcaatgagtactgggtgctgtcagctgcgcactgctttcacagggacaagaatatcaaaatctatgacatgtacgtaggcctcgtaaacctcagggtggccggcaaccacacccagtggtatgaggtgaacagggtgatcctgcaccccacatatgagatgtaccaccccatcggaggtgacgtggccctggtgcagctgaagacccgcattgtgttttctgagtccgtgctcccggtttgccttgcaactccagaagtgaaccttaccagtgccaattgctgggctacgggatggggactagtctcaaaacaaggtgagacctcagacgagctgcaggagatgcagctcccgctgatcctggagccctggtgccacctgctctacggacacatgtcctacatcatgcccgacatgctgtgtgctggggacatcctgaatgctaagaccgtgtgtgagggcgactccgggggcccacttgtctgtgaattcaaccgcagctggttgcagattggaattgtgagctggggccgaggctgctccaaccctctgtaccctggagtgtatgccagtgtttcctatttctcaaaatggatatgtgataacatagaaatcacgcccactcctgctcagccagcccctgctctctctccagctctggggcccactctcagcgtcctaatggccatgctggctggctggtcagtgctgtgaggtcaggatacccactctaggattctcatggctgcacaccctgccccagcccagctgcctccagacccctaagcatctcctgtcctggcctctctgaagcagacaagggccacctatcccgggggtggatgctgagtccaggaggtgatgagcaagtgtacaaaagaaaaaagggaagggggagaggggctggtcagggagaacccagcttgggcagagtgcacctgagatttgataagatcattaaatatttacaaagcaa

SEQ ID NO: 684 - DNA, 1907 bp, Homo sapiens
  source 1..1907: mol_type = genomic DNA
gtcacgagccgccagccgccgggtggagggtcccggccgggagccgcggaaagagtagggctccccagacaacggggtccgacgagcagttgggcacgggctgagtccgcctgccggcagaatgtccctggctgcttattgcgtcatctgttgcagaagaataggaacctctacttccccaccaaaaagtggcacacactggagagatatcagaaatataataaagtttactggatcacttattttaggaggttctttatttcttacatatgaagttctggccctgaagaaggctgtgacattagatactcaagtggtagaacgagaaaaaatgaagtcatatatatatgtgcacacagtttctttagacaaaggagaaaatcatggtattgcctggcaggcaagaaaagaacttcacaaagcagtaagaaaagtattggcaacatcagccaagatactgcggaatccatttgctgatccttttagtacagttgatatagaagatcatgagtgtgctgtgtggctgctcctacggaagagcaagtcagatgacaaaaccacgcgactcgaggctgtgcgggaaatgtcggagacccatcactggcatgattaccagtataggataattgctcaagcctgtgatccgaaaactcttattggtttggcacgaagcgaagagagtgatcttcgcttttttctcctaccacctcctttgccatctttaaaagaagattcttccactgaagaagagctcagacagttgctggcttccttacctcaaacagagctagatgagtgtatccagtattttacatctttggctcttagtgaaagcagtcagagtctagctgctcagaagggtggtttatggtgttttggaggaaatggacttccttatgctgaaagttttggagaagttccttcagcaacagtggaaatgttctgtttagaagctatagtaaaacattctgagatatccacacattgtgataaaatcgaagcaaatggaggcctgcagctacttcagaggctgtaccgacttcacaaggactgccctaaagtacagagaaatataatgcgtgtcattggaaatatggctttgaatgaacatcttcattcttctatagttcgctcaggctgggtttccatcatggcagaagcaatgaaatctccccacattatggagtcctcacacgctgccagaatcctggcaaatctagaccgagaaactgtgcaagaaaaatatcaggatggcgtatatgtgctgcatccccaatatcgaacaagtcagcccattaaagcagatgtcctttttattcatggccttatgggagcagcattcaaaacatggcgccagcaggacagtgagcaggctgtaattgaaaaacctatggaggatgaagacagatatacgacgtgctggcccaagacatggttagcaaaagactgtcctgctctccgaattatatctgtggagtatgacaccagcctcagcgactggagagcaaggtgccctatggaaagaaggagtttgctgtcaataagcagtggaatagtagaaggcttagaaagtccattgcattcagaagcaacgaacttcttaggaagctcagagctgctggtgttggggataggccagtggtttggatatcacatagcatgggaggtcttcttgtcaaaaagatgctgttggaagcctctacgaagccagaaatgagtactgttatcaacaataccagaggaataattttttatagtgtccctcatcatggatcacgtttggctgaatactctgttaatattcgctatcttctcttcccctcgttggaagtcaaagaactcagcaagggtaatactttttgtcataaaggaaattggggttatattaacatcagttacacagagaa

SEQ ID NO: 685 - DNA, 4013 bp, Homo sapiens
  source 1..4013: mol_type = genomic DNA
agagcgggccgagggggcggggtcacgagccgccagccgccgggtggagggtcccggccgggagccgcggaaagagtagggctccccagacaacggggtccgacgagcagttgggcacgggctgagtccgcctgccggcagaatgtccctggctgcttattgcgtcatctgttgcagaagaataggaacctctacttccccaccaaaaagtggcacacactggagagatatcagaaatataataaagtttactggatcacttattttaggaggttctttatttcttacatatgaagttctggccctgaagaaggctgtgacattagatactcaagtggtagaacgagaaaaaatgaagtcatatatatatgtgcacacagtttctttagacaaaggagaaaatcatggtattgcctggcaggcaagaaaagaacttcacaaagcagtaagaaaagtattggcaacatcagccaagatactgcggaatccatttgctgatccttttagtacagttgatatagaagatcatgagtgtgctgtgtggctgctcctacggaagagcaagtcagatgacaaaaccacgcgactcgaggctgtgcgggaaatgtcggagacccatcactggcatgattaccagtataggataattgctcaagcctgtgatccgaaaactcttattggtttggcacgaagcgaagagagtgatcttcgcttttttctcctaccacctcctttgccatctttaaaagaagattcttccactgaagaagagctcagacagttgctggcttccttacctcaaacagagctagatgagtgtatccagtattttacatctttggctcttagtgaaagcagtcagagtctagctgctcagaagggtggtttatggtgttttggaggaaatggacttccttatgctgaaagttttggagaagttccttcagcaacagtggaaatgttctgtttagaagctatagtaaaacattctgagatatccacacattgtgataaaatcgaagcaaatggaggcctgcagctacttcagaggctgtaccgacttcacaaggactgccctaaagtacagagaaatataatgcgtgtcattggaaatatggctttgaatgaacatcttcattcttctatagttcgctcaggctgggtttccatcatggcagaagcaatgaaatctccccacattatggagtcctcacacgctgccagaatcctggcaaatctagaccgagaaactgtgcaagaaaaatatcaggatggcgtatatgtgctgcatccccaatatcgaacaagtcagcccattaaagcagatgtcctttttattcatggccttatgggagcagcattcaaaacatggcgccagcaggacagtgagcaggctgtaattgaaaaacctatggaggatgaagacagatatacgacgtgctggcccaagacatggttagcaaaagactgtcctgctctccgaattatatctgtggagtatgacaccagcctcagcgactggagagcaaggtgccctatggaaagaaggagtttgctgtcaataagcagtggaatagtagaaggcttagaaagtccattgcattcagaagcaacgaacttcttaggaagctcagagctgctggtgttggggataggccagtggtttggatatcacatagcatgggaggtcttcttgtcaaaaagatgctgttggaagcctctacgaagccagaaatgagtactgttatcaacaataccagaggaataattttttatagtgtccctcatcatggatcacgtttggctgaatactctgttaatattcgctatcttctcttcccctcgttggaagtcaaagaactcagcaaggattctcctgcacttaaaacactacaagatgactttctggagtttgctaaagacaaaaacttccaggtgctgaattttgtggaaacactaccaacctacattggcagcatgattaagctccatgtggtacctgtggaatcagcagatttaggcattggagatctaattcctgtggatgttaaccatttgaacatttgtaagccaaagaaaaaggatgcttttttgtaccagcgtactttacaattcattcgtgaagctttagccaaagaccttgaaaactaacagttgtgctcttccagttttcatatgtgaattcagtgcaagaaacttggtgttctgtttcttcttttaagctctatgcaatcatgcaaacatagtgatcatagcgtcaacatggtctggagtgtgttgcagactacagaacattgttctcccttcaagcgctgtaaagcaccaacccggaagtggcaggcacagaaggaagggctggattgggcccctttggtgtaaagaagtccctgtgtgctgctttatggttcgcagtgttgggcttggtgactggagcaaagctgctgtgagagagtgtcctttcccatctgtgactttcctggtgcatccaggaggggcacggcaggttctgaggtaactcaacttaccataaaaatgccattaagagagtacctaaaatggagagaagaatgaactagaacattcaagactcttttacttctgggtattgatttgctgtacatttttaaagtttgagtttttagctcagttctaccttttatctgacacattattactagtgttaactttgttagacttattgtcatgtctgggtcagttccttgtatctattttcgtattcctgagaacaaatctttttcttagaaaaattctagcttataataattcttttcagactgtagctgcctatgcttggaatttgtcctagataaggataaagtagctaatccattattgatcacagtatgaagtaaaactattctaagccattatatgaattagcaattcttagtatcaagattctcagattctctttggctaaataaacctttcttcttccttgctcatttgcaagtggtattaattgacctctatagcatgtgagtagtagataatcatgtcgatgacctttttttctttagagtaacagcattattgagatataatttacataccataagattcacccttttaaattatacaattcatttttgttttgttttgtttgtttagagacagggtctgactctgttgcccaagctggagtgcagtggcatgatcatagctcattgtaacctcaaactcctgggctcaagagatccttttgcttcagcctcccaagcagctaggactacaggcacatgccaccacacttgggtaattaaaaaataaataaatacttttttgtagagacagggtctcactgtgttgcccaggtctcaaactcccgatctcaagccaccctcccaaaatgctgtgattataggccagagccattgttcccaggctcaattcattggtttttagtatagttcactgagttgtgcaacatcattgctatttaatttcaggctatttcatcatccccaaaagaaccccatacccatgagcagtcagttcccacctctgctttcccaagcctgcggtaaacactaatctgttttctgtctctatggatttgggaattttatgtaaatggaatcatacaatatgtggccctctctgccttcttccttctattagcatgttttcaaggttcattcatgatatagcatgtatcagtactacttcatttctttttatggccgaaattactccattgtatgatatgccatgtttctttatccattcatcagctgatggacatctaggttctgttcatttttgtctatgataaataatgctaccatgatcatttgtgtacaaatttatgtgtggatagatgtttttgattctcttgggtggaattgctggtcaaatggtaagtctatgtttaaattttgaagatggtgaacttttgtagaatgagatagtcgaagctaaaactggagtatggcatctgaaggtaaatggctcatcaataaactcgatatcaacaattaattgtttcattg

SEQ ID NO: 686 - DNA, 3948 bp, Homo sapiens
  source 1..3948: mol_type = genomic DNA
gagggggcggggtcacgagccgccagccgccgggtggagggtcccggccgggagccgcggaaagagtagggctccccagacaacggggtccgacgagcagttgggcacgggctgagtccgcctgccggcagaatgtccctggctgcttattgcgtcatctgttgcagaagaataggaacctctacttccccaccaaaaagtggcacacactggagagatatcagaaatataataaagtttactggatcacttattttaggaggttctttatttcttacatatgaagttctggccctgaagaaggctgtgacattagatactcaagtggtagaacgagaaaaaatgaagtcatatatatatgtgcacacagtttctttagacaaaggagaaaatcatggtattgcctggcaggcaagaaaagaacttcacaaagcagtaagaaaagtattggcaacatcagccaagatactgcggaatccatttgctgatccttttagtacagttgatatagaagatcatgagtgtgctgtgtggctgctcctacggaagagcaagtcagatgacaaaaccacgcgactcgaggctgtgcgggaaatgtcggagacccatcactggcatgattaccagtataggataattgctcaagcctgtgatccgaaaactcttattggtttggcacgaagcgaagagagtgatcttcgcttttttctcctaccacctcctttgccatctttaaaagaagattcttccactgaagaagagctcagacagttgctggcttccttacctcaaacagagctagatgagtgtatccagtattttacatctttggctcttagtgaaagcagtcagagtctagctgctcagaagggtggtttatggtgttttggaggaaatggacttccttatgctgaaagttttggagaagttccttcagcaacagtggaaatgttctgtttagaagctatagtaaaacattctgagatatccacacattgtgataaaatcgaagcaaatggaggcctgcagctacttcagaggctgtaccgacttcacaaggactgccctaaagtacagagaaatataatgcgtgtcattggaaatatggctttgaatgaacatcttcattcttctatagttcgctcaggctgggtttccatcatggcagaagcaatgaaatctccccacattatggagtcctcacacgctgccagaatcctggcaaatctagaccgagaaactgtgcaagaaaaatatcaggatggcgtatatgtgctgcatccccaatatcgaacaagtcagcccattaaagcagatgtcctttttattcatggccttatgggagcagcattcaaaacatggcgccagcaggacagtgagcaggctgtaattgaaaaacctatggaggatgaagacagatatacgacgtgctggcccaagacatggttagcaaaagactgtcctgctctccgaattatatctgtggagtatgacaccagcctcagcgactggagagcaaggtgccctatggaaagaaagtccattgcattcagaagcaacgaacttcttaggaagctcagagctgctggtgttggggataggccagtggtttggatatcacatagcatgggaggtcttcttgtcaaaaagatgctgttggaagcctctacgaagccagaaatgagtactgttatcaacaataccagaggaataattttttatagtgtccctcatcatggatcacgtttggctgaatactctgttaatattcgctatcttctcttcccctcgttggaagtcaaagaactcagcaaggattctcctgcacttaaaacactacaagatgactttctggagtttgctaaagacaaaaacttccaggtgctgaattttgtggaaacactaccaacctacattggcagcatgattaagctccatgtggtacctgtggaatcagcagatttaggcattggagatctaattcctgtggatgttaaccatttgaacatttgtaagccaaagaaaaaggatgcttttttgtaccagcgtactttacaattcattcgtgaagctttagccaaagaccttgaaaactaacagttgtgctcttccagttttcatatgtgaattcagtgcaagaaacttggtgttctgtttcttcttttaagctctatgcaatcatgcaaacatagtgatcatagcgtcaacatggtctggagtgtgttgcagactacagaacattgttctcccttcaagcgctgtaaagcaccaacccggaagtggcaggcacagaaggaagggctggattgggcccctttggtgtaaagaagtccctgtgtgctgctttatggttcgcagtgttgggcttggtgactggagcaaagctgctgtgagagagtgtcctttcccatctgtgactttcctggtgcatccaggaggggcacggcaggttctgaggtaactcaacttaccataaaaatgccattaagagagtacctaaaatggagagaagaatgaactagaacattcaagactcttttacttctgggtattgatttgctgtacatttttaaagtttgagtttttagctcagttctaccttttatctgacacattattactagtgttaactttgttagacttattgtcatgtctgggtcagttccttgtatctattttcgtattcctgagaacaaatctttttcttagaaaaattctagcttataataattcttttcagactgtagctgcctatgcttggaatttgtcctagataaggataaagtagctaatccattattgatcacagtatgaagtaaaactattctaagccattatatgaattagcaattcttagtatcaagattctcagattctctttggctaaataaacctttcttcttccttgctcatttgcaagtggtattaattgacctctatagcatgtgagtagtagataatcatgtcgatgacctttttttctttagagtaacagcattattgagatataatttacataccataagattcacccttttaaattatacaattcatttttgttttgttttgtttgtttagagacagggtctgactctgttgcccaagctggagtgcagtggcatgatcatagctcattgtaacctcaaactcctgggctcaagagatccttttgcttcagcctcccaagcagctaggactacaggcacatgccaccacacttgggtaattaaaaaataaataaatacttttttgtagagacagggtctcactgtgttgcccaggtctcaaactcccgatctcaagccaccctcccaaaatgctgtgattataggccagagccattgttcccaggctcaattcattggtttttagtatagttcactgagttgtgcaacatcattgctatttaatttcaggctatttcatcatccccaaaagaaccccatacccatgagcagtcagttcccacctctgctttcccaagcctgcggtaaacactaatctgttttctgtctctatggatttgggaattttatgtaaatggaatcatacaatatgtggccctctctgccttcttccttctattagcatgttttcaaggttcattcatgatatagcatgtatcagtactacttcatttctttttatggccgaaattactccattgtatgatatgccatgtttctttatccattcatcagctgatggacatctaggttctgttcatttttgtctatgataaataatgctaccatgatcatttgtgtacaaatttatgtgtggatagatgtttttgattctcttgggtggaattgctggtcaaatggtaagtctatgtttaaattttgaagatggtgaacttttgtagaatgagatagtcgaagctaaaactggagtatggcatctgaaggtaaatggctcatcaataaactcgatatcaacaattaa

SEQ ID NO: 687 - DNA, 2152 bp, Homo sapiens
  source 1..2152: mol_type = genomic DNA
gtcagaactaccccggtagcctgacagcaggagctcgagagaagcatggctcagcggtgcgtttgcgtgctggccctggtggctatgctgctcctagttttccctaccgtctccagatcgatgggcccgaggagcggggagcatcaaagggcgtcgcgaatcccttctcagttcagcaaagaggaacgcgtcgcgatgaaagaggcgctgaaaggtgccatccagattccaacagtgacttttagctctgagaagtccaatactacagccctggctgagttcggaaaatacattcataaagtctttcctacagtggtcagcaccagctttatccagcatgaagtcgtggaagagtatagccacctgttcactatccaaggctcggaccccagcttgcagccctacctgctgatggctcactttgatgtggtgcctgcccctgaagaaggctgggaggtgcccccattctctgggttggagcgtgatggcatcatctatggtcggggcacactggacgacaagaactctgtgatggcattactgcaggccttggagctcctgctgatcaggaagtacatcccccgaagatctttcttcatttctctgggccatgatgaggagtcatcagggacaggggctcagaggatctcagccctgctacagtcaaggggcgtccagctagccttcattgtggacgaggggggcttcatcttggatgatttcattcctaacttcaagaagcccatcgccttgattgcagtctcagagaagggttccatgaacctcatgctgcaagtaaacatgacttcaggccactcttcagctcctccaaaggagacaagcattggcatccttgcagctgctgtcagccgattggagcagacaccaatgcctatcatatttggaagcgggacagtggtgactgtattgcagcaactggcaaatgagtttcccttccctgtcaatataatcctgagcaacccatggctatttgaaccacttataagcaggtttatggagagaaatcccttaaccaatgcaataatcaggaccaccacggcactcaccatattcaaagcaggggtcaagttcaatgtcatccccccagtggcccaggccacagtcaacttccggattcaccctggacagacagtccaagaggtcctagaactcacgaagaacattgtggctgataacagagtccagttccatgtgttgagtgcctttgaccccctccccgtcagcccttctgatgacaaggccttgggctaccagctgctccgccagaccgtacagtccgtcttcccggaagtcaatattactgccccagttacttctattggcaacacagacagccgattctttacaaacctcaccactggcatctacaggttctaccccatctacatacagcctgaagacttcaaacgcatccatggagtcaacgagaaaatctcagtccaagcctatgagacccaagtgaaattcatctttgagttgattcagaatgctgacacagaccaggagccagtttctcacctgcacaaactgtgaggtcaaggggcctgctgggttaggcatgcccgaccccgggacaggactaacccaagggggaaagctagtgttgatgaaacttttgatcaaaaccacattgtaaaacattgcccatctgtcttgctcactcttaaactctcccaagaacaaggccggggtaaggtaaagtcagcagaaatctggcttctcccttcctcccgacatctgcatcccttgatccactggcatttgctgccctcttgtcccttatctgtcttatgctggttatttcactgcttcaccttccaggcttgacttaacaaatgtagatttgagaaatctcaaccagttgttacctgataggagtctttaatttagggcactcttgctgggatgctttctccagagcttatatatttcttcttactagaactttcttcccccttttattcccctctcttcttggactcatgagctgtctcttcatctctcctctctctcctgcatctctccccttactcttcaatttattctacttctggacctggacttacccaaactgtgatactaccataattgtcaccataatcagtcaaataaagtgatctgtgcatcacca

SEQ ID NO: 688 - DNA, 1359 bp, Homo sapiens
  source 1..1359: mol_type = genomic DNA
gacagcctccaccagagtccccacctttctggaagctgcagggctctccatccaggatccagaagcattgaaggggaccagccgctgaagggattctcagtcccatctgactccccatgaggctcctggctttcctgagtctgctggccttggtgctgcaggagacagggacagcttctctcccaaggaaggagaggaagaggagagaggagcagatgcccagggaaggcgattcctttgaagttctgcctctgcggaatgatgtcctgaacccagacaactatggtgaagtcattgacctgagcaactatgaggagctcacagattatggggaccaactccccgaggttaaggtgactagcctcgctcctgcaaccagcatcagtcccgccaagagcactacggctccagggacaccctcgtcaaaccccacgatgaccagacctactacagcagggctgctactgagttcccagcccaaccatggtctgcccacctgcctggtctgcgtgtgcctcggttcctctgtgtattgcgatgacattgacctagaggacattcctcctcttcctcggaggactgcctacctgtatgcacgcttcaaccgcatcagccgtatcagggccgaagacttcaaagggctgacaaagttgaagaggattgacctctccaacaacctcatttcctccatcgataatgatgccttccgcctgctacatgccctccaggacctcatcctcccagagaaccagttggaagctctgcccgtgctgcccagtggcattgagttcctggatgtccgcctaaatcggctccagagctcggggatacagcctgcagccttcagggcaatggagaagctgcagttcctttacctgtcagacaacctgctggattctatcccggggcctttgcccctgagcctgcgctctgtacacctgcagaataacctgatagagaccatgcagagagacgtcttctgtgaccccgaggagcacaaacacacccgcaggcagctggaagacatccgcctggatggcaaccccatcaacctcagcctcttccccagcgcctacttctgcctgcctcggctccccatcggccgcttcacgtagctcggagcccttccactcctcccaggtcatctcttggaccagcgggcatcacattctccagcagccgccatctcacacgcctccctcctgtggccgccggcagcatggacaaaggtctccatgcagggggaggaggcctgcttctttccccacagctctcacgtctcccttctccctgcgggtgacaaagaagcccaaggaccacctccttcctgcctcattgtaataaaattccccacactga

SEQ ID NO: 689 - DNA, 2246 bp, Homo sapiens
  source 1..2246: mol_type = genomic DNA
tttgtatgggctgcagcctgccgctgagctgcatcatggtgcggtctgtggcctgggcaggtttcatggtcctgctgatgatcccatggggctctgctgcaaaactggtctgctacttcaccaactgggcccagtacagacagggggaggctcgcttcctgcccaaggacttggaccccagcctttgcacccacctcatctacgccttcgctggcatgaccaaccaccagctgagcaccactgagtggaatgacgagactctctaccaggagttcaatggcctgaagaagatgaatcccaagctgaagaccctgttagccatcggaggctggaatttcggcactcagaagttcacagatatggtagccacggccaacaaccgtcagacctttgtcaactcggccatcaggtttctgcgcaaatacagctttgacggccttgaccttgactgggagtacccaggaagccaggggagccctgccgtagacaaggagcgcttcacaaccctggtacaggacttggccaatgccttccagcaggaagcccagacctcagggaaggaacgccttcttctgagtgcagcggttccagctgggcagacctatgtggatgctggatacgaggtggacaaaatcgcccagaacctggattttgtcaaccttatggcctacgacttccatggctcttgggagaaggtcacgggacataacagccccctctacaagaggcaagaagagagtggtgcagcagccagcctcaacgtggatgctgctgtgcaacagtggctgcagaaggggacccctgccagcaagctgatccttggcatgcctacctacggacgctccttcacactggcctcctcatcagacaccagagtgggggccccagccacagggtctggcactccaggccccttcaccaaggaaggagggatgctggcctactatgaagtctgctcctggaagggggccaccaaacagagaatccaggatcagaaggtgccctacatcttccgggacaaccagtgggtgggctttgatgatgtggagagcttcaaaaccaaggtcagctatctgaagcagaagggactgggcggggccatggtctgggcactggacttagatgactttgccggcttctcctgcaaccagggccgataccccctcatccagacgctacggcaggaactgagtcttccatacttgccttcaggcaccccagagcttgaagttccaaaaccaggtcagccctctgaacctgagcatggccccagccctggacaagacacgttctgccagggcaaagctgatgggctctatcccaatcctcgggaacggtccagcttctacagctgtgcagcggggcggctgttccagcaaagctgcccgacaggcctggtgttcagcaactcctgcaaatgctgcacctggaattgagtcgctaaagcccctccagtcccagctttgaggctgggcccaggatcactctacagcctgcctcctgggttttccctgggggccgcaatctggctcctgcaggcctttctgtggtcttcctttatccaggctttctgctctcagccttgccttccttttttctgggtctcctgggctgcccctttcacttgcaaaataaatctttggtttgtgcccctcttcccaaagatgtggtgacttaagaggctctctaagcacactgttgactccaaaacatccgcaggtcagagccaggtgggaaggtggtccgtgcaggatgtgccaggccctgtggcaggtcttgccccatgagtccatatgccagtgggcagtttccagtacacaggtgatggcagccagagcgcggccccaagtgcaacacgttctttggttattggctcagaagcctggaaacaggagcttctgcggaccttcacgcacgtgttattcccaaaatgccactagatggcagcagagaagaacttttccctgatttaagcgctctgcgagcagccactcagcattacactaagaattcagacccctggtactcaggggtcttcgagataaatcctgtttgggccctttgcaggccctatctcacctactgcccccgttcaccagatgaagaaggaacaatgattattctcactttataggcatttaaactgaagactgattctaaccaattctgagtccagaaccaaggcctgaaatgggccagagagcatgcacacggtgtcctggttaaataaagtcatcccaacattc

SEQ ID NO: 690 - DNA, 2336 bp, Homo sapiens
  source 1..2336: mol_type = genomic DNA
gtccgacggtccacccagtgcttgcggcctcgcggccgggccggcctgggctgcaatcaatgcggctttgtctgggacgcccacatcccagaggccattcccgggtcggcaaatcggagcgcggccggggcgcgcggggccttgcccggcagaggactctggaggatgaggaggaacaggagcgcgagcgcaggcggcggcaccgcaacctgagctccaccacggacgatgaggctcccaggctcagccagaatggagaccggcaggcctctgcttctgagagactaccgagcgtggaagaagcagaggtgcccaagccactgcccccagcctccaaagatgaggacgaggacatccagagcatcctcagaacacggcaggagcggaggcagaggcggcaggtggtggaggctgcacaggcccccatccaggagaggctggaggcagaggaggggaggaacagcttgagccctgtgcaggccacacagaaacccctagtctccaagaaggaactggaaatcccacctcgccggagactgagtcgggaacagcggggcccctgggccctggaggaggagagcttggtgggcagggagccagaagagaggaagaaaggggttccagaaaagtccccagtcttggagaagtcctccatgccaaagaagacggcacctgaaaagagcctggtctccgataaaacctccatctctgagaaggtgctggcctcagagaagacatctctatcagagaagatagcagtgtcagagaaaagaaacagctcagagaagaagtctgttctagaaaaaaccagtgtctctgagaagtcgctggccccagggatggcactgggctcaggaaggaggctggtgtctgagaaagcttccatctttgagaaggcactggcctcagagaagagcccaactgcagatgctaagccggccccaaagagggccacagcctcagagcagcccctggcgcaggagccgccagcctctgggggaagcccagccaccaccaaggagcagagaggaagggccctccctgggaagaacctgccctctttggcaaagcagggggcttcagaccctccgactgtggcctcccgcctcccacccgtcacactccaggtgaaaatccccagcaaggaggaagaggcagatatgtcctcacccacacagcgaacctacagcagctccctcaaacgctccagccccaggaccatctcctttcggatgaaacccaagaaagaaaactcggaaacaaccctaactcgcagtgccagcatgaagctcccagacaacacagtgaagttgggagagaagctggagagataccacacggccatacggagatcagaatctgtcaagtctcggggtctgccttgcactgagttattcgtggctcctgtgggtgtagccagcaagcgccacctctttgagaaggaactggcgggccagagccgagcagaaccagcctccagccggaaggagaacttgaggctctcaggggttgtgacatcaaggctcaacctgtggatcagcaggacccaggaatctggagatcaggacccccaggaggcacagaaagcatcatctgcaaccgagaggactcagtggggacagaaatctgactcctcgctggacgctgaggtgtgacaagccccgccaagacagacctgcaagtcttcgtctcaagggacctccctcatgccaggcccctgcctctcacagcagcaccctttcctctcattgtccctgttccctttttgcctgtggatctgtttggccagggtccctggggtcaggaatatttgcaagactcagccagctccttcccagcccagcctcttggggctgggactttctcaccctgcggcaggcacaacagatgctgggacccagtctctgcccaggtcacagcacaagtgcacatcagcactatggggcctatgtcctgcccagagacctctgctccttcctgctcacatccacagtcagggcacggcgcccctcaagaactccagagtcacctgtctcatcggctcccagcaagtgcctctttgtctatgatgtcccccttctctgaggcctggacccacccatctttgtccctggggcctgctcccagccactgaggcccgctctggccaggggagaaggagctgccgtgcgtcttccctgtgccccgtctccctgcttggttctcccctcccttccctggccggctgccatggccaggagctaagtgcctttttgtgtgcaaccacttaccctttctctgaaaaacctgttctcaggaaggatctgataaactcatttactctcaggtgtaagaga

SEQ ID NO: 691 - DNA, 2829 bp, Homo sapiens
  source 1..2829: mol_type = genomic DNA
actaaactagcttccccttagtacattgaaattcaaagtcatgcttgtaactgttaatgaaagcagatttaaagcaacaccaccatcactggagtatttttagttatatacgattgagactaccaagcatgttgctcttattcagtgtaatcctaatctcatgggtatccactgttgggggagaaggaacactttgtgattttccaaaaatacaccatggatttctgtatgatgaagaagattataaccctttttcccaagttcctacaggggaagttttctattactcctgtgaatataattttgtgtctccttcaaaatccttttggactcgcataacatgcacagaagaaggatggtcaccaacaccgaagtgtctcagaatgtgttcctttccttttgtgaaaaatggtcattctgaatcttcaggactaatacatctggaaggtgatactgtacaaattatttgcaacacaggatacagccttcaaaacaatgagaaaaacatttcgtgtgtagaacggggctggtccactcctcccatatgcagcttcactaaaggagaatgtcatgttccaattttagaagccaatgtagatgctcagccaaaaaaagaaagctacaaagttggagacgtgttgaaattctcctgcagaaaaaatcttataagagttggatcagactcagttcaatgttaccaatttgggtggtcacctaactttccaacatgcaaaggacaagtacgatcatgtggtccacctcctcaactctccaatggtgaagttaaggagataagaaaagaggaatatggacacaatgaagtagtggaatatgattgcaatcctaattttataataaacgggcctaagaaaatacaatgtgtggatggagaatggacaactttacccacttgtgttgaacaagtgaaaacatgtggatacatacctgaactcgagtacggttatgttcagccgtctgtccctccctatcaacatggagtttcagtcgaggtgaattgcagaaatgaatatgcaatgattggaaataacatgattacctgtattaatggaatatggacagagcttcctatgtgtgttgcaacacaccaacttaagaggtgcaaaatagcaggagttaatataaaaacattactcaagctatctgggaaagaatttaatcataattctagaatacgttacagatgttcagacatcttcagatacaggcactcagtctgtataaacgggaaatggaatcctgaagtagactgcacagaaaaaagggaacaattctgcccaccgccacctcagatacctaatgctcagaatatgacaaccacagtgaattatcaggatggagaaaaagtagctgttctctgtaaagaaaactatctacttccagaagcaaaagaaattgtatgtaaagatggacgatggcaatcattaccacgctgtgttgagtctactgcatattgtgggccccctccatctattaacaatggagataccacctcattcccattatcagtatatcctccagggtcaacagtgacgtaccgttgccagtccttctataaactccagggctctgtaactgtaacatgcagaaataaacagtggtcagaaccaccaagatgcctagatccatgtgtggtatctgaagaaaacatgaacaaaaataacatacagttaaaatggagaaacgatggaaaactctatgcaaaaacaggggatgctgttgaattccagtgtaaattcccacataaagcgatgatatcatcaccaccatttcgagcaatctgtcaggaagggaaatttgaatatcctatatgtgaatgaagcaagcataattttcctgaatatattcttcaaacatccatctatgctaaaagtagccattatgtagccaattctgtagttacttcttttattctttcaggtgttgtttaactcagttttatttagaactctggatttttagagctttagaaatttgtaagctgagagaacaatgtttcacttaataggagggtgtcttagtccatattacattgttataacagagtatcacagactggataacttctaaccaatagtttatttgtttcataaatctaaaagctgagaagtccaagatggtggggctgcctctggtgagggtcttctcgaagcatcataatatgctggaaggcatcacaacatggtggaagggatcacgtggcaaaagagcatgtacatgggagtgagagaaaaagagagagagagacagagtggcgggggcggggaggagcgcaaactcatcctttataaagacaccactcctgagataacaatccaatcccatgataatgacattaatccattcaagaagatagagctctcgtgacttaatcaccttctaaagatctcacctgacaacactgttgcattggcagttaagtttccacgtaaactttcggggacacattcaaaccacaggagaaactcaaattgttcctgggcaaatcacaacatggggaattttattcataaatgtccacagaaacagtaaatgttctcgcttcagtacttaattcatctaatccctcctgtttgtctcaaattataggataactttgaaactttctgaattaacgttatttaaaaggaaatgtagatgttattttagtctctatcttcatgttattatcacttaaaaacctgcgaaagctgtcaacttttgtggttgtagcaagtattaataaatatttataaatcctctaatgtaagtctagctacctatccaatactaaataccccttaaagtattaaatgcactatctgctgtaaa

SEQ ID NO: 692 - DNA, 2889 bp, Homo sapiens
  source 1..2889: mol_type = genomic DNA
ttcgtggctctctgtgtaactggtttttacttggttacatgccaccaggaactgctgattattttaaagtcctactaccctgcagctcactactttaccttgatttggaagatcatggaatatctatttgaatcctggatgtatttttctcacagtcttcttgcttcctgaaatttcctctggtgttgagggaaagctgagagaatgaaggctctaaatccccagtggaagcatgatatggcgaagcagagctggtgctgaattgttctctctgatggctctatgggagtggatagcactgagtcttcattgctgggttttagcggttgctgctgtttcggatcagcatgccacaagccccttcgactggctcctctctgataagggacccttccatcgctcacaggaatacacagattttgtggacagaagccggcagggatttagcacaagatacaagatatacagggagtttggccgctggaaagtaaataaccttgcagttgagagaagaaatttccttggctctcctctgcctcttgcccctgaattcttccgcaacataagacttttgggacgtcgacctacccttcagcaaatcacagaaaaccttatcaagaaatatgggacacatttcttgctatctgctactctgggaggagaggagtcactcacaatttttgtggacaagcggaagttgagcaaacgagctgaaggaagtgattccaccaccaatagctcttcggtcactctggagacgctacatcagctagccgcttcttatttcattgacagggacagcacccttcggagacttcaccacattcaaattgcatccactgccataaaggtaacagaaacacggactggtcctcttggctgcagtaactatgacaacctagattctgtcagttctgttctggttcagagtcctgagaataagattcagttgcaagggcttcaagtacttctcccagactatcttcaggaacgttttgtacaagcagctttgagctacattgcttgcaattcagagggagagtttatctgcaaggaaaatgactgctggtgtcactgtggtcccaaatttccagaatgcaactgcccctccatggacattcaagccatggaagagaatcttcttcgaataactgaaacctggaaagcttacaacagtgactttgaggaatcagatgaattcaagttatttatgaaaaggctacctatgaattatttcctcaacacatctactataatgcatttgtggacaatggattctaattttcagcgccgttatgaacaactggagaacagcatgaaacaacttttcctaaaggcgcagaaaattgtacacaagctttttagccttagcaagaggtgtcataaacaacccctcatcagcctgccaagacaaagaacctcaacctactggcttactcgcatccagtcttttctctactgcaatgagaacggcctcctaggcagcttttcagaagagacgcactcgtgcacgtgtccgaatgaccaggtggtctgcaccgcgttcctgccctgcacagtgggagacgcctctgcctgcctgacatgcgcaccagacaaccgcacccgctgcggcacctgcaacaccggctacatgctcagccaggggctctgcaagcctgaagtcgccgagtccaccgatcactatattggctttgaaactgacctgcaagatctcgagatgaaatatctgctgcagaaaacggacagacgaatagaagtccatgccatttttatcagcaatgacatgcgcctcaatagctggtttgatccctcctggcgtaagcggatgctcctcaccttgaagagcaataagtacaagtcaagtctggtccatatgattttgggtctctctttacagatttgcttaactaaaaacagcaccttggagccagtgttggctgtttatgtcaatcccttcggaggcagccactctgagagctggtttatgcctgtgaatgaaaacagctttccagactgggagcggactaagttggacctacccctgcagtgttataactggacattaactctggggaacaaatggaagacattttttgagacagtacacatctacctgagaagtcgcatcaagtccaatggtcccaatggtaatgagagcatttactatgaacctctggagtttattgacccttcccggaacctgggctatatgaaaatcaataacattcaagtgtttggctacagcatgcactttgaccctgaagcaattcgggacctgattttgcagctggactacccctatactcagggatcccaggattcagcacttttgcaactactagagatcagagaccgtgtaaataaactctccccacctggtcagcgtcgtctagatcttttctcttgcttgcttcgtcatagactcaagctgtctactagtgaggtggtgaggatccaatctgctctgcaggcgtttaatgccaaattgccaaacacaatggattatgacacgaccaaattatgtagttaaccataaatgtcaagcacaacccaaaatcttgaaggagtttttacagtgcttttgtggaacagtttatgtttggaagagtaaatttaaattgtcttttcaatatctgtcttatatcagtcaataacattggatggcaatttacacacatgaacttgctgacaatgaatatattatacagcagttttggtttatgaatgacataaatactgacaccagtctagaagacattctactttttacaataaatttcatttgtaattttatatgttccgtggcaatgcttttgtgcattacatcctctagagggaacataaaaagataccaataaaattttgtagctgaacagttattaaaaa

SEQ ID NO: 693 - DNA, 2519 bp, Homo sapiens
  source 1..2519: mol_type = genomic DNA
cagcgccgaggatgaggaggtgcaacagcggctccgggccgccgccgtcgctgctgctgctgctgctgtggctgctcgcggttcccggcgctaacgcggccccgcggtcggcgctctattcgccttccgacccgctgacgctgctgcaggcggacacggtgcgcggcgcggtgctgggctcccgcagcgcctgggccgtggagttcttcgcctcctggtgcggccactgcatcgccttcgccccgacgtggaaggcgctggccgaagacgtcaaagcctggaggccggccctgtatctcgccgccctggactgtgctgaggagaccaacagtgcagtctgcagagacttcaacatccctggcttcccgactgtgaggttcttcaaggcctttaccaagaacggctcgggagcagtatttccagtggctggtgctgacgtgcagacactgcgggagaggctcattgacgccctggagtcccatcatgacacgtggcccccagcctgtcccccactggagcctgccaagctggaggagattgatggattctttgcgagaaataacgaagagtacctggctctgatctttgaaaagggaggctcctacctgggtagagaggtggctctggacctgtcccagcacaaaggcgtggcggtgcgcagggtgctgaacacagaggccaatgtggtgagaaagtttggtgtcaccgacttcccctcttgctacctgctgttccggaatggctctgtctcccgagtccccgtgctcatggaatccaggtccttctataccgcttacctgcagagactctctgggctcaccagggaggctgcccagaccacagttgcaccaaccactgctaacaagatagctcccactgtttggaaattggcagatcgctccaagatctacatggctgacctggaatctgcactgcactacatcctgcggatagaagtgggcaggttcccggtcctggaagggcagcgcctggtggccctgaaaaagtttgtggcagtgctggccaagtatttccctggccggcccttagtccagaacttcctgcactccgtgaatgaatggctcaagaggcagaagagaaataaaattccctacagtttctttaaaactgccctggacgacaggaaagagggtgccgttcttgccaagaaggtgaactggattggctgccaggggagtgagccgcatttccggggctttccctgctccctgtgggtcctcttccacttcttgactgtgcaggcagctcggcaaaatgtagaccactcacaggaagcagccaaggccaaggaggtcctcccagccatccgaggctacgtgcactacttcttcggctgccgagactgcgctagccacttcgagcagatggctgctgcctccatgcaccgggtggggagtcccaacgccgctgtcctctggctctggtctagccacaacagggtcaatgctcgccttgcaggtgcccccagcgaggacccccagttccccaaggtgcagtggccaccccgtgaactttgttctgcctgccacaatgaacgcctggatgtgcccgtgtgggacgtggaagccaccctcaacttcctcaaggcccacttctccccaagcaacatcatcctggacttccctgcagctgggtcagctgcccggagggatgtgcagaatgtggcagccgccccagagctggcgatgggagccctggagctggaaagccggaattcaactctggaccctgggaagcctgagatgatgaagtcccccacaaacaccaccccacatgtgccggctgagggacctgagcttatttgaagtcctgcctcattctcactggagcctcagtctctcctgcttggtcttggccctcaactggggcaagtgaagccagaggagggtcccccagctgggtgggctggaatggaactcctcactagctgctggggctccgcccaccctgctcccttccggacaatgaagaagcctttgcaccctgggaggaaggaccaccccgggccctctatgcctggccagcctccagctcctcagacctcctgggtggggtttggcttcagggtggggtttggaagcttctggaagtcgtgctggtctcccaggtgaggcaagccatggttgctgggctgtagggtgagtggcttgcttggtgggacctgacgagttggtggcatgggaaggatgtgggtctctagtgccttgccctggcttagctgcaggagaagatggctgctttcacttccccccattgagctctgctccctctgagcctggtcttttgtccttttttattttggtctccaagatgaatgctcatctttggagggtgccaggtagaagctagggaggggagtgtcttctctctccaggtttcaccttccagtgtgcagaagttagaagggtctggcgggggcagtgccttacacatgcttgattcccacgctaccccctgccttgggaggtgtgtggaataaattatttttgttaaggcaa

SEQ ID NO: 694 - DNA, 9311 bp, Homo sapiens
  source 1..9311: mol_type = genomic DNA
gaggcaggcggtgccgcggcgccgggacccgactcatccggtgcttgcgtgtggtggtgagcgcagcgccgaggatgaggaggtgcaacagcggctccgggccgccgccgtcgctgctgctgctgctgctgtggctgctcgcggttcccggcgctaacgcggccccgcggtcggcgctctattcgccttccgacccgctgacgctgctgcaggcggacacggtgcgcggcgcggtgctgggctcccgcagcgcctgggccgtggagttcttcgcctcctggtgcggccactgcatcgccttcgccccgacgtggaaggcgctggccgaagacgtcaaagcctggaggccggccctgtatctcgccgccctggactgtgctgaggagaccaacagtgcagtctgcagagacttcaacatccctggcttcccgactgtgaggttcttcaaggcctttaccaagaacggctcgggagcagtatttccagtggctggtgctgacgtgcagacactgcgggagaggctcattgacgccctggagtcccatcatgacacgtggcccccagcctgtcccccactggagcctgccaagctggaggagattgatggattctttgcgagaaataacgaagagtacctggctctgatctttgaaaagggaggctcctacctgggtagagaggtggctctggacctgtcccagcacaaaggcgtggcggtgcgcagggtgctgaacacagaggccaatgtggtgagaaagtttggtgtcaccgacttcccctcttgctacctgctgttccggaatggctctgtctcccgagtccccgtgctcatggaatccaggtccttctataccgcttacctgcagagactctctgggctcaccagggaggctgcccagaccacagttgcaccaaccactgctaacaagatagctcccactgtttggaaattggcagatcgctccaagatctacatggctgacctggaatctgcactgcactacatcctgcggatagaagtgggcaggttcccggtcctggaagggcagcgcctggtggccctgaaaaagtttgtggcagtgctggccaagtatttccctggccggcccttagtccagaacttcctgcactccgtgaatgaatggctcaagaggcagaagagaaataaaattccctacagtttctttaaaactgccctggacgacaggaaagagggtgccgttcttgccaagaaggtgaactggattggctgccaggggagtgagccgcatttccggggctttccctgctccctgtgggtcctcttccacttcttgactgtgcaggcagctcggcaaaatgtagaccactcacaggaagcagccaaggccaaggaggtcctcccagccatccgaggctacgtgcactacttcttcggctgccgagactgcgctagccacttcgagcagatggctgctgcctccatgcaccgggtggggagtcccaacgccgctgtcctctggctctggtctagccacaacagggtcaatgctcgccttgcaggtgcccccagcgaggacccccagttccccaaggtgcagtggccaccccgtgaactttgttctgcctgccacaatgaacgcctggatgtgcccgtgtgggacgtggaagccaccctcaacttcctcaaggcccacttctccccaagcaacatcatcctggacttccctgcagctgggtcagctgcccggagggatgtgcagaatgtggcagccgccccagagctggcgatgggagccctggagctggaaagccggaattcaactctggaccctgggaagcctgagatgatgaagtcccccacaaacaccaccccacatgtgccggctgagggacctgaggcaagtcgacccccgaagctgcaccctggcctcagagctgcaccaggccaggagcctcctgagcacatggcagagcttcagaggaatgagcaggagcagccgcttgggcagtggcacttgagcaagcgagacacaggggctgcattgctggctgagtccagggctgagaagaaccgcctctggggccctttggaggtcaggcgcgtgggccgcagctccaagcagctggtcgacatccctgagggccagctggaggcccgagctggacggggccgaggccagtggctgcaggtgctgggagggggcttctcttacctggacatcagcctctgtgtggggctctattccctgtccttcatgggcctgctggccatgtacacctacttccaggccaagataagggccctgaagggccatgctggccaccctgcagcctgaaccacctggggaggaggcgggagagggagctgccatctctaggcacctcaagccccctgaccccattccctcccctcccaccccttgctccttgtctggcctagaagtgtgggaaattcaggaaaacgagttgctccagtgaagcttcttggggttgctaggacagagagctcctttgacacaaaagacaggagcagggtccaggttcccctgctgtgcagggagggcagccccgggcagtgggcatagggcagctcagtccctggcctcttagcaccacattcctgtttttcagcttatttgaagtcctgcctcattctcactggagcctcagtctctcctgcttggtcttggccctcaactggggcaagtgaagccagaggagggtcccccagctgggtgggctggaatggaactcctcactagctgctggggctccgcccaccctgctcccttccggacaatgaagaagcctttgcaccctgggaggaaggaccaccccgggccctctatgcctggccagcctccagctcctcagacctcctgggtggggtttggcttcagggtggggtttggaagcttctggaagtcgtgctggtctcccaggtgaggcaagccatggttgctgggctgtagggtgagtggcttgcttggtgggacctgacgagttggtggcatgggaaggatgtgggtctctagtgccttgccctggcttagctgcaggagaagatggctgctttcacttccccccattgagctctgctccctctgagcctggtcttttgtccttttttattttggtctccaagatgaatgctcatctttggagggtgccaggtagaagctagggaggggagtgtcttctctctccaggtttcaccttccagtgtgcagaagttagaagggtctggcgggggcagtgccttacacatgcttgattcccacgctaccccctgccttgggaggtgtgtggaataaattatttttgttaaggcaagcattggtgtgttctttaacttgctacttggagacctagtgtccagtctggacagaatgcacagagaccagcctcacctggaatgcagccagactcgatgtccctcagcacacacagctcctggccacagactgcccatagaactgtctgcacccaaaccccatggccttttcatgcacggagacaggcctctggatgtgcagccttgccaccccctgccccaatcctccctgagagctcctgcctcagtgccctgggctggtgagggagaagcctgtctgcacctgcctaattccagctcctccaggaagcaagggcttgtttgtcagagctgcagggttggccactcggtggggaggagtcagccaggattagagagcctgcccctaatccggcctgctgggttttacaaggatcagagctgctgataatgaacctcattaagggggagcaggagcctcaatccgatttggttttctctttgacatcttcactctgctcagatggcctgggtgctatgtggagcaggtgggatgccaaggccactcctgctatggggcagctggggctggggagggatggcagtctccctgcatgtttccctcgacctctttagctgcagcgccttgctgggctcctgggttggactccctctctgtgcccctgctccaggcacccattggctccatcctcctggttgtgctctgcaccccctgctcccttgggctggccctggctgggggcctgagagacagacaggaacccacaatcaggaggcaaccctggcctgcaagaggaagacagaggctcccagggccggtgccctgtgtgcccactgcaccaaggccgctgaataagcctgcccttcaccccctaagggctccttgcccaatgccaagtgctggggatttctgtcagcaagccctgtggctccagtgacggtatttctaaagccaaacttagttacctagaattagcgccatgttggaaacactgtcgcagcagcccgggctgcacagtgtgtagcccagcctccaggtccacggagtggtgtggacctcccacctcacagctgcctctggcagccaagcctcttttcgcccggccccagcccctctggttgataaacgggtgggcctcctcagcagcgtggctgcctttcaccttgatttccccagggctctcggcaacatcgataaaccagcctcgcccaccagctgggccctcccccacccagtctgccaggctgggagctggagcttgctgagtcttgaatgcccttctagatggcttctctagaggctctcctggcaagagagggtcccaaggggagccctgcaaagcaaaggctccttgtctggggcgggatagagaatctcgcctctgtctggtgtgttacctactgggggcacaggaacaatttcctcaaggagacagtggcatggagctttgaaagacgagtaggtgttagcaaggaaataaggaggaacgggggttacgggcagaggagaaagcacatgccaagtcagcaaagaaaagtagaattcgaaaactttttaaaaatattactaaggattttcacaatgctgcactgggctagaaactgaagctaaaacagatacgtggtccctgctgctatggggcttccgttctagaggcaaggacaggttgtgatgagggttctgaaggatagagaccaagcagggagggtgttgaggaggcttctgcgagacctgaaggatgggaagccaggaagtgggaggggtgggggtccaggctggaggggcccaatgtaggtgtagagggactacagccctgaggggctgctccatgcggcattcttggaggtccaagaggggcagcgccaccttgggccaggctcctctccagcagccttggtatggggtgggggtgggaagacccctgatgcagcctgtcctctgggtgtgggggtggaggagagggctccaggggacccagccagccttgaccctggaggaaagtcaggtgggctcagagagagccctcaaatctgggccctgggtcagggtggggtcaagtccagccttgaagagaatggactctggaatctgacgtctgggtttgaatccagcttccaacactcactggctgtgtgactttgggcaagataacttatccccttgtccccatgtgtcattggagataaactacccacctaccagattgttgtaccatgctgggcaaacactaagtgcttaataatggtagcccactgctcatgtcgtgtcgtctcctgtcttgatacctgaaaactcaaggggccctgttgtgcttggaggggggtgccgttcccacaggatattctgtgaagggtgtccctggagctgggcctccaggtggcaagccccaagccaccccggcaggtgccactggccagagttgaactgaggtgttgagtggaaagtgcctccccacccccatctgccacagtagtatggatttccttcatgagatggggctcctaaaatgcctgaaatgtgtatgctgttggagaattgatgtgtatgatttattgaactttgcactcatttaaatctcatttaatcctccaacaacgcaagatgaagaagctgaggcttaaagagattaagaaacatcctatcccctttactcccaccaaaataaatacatttgccctattctcccaaatggtgagaggtagatccaggacttgaccccagatcccacccactcaaccctggagctgcagtctctaccccttctaacacatgtgattctgtttcatgtcctgttccatcggtagagttacacactttcctgagactttatatggtggtgctgctgggtgccagcccttcttccctccaacagtggcagtaaccactgttgtgtgttggtgtcaaggagtggggacaccctgaaggaatccgccttttctagagctctcgctccattccctacatcgaggctgaagtgccctgtctcgggtccttgtttttaggcctcgtttgaaggaggggaagaaaccaggttcgttgggcgtgaccttggctcagctcgtctgtgaaattggggccgcagacttagtttgcgggtccctgctaaattcctctccctcttcctgggattcccatccatgtattgccagctacatgtagagtggagaggagaggtttttcctgcagggccttccagagaaaggattcttggccagaggaaatcacagcctataagatcaatatcctgatagaatcccgggccaggtgtgagaggggagagctcactcacaccagcctgacagtcttggggcagagcgccccataggcctctgcagccccatcactgcctcattctccctcaggtgccaaggaagctccagggtgggcccagtatccttccacagcatccctcctcttccccttcaacacccctttcacccctccctccaccacctctgaaaggtgctccttgggcagggcgataggattcccacccctagctttaagaactaaaccaaacttcaagaggagcaatttaatcttcatacctgactccttgtccctcctcaggcatgctgttgtgcaggacagagccctggcttctcctggatgtcacacctggcctgtctctgacccttgctttccctttctctgctgccctcaagggtcattcacacccaagagggtaagaagctgccctctcatcccttcctctcccaccctgggcctctgccctctgcctggccccagcagcacagtcttctccatagagaggggctgggccatgggaccccagttcctggggtctcggtgacacagttcactgtttgctgcagaggaggccccactcgcagccttggcctctgccctgcagaagaattccctgtaactcactcaccaatggccgtgggagccagtggcctcggcgagggtcagttggactgcatagctgccggctgagtctctctggccaccctcactggccccatcactccaggttgcactgctgcccagggggtttgtgccaggcctgggtcacagtggaagagagtctggaaatcacaaggcagaggaggagacctttgccaatgtgagagaacaaagttaaggggcagtccatgggggcattgaccttacttaggtgaggaggactcagggaacatctacagactctagggctagggtgagatcctcctgatagtgctggtagctccagctgctgctttggcaagacttggtcgtctctatactgagagagcaaaagctcttttcctggggctgcatgttcttccataggaaagtgggcttcaggtgctgcctattaaacctcctgcctcccctgctgcagtgctttgatgcctttcacctgtgtctacctgcgaacctctgcccaccacggaagagcagctcacatttggaaggggctaaaatttttacctagtttgaatctgctctgcaatgtccccatcaagttcttaaccatcccgggttccaatggttacagagttctgccctggggagggaggaattgcttagcaaatgatgttgagaatagtgattatttgggggaaaattcaggtaagatctcaccttcataccatataccaaaatacatctcagtagattagtaagctaatgcaaaaaaaaaaaaaaaaggggaaatataattgaatacttcactgtttttgaaagcatgaaaacaatggaaaatgcaactgatgtgagtaatccatctacttgacgtcacttttaagaaataaggccaggcacggtggctcacgcttgtaatcctagcactttgggaggccgaggtgggtggatcacgaggtcaggagtttgagaccagcttggccaacatggtgaaacccccatctctactaaaatattacacaggcattgtggcacacatctgtaatcccagctactcaggaggctgaggcaggagaatcacttgaacctgggaggtggaggttgcagtgagctgagatcgcgccattgcactccagcctgggggacagagcgagactctgtctcaaaaaaataaaaaaataaaaataaaaaaataaagtaaagctacatatttaaaagctggggaaatatatgctgtaaatatgacaaagggctgtgactcttctgcaacacaccattttaagaatgagctaggtctgcatttattgacctgataaaatgtcccaagaaggacacatttttataaacataagttactattgttatatatatgctaacgtttgtctagaaaaagtctagaaaaatacacactgaactgtgaatagcagttatatttagaaagcaacattaggatgaacttaagtcagggcttggactagagcaaggcaagtgaggtgccaggatgcaaaagttaaggagacacctgacctcaggggcccacaactgcagagcccctgacagtgagtgtctcagtagcctcgccctagtcctggctttcacttaaatatgttttcgaatgtttgtaataaaatatttcttttggaaggcaaaaatagcaaggaaaataaataggattaaaggatactaaagcccattcaataaaatttgtaggaggccactgatttggcctaggctcctatgatgtaaccaacagaccaaaccaatatggagtcattcatgctaaatgaaactagttaggagtatattcatataacaagtggctaagtgtcagttacagcctctgagctttagtcaattgtaggtggtcaatagattcagataaggcaatccagttaaactgtatatcccacttgctgttttctgtccctaaattctctctgagtacactgcagccctgaagttctttgaacctgttctgggttctgagggctgtccaattactgaatcatacataaaagccaagtaagattttaaaatttgttataattttggtttttaacaacttctgttgtaaataataaaagcactaaatccctactgaaaataaagggcctaaagactgaa

SEQ ID NO: 695 - DNA, 2289 bp, Homo sapiens
  source 1..2289: mol_type = genomic DNA
agacagagcaaagccacaacgctttctctgctggattaaagacggcccacagaccagaacttccactatactacttaaaattacataggtggcttgtcaaattcaattgattagtattgtaaaaggaaaaagaagttccttcttacagcttggattcaacggtccaaaacaaaaatgcagctgccattaaagtcacagatgaacaaacttctacactgatttttaaaatcaagaataagggcagcaagtttctggattcactgaatcaacagacacaaaaagacatcattttacaacctcatttcaaaatgaagacttttacctggaccctaggtgtgctattcttcctactagtggacactggacattgcagaggtggacaattcaaaattaaaaaaataaaccagagaagataccctcgtgccacagatggtaaagaggaagcaaagaaatgtgcatacacattcctggtacctgaacaaagaataacagggccaatctgtgtcaacaccaaggggcaagatgcaagtaccattaaagacatgatcaccaggatggaccttgaaaacctgaaggatgtgctctccaggcagaagcgggagatagatgttctgcaactggtggtggatgtagatggaaacattgtgaatgaggtaaagctgctgagaaaggaaagccgtaacatgaactctcgtgttactcaactctatatgcaattattacatgagattatccgtaagagggataattcacttgaactttcccaactggaaaacaaaatcctcaatgtcaccacagaaatgttgaagatggcaacaagatacagggaactagaggtgaaatacgcttccttgactgatcttgtcaataaccaatctgtgatgatcactttgttggaagaacagtgcttgaggatattttcccgacaagacacccatgtgtctcccccacttgtccaggtggtgccacaacatattcctaacagccaacagtatactcctggtctgctgggaggtaacgagattcagagggatccaggttatcccagagatttaatgccaccacctgatctggcaacttctcccaccaaaagccctttcaagataccaccggtaactttcatcaatgaaggaccattcaaagactgtcagcaagcaaaagaagctgggcattcggtcagtgggatttatatgattaaacctgaaaacagcaatggaccaatgcagttatggtgtgaaaacagtttggaccctgggggttggactgttattcagaaaagaacagacggctctgtcaacttcttcagaaattgggaaaattataagaaagggtttggaaacattgacggagaatactggcttggactggaaaatatctatatgcttagcaatcaagataattacaagttattgattgaattagaagactggagtgataaaaaagtctatgcagaatacagcagctttcgtctggaacctgaaagtgaattctatagactgcgcctgggaacttaccagggaaatgcaggggattctatgatgtggcataatggtaaacaattcaccacactggacagagataaagatatgtatgcaggaaactgcgcccactttcataaaggaggctggtggtacaatgcctgtgcacattctaacctaaatggagtatggtacagaggaggccattacagaagcaagcaccaagatggaattttctgggccgaatacagaggcgggtcatactccttaagagcagttcagatgatgatcaagcctattgactgaagagagacactcgccaatttaaatgacacagaactttgtacttttcagctcttaaaaatgtaaatgttacatgtatattacttggcacaatttatttctacacagaaagtttttaaaatgaattttaccgtaactataaaagggaacctataaatgtagtttcatctgtcgtcaattactgcagaaaattatgtgtatccacaacctagttattttaaaaattatgttgactaaatacaaagtttgttttctaaaatgtaaatatttgccacaatgtaaagcaaatcttagctatattttaaatcataaataacatgttcaagatacttaacaatttatttaaaatctaagattgctctaacgtctagtgaaaaaaatatttttaaaatttcagccaaataatgcattttatttataaaaatacagacagaaaattagggagaaacctctagttttgccaatagaaaatgcttcttccattgaataaaagttatttcaaattgaa

SEQ ID NO: 696 - DNA, 4369 bp, Homo sapiens
  source 1..4369: mol_type = genomic DNA
gggcatgactctctctcttgagtaggcacacactcccttttctcgggtgtgtactttttgctttgtgatacatctctgcactttcagtattttccaactcatccttaaattccttctcacaacagtgtcaagagcctggacgccagccaggattgaggtcctacgggtgtttggggacctccccaagcccacgagtatcaatggcagtatcaattgtctgtgacagtgattaaggagcaaaacacttggaacccacaagactcccagaaggtgaagttaagagctcccagactcataaggttattagaacagcaaactggcaccccaaagaactttacggagacttgcaacctatcaacaagttggatgagggattaaaagccttcaacaaccaacaaccccaagcatcaaactgaaggaaacattctaaccttcacagacagactggaggctggatggggacctggctgaagacatctggagaatgaaagttaagtaccagcttgcatttttgtgcccctagattatttttgcattttaaaataagaagcatcaaattgcgtgtctctgtgtaaaagttctagcaatttgttttaaggtgaacttattttggcttagggactacaaaaagagaaggtaattcctagggaaggaagaagagaaagaaatgaaaattagagaataagattattttgaatgacttcaggtagcgaggagtgtgtgtttgtgagtgtgtatttgagagacttggctcatgcctgtgggtcttctcttctagtatcagtgaggggagggattactgaagaagaaggggggaaaaaaaaagaaagaaatctgagctttctgggaggaaattcaaaggaaccaagagaaattaacttcgttctgcaaggactaaagtacagcaagaggagagaggtcaagcgagaagcgtgcgggaagcacatgccctggggaggcatagaagccacactggcagagcggccagcacaggtagccagcagaggcattcttggggctatttgaaaaagtttggtctgtgaacaaaacagtttccctggtgactgcaaatccattgctagctgcctctttctcgtctgcccatcactctggtgtggtacccagaagttgacttctggttctgtagaaagagctaggggaggtatgatgtgcttaaagatcctaagaataagcctggcgattttggctgggtgggcactctgttctgccaactctgagctgggctggacacgcaagaaatccttggttgagagggaacacctgaatcaggtgctgttggaaggagaacgttgttggctgggggccaaggttcgaagacccagagcttctccacagcatcacctctttggagtctaccccagcagggctgggaactacctaaggccctaccccgtgggggagcaagaaatccatcatacaggacgcagcaaaccagacactgaaggaaatgctgtgagccttgttcccccagacctgactgaaaatccagcaggactgaggggtgcagttgaagagccggctgccccatgggtaggggatagtcctattgggcaatctgagctgctgggagatgatgacgcttatctcggcaatcaaagatccaaggagtctctaggtgaggccgggattcagaaaggctcagccatggctgccactactaccaccgccattttcacaaccctgaacgaacccaaaccagagacccaaaggaggggctgggccaagtccaggcagcgtcgccaagtgtggaagaggcgggcggaagatgggcagggagactccggtatctcttcacatttccaaccttggcccaagcattcccttaaacacagggtcaaaaagagtccaccggaggaaagcaaccaaaatggtggagagggctcctaccgagaagcagagacctttaactcccaagtaggactgcccatcttatacttctctgggaggcgggagcggctgctgctgcgtccagaagtgctggctgagattccccgggaggcgttcacagtggaagcctgggttaaaccggagggaggacagaacaacccagccatcatcgcaggtgtgtttgataactgctcccacactgtcagtgacaaaggctgggccctggggatccgctcagggaaggacaagggaaagcgggatgctcgcttcttcttctccctctgcaccgaccgcgtgaagaaagccaccatcttgattagccacagtcgctaccaaccaggcacatggacccatgtggcagccacttacgatggacggcacatggccctgtatgtggatggcactcaggtggctagcagtctagaccagtctggtcccctgaacagccccttcatggcatcttgccgctctttgctcctggggggagacagctctgaggatgggcactatttccgtggacacctgggcacactggttttctggtcgaccgccctgccacaaagccattttcagcacagttctcagcattcaagtggggaggaggaagcgactgacttggtcctgacagcgagctttgagcctgtgaacacagagtgggttccctttagagatgagaagtacccacgacttgaggttctccagggctttgagccagagcctgagattctgtcgcctttgcagcccccactctgtgggcaaacagtctgtgacaatgtggaattgatctcccagtacaatggatactggccccttcggggagagaaggtgatacgctaccaggtggtgaacatctgtgatgatgagggcctaaaccccattgtgagtgaggagcagattcgtctgcagcacgaggcactgaatgaggccttcagccgctacaacatcagctggcagctgagcgtccaccaggtccacaattccaccctgcgacaccgggttgtgcttgtgaactgtgagcccagcaagattggcaatgaccattgtgaccccgagtgtgagcacccactcacaggctatgatgggggtgactgccgcctgcagggccgctgctactcctggaaccgcagggatgggctctgtcacgtggagtgtaacaacatgctgaacgactttgacgacggagactgctgcgacccccaggtggctgatgtgcgcaagacctgctttgaccctgactcacccaagagggcatacatgagtgtgaaggagctgaaggaggccctgcagctgaacagtactcacttcctcaacatctactttgccagctcagtgcgggaagaccttgcaggtgctgccacctggccttgggacaaggacgctgtcactcacctgggtggcattgtcctcagcccagcatattatgggatgcctggccacaccgacaccatgatccatgaagtgggacatgttctgggactctaccatgtctttaaaggagtcagtgaaagagaatcctgcaatgacccctgcaaggagacagtgccatccatggaaacgggagacctctgtgccgacaccgcccccactcccaagagtgagctgtgccgggaaccagagcccactagtgacacctgtggcttcactcgcttcccaggggctccgttcaccaactacatgagctacacgggtatcaccactgtcttgttttgttttctgttaagaatacatgggggcctttgagagctgggagggtggaggtgtgggagctgatgggagaatgattaagtggtcatttgtgtcggagagttgaagtgtatttattataaggtattattattttttcatgtctttgaagaacttgaagaaatactgacatattaaggtactttgttcactgaattctcctctactagatattttaaaatatacttctatcctcgatagtaaaaaaggcacagagccaaaagccctcttgtgatccccttgacttctagaatgtggttattcttatttttgcccgcattcttagacatttactctgaagaagagtccaatggaaataaaggaaaagagtttatgggtcaaggtggcccattgtactgtttttgaagttggtcaacaaggtggcttggttaatttaggctcagcatgttttactgtatgttactaaaaaaaaaaaaaaaaaaaatcagattctctttttccagcactagtcaagcacaaattcttagctgcctaccaccctttccccaccaaaaggtgacatctaattttaaaaaaatggcatcttcctggccctcggaaaaacttgtcatctggtctttcttgccttaattcagcttctgtattattcttcgctgtctctcacgccttccttgtttcttgtgaaaagtaatagtgactggtttcctataatggactcaaagttatccctaaaattaaagacttatttgatgaccta

SEQ ID NO: 697 - DNA, 9685 bp, Homo sapiens
  source 1..9685: mol_type = genomic DNA
gggcatgactctctctcttgagtaggcacacactcccttttctcgggtgtgtactttttgctttgtgatacatctctgcactttcagtattttccaactcatccttaaattccttctcacaacagtgtcaagagcctggacgccagccaggattgaggtcctacgggtgtttggggacctccccaagcccacgagtatcaatggcagtatcaattgtctgtgacagtgattaaggagcaaaacacttggaacccacaagactcccagaaggtgaagttaagagctcccagactcataaggttattagaacagcaaactggcaccccaaagaactttacggagacttgcaacctatcaacaagttggatgagggattaaaagccttcaacaaccaacaaccccaagcatcaaactgaaggaaacattctaaccttcacagacagactggaggctggatggggacctggctgaagacatctggagaatgaaagttaagtaccagcttgcatttttgtgcccctagattatttttgcattttaaaataagaagcatcaaattgcgtgtctctgtgtaaaagttctagcaatttgttttaaggtgaacttattttggcttagggactacaaaaagagaaggtaattcctagggaaggaagaagagaaagaaatgaaaattagagaataagattattttgaatgacttcaggtagcgaggagtgtgtgtttgtgagtgtgtatttgagagacttggctcatgcctgtgggtcttctcttctagtatcagtgaggggagggattactgaagaagaaggggggaaaaaaaaagaaagaaatctgagctttctgggaggaaattcaaaggaaccaagagaaattaacttcgttctgcaaggactaaagtacagcaagaggagagaggtcaagcgagaagcgtgcgggaagcacatgccctggggaggcatagaagccacactggcagagcggccagcacaggtagccagcagaggcattcttggggctatttgaaaaagtttggtctgtgaacaaaacagtttccctggtgactgcaaatccattgctagctgcctctttctcgtctgcccatcactctggtgtggtacccagaagttgacttctggttctgtagaaagagctaggggaggtatgatgtgcttaaagatcctaagaataagcctggcgattttggctgggtgggcactctgttctgccaactctgagctgggctggacacgcaagaaatccttggttgagagggaacacctgaatcaggtgctgttggaaggagaacgttgttggctgggggccaaggttcgaagacccagagcttctccacagcatcacctctttggagtctaccccagcagggctgggaactacctaaggccctaccccgtgggggagcaagaaatccatcatacaggacgcagcaaaccagacactgaaggaaatgctgtgagccttgttcccccagacctgactgaaaatccagcaggactgaggggtgcagttgaagagccggctgccccatgggtaggggatagtcctattgggcaatctgagctgctgggagatgatgacgcttatctcggcaatcaaagatccaaggagtctctaggtgaggccgggattcagaaaggctcagccatggctgccactactaccaccgccattttcacaaccctgaacgaacccaaaccagagacccaaaggaggggctgggccaagtccaggcagcgtcgccaagtgtggaagaggcgggcggaagatgggcagggagactccggtatctcttcacatttccaaccttggcccaagcattcccttaaacacagggtcaaaaagagtccaccggaggaaagcaaccaaaatggtggagagggctcctaccgagaagcagagacctttaactcccaagtaggactgcccatcttatacttctctgggaggcgggagcggctgctgctgcgtccagaagtgctggctgagattccccgggaggcgttcacagtggaagcctgggttaaaccggagggaggacagaacaacccagccatcatcgcaggtgtgtttgataactgctcccacactgtcagtgacaaaggctgggccctggggatccgctcagggaaggacaagggaaagcgggatgctcgcttcttcttctccctctgcaccgaccgcgtgaagaaagccaccatcttgattagccacagtcgctaccaaccaggcacatggacccatgtggcagccacttacgatggacggcacatggccctgtatgtggatggcactcaggtggctagcagtctagaccagtctggtcccctgaacagccccttcatggcatcttgccgctctttgctcctggggggagacagctctgaggatgggcactatttccgtggacacctgggcacactggttttctggtcgaccgccctgccacaaagccattttcagcacagttctcagcattcaagtggggaggaggaagcgactgacttggtcctgacagcgagctttgagcctgtgaacacagagtgggttccctttagagatgagaagtacccacgacttgaggttctccagggctttgagccagagcctgagattctgtcgcctttgcagcccccactctgtgggcaaacagtctgtgacaatgtggaattgatctcccagtacaatggatactggccccttcggggagagaaggtgatacgctaccaggtggtgaacatctgtgatgatgagggcctaaaccccattgtgagtgaggagcagattcgtctgcagcacgaggcactgaatgaggccttcagccgctacaacatcagctggcagctgagcgtccaccaggtccacaattccaccctgcgacaccgggttgtgcttgtgaactgtgagcccagcaagattggcaatgaccattgtgaccccgagtgtgagcacccactcacaggctatgatgggggtgactgccgcctgcagggccgctgctactcctggaaccgcagggatgggctctgtcacgtggagtgtaacaacatgctgaacgactttgacgacggagactgctgcgacccccaggtggctgatgtgcgcaagacctgctttgaccctgactcacccaagagggcatacatgagtgtgaaggagctgaaggaggccctgcagctgaacagtactcacttcctcaacatctactttgccagctcagtgcgggaagaccttgcaggtgctgccacctggccttgggacaaggacgctgtcactcacctgggtggcattgtcctcagcccagcatattatgggatgcctggccacaccgacaccatgatccatgaagtgggacatgttctgggactctaccatgtctttaaaggagtcagtgaaagagaatcctgcaatgacccctgcaaggagacagtgccatccatggaaacgggagacctctgtgccgacaccgcccccactcccaagagtgagctgtgccgggaaccagagcccactagtgacacctgtggcttcactcgcttcccaggggctccgttcaccaactacatgagctacacggatgataactgcactgacaacttcactcctaaccaagtggcccgaatgcattgctatttggacctagtctatcagcagtggactgaaagcagaaagcccacccccatccccattccacctatggtcatcggacagaccaacaagtccctcactatccactggctgcctcctattagtggagttgtatatgacagggcctcaggcagcttgtgtggcgcttgcactgaagatgggacctttcgtcagtatgtgcacacagcttcctcccggcgggtgtgtgactcctcaggttattggaccccagaggaggctgtggggcctcctgatgtggatcagccctgcgagccaagcttacaggcctggagccctgaggtccacctgtaccacatgaacatgacggtcccctgccccacagaaggctgtagcttggagctgctcttccaacacccggtccaagccgacaccctcaccctgtgggtcacttccttcttcatggagtcctcgcaggtcctctttgacacagagatcttgctggaaaacaaggagtcagtgcacctgggccccttagacactttctgtgacatcccactcaccatcaaactgcacgtggatgggaaggtgtcgggggtgaaagtctacacctttgatgagaggatagagattgatgcagcactcctgacttctcagccccacagtcccttgtgctctggctgcaggcctgtgaggtaccaggttctccgcgatcccccatttgccagtggtttgcccgtggtggtgacacattctcacaggaagttcacggacgtggaggtcacacctggacagatgtatcagtaccaagttctagctgaagctggaggagaactgggagaagcttcgcctcctctgaaccacattcatggagctccttattgtggagatgggaaggtgtcagagagactgggagaagagtgtgatgatggagaccttgtgagcggagatggctgctccaaggtgtgtgagctggaggaaggtttcaactgtgtaggagagccaagcctttgctacatgtatgagggagatggcatatgtgaaccttttgagagaaaaaccagcattgtagactgtggcatctacactcccaaaggatacttggatcaatgggctacccgggcttactcctctcatgaagacaagaagaagtgtcctgtttccttggtaactggagaacctcattccctaatttgcacatcataccatccagatttacccaaccaccgtcccctaactggctggtttccctgtgttgccagtgaaaatgaaactcaggatgacaggagtgaacagccagaaggtagcctgaagaaagaggatgaggtttggctcaaagtgtgtttcaatagaccaggagaggccagagcaatttttatttttttgacaactgatggcctagttcccggagagcatcagcagccgacagtgactctctacctgaccgatgtccgtggaagcaaccactctcttggaacctatggactgtcatgccagcataatccactgattatcaatgtgacccatcaccagaatgtccttttccaccataccacctcagtgctgctgaatttctcatccccacgggtcggcatctcagctgtggctctaaggacatcctcccgcattggtctttcggctcccagtaactgcatctcagaggacgaggggcagaatcatcagggacagagctgtatccatcggccctgtgggaagcaggacagctgtccgtcattgctgcttgatcatgctgatgtggtgaactgtacctctataggcccaggtctcatgaagtgtgctatcacttgtcaaaggggatttgcccttcaggccagcagtgggcagtacatcaggcccatgcagaaggaaattctgctcacatgttcttctgggcactgggaccagaatgtgagctgccttcccgtggactgcggtgttcccgacccgtctttggtgaactatgcaaacttctcctgctcagagggaaccaaatttctgaaacgctgctcaatctcttgtgtcccaccagccaagctgcaaggactgagcccatggctgacatgtcttgaagatggtctctggtctctccctgaagtctactgcaagttggagtgtgatgctccccctattattctgaatgccaacttgctcctgcctcactgcctccaggacaaccacgacgtgggcaccatctgcaaatatgaatgcaaaccagggtactatgtggcagaaagtgcagagggtaaagtcaggaacaagctcctgaagatacaatgcctggaaggtggaatctgggagcaaggcagctgcattcctgtggtgtgtgagccaccccctcctgtgtttgaaggcatgtatgaatgtaccaatggcttcagcctggacagccagtgtgtgctcaactgtaaccaggaacgtgaaaagcttcccatcctctgcactaaagagggcctgtggacccaggagtttaagttgtgtgagaatctgcaaggagaatgcccaccacccccctcagagctgaattctgtggagtacaaatgtgaacaaggatatgggattggtgcagtgtgttccccattgtgtgtaatcccccccagtgaccccgtgatgctacctgagaatatcactgctgacactctggagcactggatggaacctgtcaaagtccagagcattgtgtgcactggccggcgtcaatggcacccagaccccgtcttagtccactgcatccagtcatgtgagcccttccaagcagatggttggtgtgacactatcaacaaccgagcctactgccactatgacgggggagactgctgctcttccacactctcctccaagaaggtcattccatttgctgctgactgtgacctggatgagtgcacctgccgggaccccaaggcagaagaaaatcagtaactgtgggaacaagcccctccctccactgcctcagaggcagtaagaaagagaggccgacccaggaggaaacaaagggtgaatgaagaagaacaatcatgaaatggaagaaggaggaagagcatgaaggatcttataagaaatgcaagaggatattgataggtgtgaactagttcatcaagtagcccaagtaggagagaatcataggcaaaagtttctttaaagtggcagttgattaacatggaaggggaaatatgatagatatataaggaccctcctccctcacttatattctattaaatcctatcctcaactcttgccctgctctccgctccaccccctgccaactactcagtcccacccaacttgtaaaccaataccaaaatactagaggagaagttggcagggatactgttaatacccattttgaatggattgccatctttcagagcttgtctgctctcaactggctctttttctttttgtgtagtttcccttaaataatgaagttagttattaattctttataagtatttaaacataattatataaatatattatatatattatattttttgctgtttactaagctaaaaattattcattgttccacacatgctgctgtgaagttcacattcaagatgaatgttgagactttgaggacagaaaggcaacttattttcccatctttctatggatgcggattggcaggttgaatgggaagtacagaaggagagagagtaattagatggaattctggatgctagcatgtaaagctaatcatctttttttttatgacctgggagctgggcccattttatgaccaaggagatggggagttggaatggtggtactaagaggcataggaagttgagtgtgaataccattggtgatgggtccaggagaactagactatggttcttgaatatctgtccacaaagaatatactaacttttgtcaacttctcagaactcccaactggagtcggtgagacctaggattttctgcacttccacacatgcctgttccaagtgtggctgtcagccagtcaacaagtttgtactatggcccattctctgatcaccaggattacaggaactcacacactcctcatacttggcctgtagtcctacttcttgttagaagtctccaagtctggccagtcacatgaccaagtgttgatttttctggaggaaaaattttatggaaatgatataggggaaaggtgggaggagatgaaagaacaggcaagagctgtcagggttaaatccaggcccgggcatgagaatggaagtgatcagggagactcggtccttgttccaagtctccaaagaagaccaaagtgggtcccttgagcaatgaagaatctgagataaattctcttcaagtatcatgtacaaaatctgtgagccagagattttgacttgagcaagccatggaaatgcatggagcaagggtgacactctgtggggagacagaagaatttcaactatttaatgtccattttgttgtttttaccctttcttatccaatagatggaatgcacatgaaatgaccatattaagcctctctctatttacatcccaggctcactgggatgtgatctactgcagttacattttcttgtaacggtttctggattagaccctagggaaagtgagtaaggagccagtttctgtttaacattctagttttactcattttaggaaggctgtgagtgaggcttgtctcctttaaagtttcttctccaatggaaaccaagaacagacaaaatttagagctcagctgtggtctcttctcatcttctgctcttttgctttgaccacagtttttctactcttcccatcaacactagagcaatggctgtgcaaataggaataggaaatactaccacaatgatagaaatattatccacactatcacgtagggaagaacaatatcctgaaagagaataaaacacgaataaggtgatgtacccacattaatctgtgggtttgtggaatgagggttgcaaagttattgggaaaaggaaagagcagagttcacccattcaaaaaaaaccttttgtctactaatctctagtgtaaagaaaatgtagttcagataccattcattgtcttgggtcatgcttagtgcccccaagaagacaaacatatttattcttgggattctgataggcttcaatatgcaaaggacaatggaaaagtttagacactctattttcaaaattttataaacttgttttattggggaaaatgtccaaattgctagacacattctaagttctgccttggagaatcctactttgtctgagattgaggcagaggaattgttatcctgggcattactcagctcaggaacatggagcctgtggttcatgccagtgtgtgtcttcatgcagtctctccacaagagcaacagtaagaacatttctgttttaaatttcattttaaaatattttattatctgcaattcaccactgctctgggaaagcaaaaggaaagttcctgttgtgtgtgaagagcctcttaggctataaggcttcccagccatagtcagctatagctattcagagacagcaggttcttccagtctttgttcctgggacctgatgttttgagcaactcaggtcactgataaagtggaaggactaagacactgtggtcacagatcccagcaacatcaactcacactcaatccatgtggtggtccacattctgctactcttatccacccatgtggtcattgagagcctttctcagagactcttctgtgtgtttgattgtgcccaggtggcccagggctagctggctctaacaactagcatgacagcctccaatcagaaaggcaggtaaggggacagggtgaggagaatgggcagatactgacagaaattaaagtaaagggattgtgaaagtaaagagctcttcctgattctcatcttctcttttttctattacaaggcattgaacttggcacttcctgtattctttgtgatcactattgagtgcattagttaacacccaaggggatggcttgattgggaatgtagtgaaaggagctgatctactgtattgtaatgtaaaacagctacagccagttattttgtaagattataagttgttcattaaaaaatcagcacacaaaa

SEQ ID NO: 698 - DNA, 1153 bp, Homo sapiens
  source 1..1153: mol_type = genomic DNA
agaacaggagcaaagcatagtggtgtgaaagttgccaaagatgggcatggtggaggctcaagtgtagggtcaagtgtagggtggatcaggggagtagcaggagatggtgtggaaaaatgtttggggtcaggttatacagggctgttaaagcctgccgaggagtccagactctaaatggatgaacagcaaaggtttaaggggtgaggcatcactagatcagcccaaaacctccatccacctcttctccaccaggaaggtgcaaggacactctctccacaatcacggggccgaccacccagaacacatatgggcggaatgaaggggcctggatgaaggaccccctggccaaggatgagcggatttacgtaaccaactattactacggcaacaccctggtagagttccggaacctggagaacttcaaacaaggtcgctggagcaattcctacaagctcccgtacagctggatcggcacaggccacgtggtatacaatggcgccttctactacaatcgcgccttcacccgcaacatcatcaagtacgacctgaagcagcgctacgtggctgcctgggccatgctgcatgacgtggcctacgaggaggccaccccctggcgatggcagggccactcagacgtggactttgctgtggacgagaatggcctatggctcatctacccggccctggacgatgagggcttcagccaggaggtcattgtcctgagcaagctcaatgccgcggacctgagcacacagaaggagaccacatggcgcacggggctccggaggaatttctacggcaactgcttcgtcatctgtggggtgctgtatgccgtggatagctacaaccagcggaatgccaacatctcctacgctttcgacacccacaccaacacacagatcgtccccaggctgctgttcgagaatgagtattcctatacgacccagatagactacaaccccaaggaccgcctgctctatgcctgggacaatggccaccaggtcacttaccatgtcatctttgcctactgacacccttgtccccacaagcagaagcacagaggggtcactagcaccttgtgtgtatgtgtgtgcgcgcacgtgtgtgtaggtgggtatgtgttgtttaaaaatatatattattttgtataata

SEQ ID NO: 699 - DNA, 1792 bp, Homo sapiens
  source 1..1792: mol_type = genomic DNA
ggccagctggctatcagacaatgacatgctttgacaggcccctgagctctgtgagtaaattcttgaacagctgagagtgctaccattttgtcatagccctaagggtgcagatgatgctgaaagcgtgttggccaaatctgaatgatgaaagccaattacaaactagaaaatgaaaacagaccccagatgcaaggagatgagacagttaaatttacttcctcttttctaatctgagaggtttcatgttgaagaaaatcagtgttggggttgcaggagacctaaacacagtcaccatgaagctgggctgtgtcctcatggcctgggccctctacctttcccttggtgtgctctgggtggcccagatgctactggctgccagttttgagacgctgcagtgtgagggacctgtctgcactgaggagagcagctgccacacggaggatgacttgactgatgcaagggaagctggcttccaggtcaaggcctacactttcagtgaacccttccacctgattgtgtcctatggtgcttccagctctgctgcacctcccacattgaatccagctcctcagaaatcagctgctccaggaactgctcctgaggaggcccctgggcctctgcctccgccgccaaccccatcttctgaggatccaggcttttcttctcctctggggatgccagatcctcatctgtatcaccagatgggccttcttctcaaacacatgcaggatgtgagagtcctcctcggtcacctgctcatggagttgagggaattatctggccaccggaagcctgggaccacaaaggctactgctgaatagaagtaaacagttcatccatgatctcacttaaccaccccaataaatctgattctttattttctcttcctgtcctgcacatatgcataagtacttttacaagttgtcccagtgttttgttagaataatgtagttaggtgagtgtaaataaatttatataaagtgagaattagagtttagctataattgtgtattctctcttaacacaacagaattctgctgtctagatcaggaatttctatctgttatatcgaccagaatgttgtgatttaaagagaactaatggaagtggattgaatacagcagtctcaactgggggcaattttgccccccagaggacattgggcaatgtttggagacattttggtcattatacttggggggttgggggatggtgggatgtgtgtgctactggcatccagtaaatagaagccaggggtgccgctaaacatcctataatgcacagggcagtaccccacaacgaaaaataatctggcccaaaatgtcagttgtactgagtttgagaaaccccagcctaatgaaaccctaggtgttgggctctggaatgggactttgtcccttctaattattatctctttccagcctcattcagctattcttactgacataccagtctttagctggtgctatggtctgttctttagttctagtttgtatcccctcaaaagccattatgttgaaatcctaatccccaaggtgatggcattaagaagtgggcctttgggaagtgattagatcaggagtgcagagccctcatgattaggattagtgcccttatttaaaaaggccccagagagctaactcacccttccaccatatgaggacgtggcaagaagatgacatgtatgagaaccaaaaaacagctgtcgccaaacaccgactctgtcgttgccttgatcttgaacttccagcctccagaactatgagaaataaaattctgttgtttgtaagct

SEQ ID NO: 700 - DNA, 823 bp, Homo sapiens
  source 1..823: mol_type = genomic DNA
gccctctacctttcccttggtgtgctctgggtggcccagatgctactggctgccagttttgagacgctgcagtgtgagggacctgtctgcactgaggagagcagctgccacacggaggatgacttgactgatgcaagggaagctggcttccaggtcaaggcctacactttcagtgaacccttccacctgattgtgtcctatggtgcttccagctctgctgcacctcccacattgaatccagctcctcagaaatcagctgctccaggaactgctcctgaggaggcccctgggcctctgcctccgccgccaaccccatcttctgaggatccaggcttttcttctcctctggggatgccagatcctcatctgtatcaccagatgggccttcttctcaaacacatgcaggatgtgagagtcctcctcggtcacctgctcatggagttgagggaattatctggccaccggaagcctgggaccacaaaggctactgctgaatagaagtaaacagttcatccatgatctcacttaaccaccccaataaatctgattctttattttctcttcctgtcctgcacatatgcataagtacttttacaagttgtcccagtgttttgttagaataatgtagttaggtgagtgtaaataaatttatataaagtgagaattagagtttagctataattgtgtattctctcttaacacaacagaattctgctgtctagatcaggaatttctatctgttatatcgaccagaatgttgtgatttaaagagaactaatggaagtggattgaatacagcagtctcaactgggggcaattttgc

SEQ ID NO: 701 - DNA, 2066 bp, Homo sapiens
  source 1..2066: mol_type = genomic DNA
atgaagctgggctgtgtcctcatggcctgggccctctacctttcccttggtgtgctctgggtggcccagatgctactggcagctggatgtcatgccgctgccagttttgagacgctgcagtgtgagggacctgtctgcactgaggagagcagctgccacacggaggatgacttgactgatgcaagggaagctggcttccaggtcaaggcctacactttcagtgaacccttccacctgattgtgtcctatgactggctgatcctccaaggtccagccaagccagtttttgaaggggacctgctggttctgcgctgccaggcctggcaagactggccactgactcaggtgaccttctaccgagatggctcagctctgggtccccccgggcctaacagggaattctccatcaccgtggtacaaaaggcagacagcgggcactaccactgcagtggcatcttccagagccctggtcctgggatcccagaaacagcatctgttgtggctatcacagtccaagaactgtttccagcgccaattctcagagctgtaccctcagctgaaccccaagcaggaagccccatgaccctgagttgtcagacaaagttgcccctgcagaggtcagctgcccgcctcctcttctccttctacaaggatggaaggatagtgcaaagcagggggctctcctcagaattccagatccccacagcttcagaagatcactccgggtcatactggtgtgaggcagccactgaggacaaccaagtttggaaacagagcccccagctagagatcagagtgcagggtgcttccagctctgctgcacctcccacattgaatccagctcctcagaaatcagctgctccaggaactgctcctgaggaggcccctgggcctctgcctccgccgccaaccccatcttctgaggatccaggcttttcttctcctctggggatgccagatcctcatctgtatcaccagatgggccttcttctcaaacacatgcaggatgtgagagtcctcctcggtcacctgctcatggagttgagggaattatctggccaccggaagcctgggaccacaaaggctactgctgaatagaagtaaacagttcatccatgatctcacttaaccaccccaataaatctgattctttattttctcttcctgtcctgcacatatgcataagtacttttacaagttgtcccagtgttttgttagaataatgtagttaggtgagtgtaaataaatttatataaagtgagaattagagtttagctataattgtgtattctctcttaacacaacagaattctgctgtctagatcaggaatttctatctgttatatcgaccagaatgttgtgatttaaagagaactaatggaagtggattgaatacagcagtctcaactgggggcaattttgccccccagaggacattgggcaatgtttggagacattttggtcattatacttggggggttgggggatggtgggatgtgtgtgctactggcatccagtaaatagaagccaggggtgccgctaaacatcctataatgcacagggcagtaccccacaacgaaaaataatctggcccaaaatgtcagttgtactgagtttgagaaaccccagcctaatgaaaccctaggtgttgggctctggaatgggactttgtcccttctaattattatctctttccagcctcattcagctattcttactgacataccagtctttagctggtgctatggtctgttctttagttctagtttgtatcccctcaaaagccattatgttgaaatcctaatccccaaggtgatggcattaagaagtgggcctttgggaagtgattagatcaggagtgcagagccctcatgattaggattagtgcccttatttaaaaaggccccagagagctaactcacccttccaccatatgaggacgtggcaagaagatgacatgtatgagaaccaaaaaacagctgtcgccaaacaccgactctgtcgttgccttgatcttgaacttccagcctccagaactatgagaaataaaattctgttgtttgtaa

SEQ ID NO: 702 - DNA, 1684 bp, Homo sapiens
  source 1..1684: mol_type = genomic DNA
gtttcatgttgaagaaaatcagtgttggggttgcaggagacctaaacacagtcaccatgaagctgggctgtgtcctcatggcctgggccctctacctttcccttggtgtgctctgggtggcccagatgctactggaactgtttccagcgccaattctcagagctgtaccctcagctgaaccccaagcaggaagccccatgaccctgagttgtcagacaaagttgcccctgcagaggtcagctgcccgcctcctcttctccttctacaaggatggaaggatagtgcaaagcagggggctctcctcagaattccagatccccacagcttcagaagatcactccgggtcatactggtgtgaggcagccactgaggacaaccaagtttggaaacagagcccccagctagagatcagagtgcagggtgcttccagctctgctgcacctcccacattgaatccagctcctcagaaatcagctgctccaggaactgctcctgaggaggcccctgggcctctgcctccgccgccaaccccatcttctgaggatccaggcttttcttctcctctggggatgccagatcctcatctgtatcaccagatgggccttcttctcaaacacatgcaggatgtgagagtcctcctcggtcacctgctcatggagttgagggaattatctggccaccggaagcctgggaccacaaaggctactgctgaatagaagtaaacagttcatccatgatctcacttaaccaccccaataaatctgattctttattttctcttcctgtcctgcacatatgcataagtacttttacaagttgtcccagtgttttgttagaataatgtagttaggtgagtgtaaataaatttatataaagtgagaattagagtttagctataattgtgtattctctcttaacacaacagaattctgctgtctagatcaggaatttctatctgttatatcgaccagaatgttgtgatttaaagagaactaatggaagtggattgaatacagcagtctcaactgggggcaattttgccccccagaggacattgggcaatgtttggagacattttggtcattatacttggggggttgggggatggtgggatgtgtgtgctactggcatccagtaaatagaagccaggggtgccgctaaacatcctataatgcacagggcagtaccccacaacgaaaaataatctggcccaaaatgtcagttgtactgagtttgagaaaccccagcctaatgaaaccctaggtgttgggctctggaatgggactttgtcccttctaattattatctctttccagcctcattcagctattcttactgacataccagtctttagctggtgctatggtctgttctttagttctagtttgtatcccctcaaaagccattatgttgaaatcctaatccccaaggtgatggcattaagaagtgggcctttgggaagtgattagatcaggagtgcagagccctcatgattaggattagtgcccttatttaaaaaggccccagagagctaactcacccttccaccatatgaggacgtggcaagaagatgacatgtatgagaaccaaaaaacagctgtcgccaaacaccgactctgtcgttgccttgatcttgaacttccagcctccagaactatgagaaataaaattctgttgtttgtaa

SEQ ID NO: 703 - DNA, 2362 bp, Homo sapiens
  source 1..2362: mol_type = genomic DNA
ggccagctggctatcagacaatgacatgctttgacaggcccctgagctctgtgagtaaattcttgaacagctgagagtgctaccattttgtcatagccctaagggtgcagatgatgctgaaagcgtgttggccaaatctgaatgatgaaagccaattacaaactagaaaatgaaaacagaccccagatgcaaggagatgagacagttaaatttacttcctcttttctaatctgagaggtttcatgttgaagaaaatcagtgttggggttgcaggagacctaaacacagtcaccatgaagctgggctgtgtcctcatggcctgggccctctacctttcccttggtgtgctctgggtggcccagatgctactggcagctggatgtcatgccgctgccagttttgagacgctgcagtgtgagggacctgtctgcactgaggagagcagctgccacacggaggatgacttgactgatgcaagggaagctggcttccaggtcaaggcctacactttcagtgaacccttccacctgattgtgtcctatgactggctgatcctccaaggtccagccaagccagtttttgaaggggacctgctggttctgcgctgccaggcctggcaagactggccactgactcaggtgaccttctaccgagatggctcagctctgggtccccccgggcctaacagggaattctccatcaccgtggtacaaaaggcagacagcgggcactaccactgcagtggcatcttccagagccctggtcctgggatcccagaaacagcatctgttgtggctatcacagtccaagaactgtttccagcgccaattctcagagctgtaccctcagctgaaccccaagcaggaagccccatgaccctgagttgtcagacaaagttgcccctgcagaggtcagctgcccgcctcctcttctccttctacaaggatggaaggatagtgcaaagcagggggctctcctcagaattccagatccccacagcttcagaagatcactccgggtcatactggtgtgaggcagccactgaggacaaccaagtttggaaacagagcccccagctagagatcagagtgcagggtgcttccagctctgctgcacctcccacattgaatccagctcctcagaaatcagctgctccaggaactgctcctgaggaggcccctgggcctctgcctccgccgccaaccccatcttctgaggatccaggcttttcttctcctctggggatgccagatcctcatctgtatcaccagatgggccttcttctcaaacacatgcaggatgtgagagtcctcctcggtcacctgctcatggagttgagggaattatctggccaccggaagcctgggaccacaaaggctactgctgaatagaagtaaacagttcatccatgatctcacttaaccaccccaataaatctgattctttattttctcttcctgtcctgcacatatgcataagtacttttacaagttgtcccagtgttttgttagaataatgtagttaggtgagtgtaaataaatttatataaagtgagaattagagtttagctataattgtgtattctctcttaacacaacagaattctgctgtctagatcaggaatttctatctgttatatcgaccagaatgttgtgatttaaagagaactaatggaagtggattgaatacagcagtctcaactgggggcaattttgccccccagaggacattgggcaatgtttggagacattttggtcattatacttggggggttgggggatggtgggatgtgtgtgctactggcatccagtaaatagaagccaggggtgccgctaaacatcctataatgcacagggcagtaccccacaacgaaaaataatctggcccaaaatgtcagttgtactgagtttgagaaaccccagcctaatgaaaccctaggtgttgggctctggaatgggactttgtcccttctaattattatctctttccagcctcattcagctattcttactgacataccagtctttagctggtgctatggtctgttctttagttctagtttgtatcccctcaaaagccattatgttgaaatcctaatccccaaggtgatggcattaagaagtgggcctttgggaagtgattagatcaggagtgcagagccctcatgattaggattagtgcccttatttaaaaaggccccagagagctaactcacccttccaccatatgaggacgtggcaagaagatgacatgtatgagaaccaaaaaacagctgtcgccaaacaccgactctgtcgttgccttgatcttgaacttccagcctccagaactatgagaaataaaattctgttgtttgtaagct

SEQ ID NO: 704 - DNA, 1012 bp, Homo sapiens
  source 1..1012: mol_type = genomic DNA
gccgggggcgcgcgctctgcgagctggatgtccaggctgcgggcgctgctgggcctcgggctgctggttgcgggctcgcgcgtgccgcggatcaaaagccagaccatcgcctgtcgctcgggacccacctggtggggaccgcagcggctgaactcgggtggccgctgggactcagaggtcatggcgagcacggtggtgaagtacctgagccaggaggaggcccaggccgtggaccaggagctatttaacgaataccagttcagcgtggaccaacttatggaactggccgggctgagctgtgctacagccatcgccaaggcatatccccccacgtccatgtccaggagcccccctactgtcctggtcatctgtggcccggggaataatggaggagatggtctggtctgtgctcgacacctcaaactctttggctacgagccaaccatctattaccccaaaaggcctaacaagcccctcttcactgcattggtgacccagtgtcagaaaatggacatccctttccttggggaaatgcccgcagagcccatgacgattgatgaactgtatgagctggtggtggatgccatctttggcttcagcttcaagggcgatgttcgggaaccgttccacagcatcctgagtgtcctgaagggactcactgtgcccattgccagcatcgacattccctcaggtgctgggatccagaaggtggggtgggggagattggggccctaccctcctgactcttgcccacaccaggtctaaaataattttagtctagaggggcagaacacagctttctggacccccatcagggctggggaacagtgttcagaagtcccctttacatgttggccccatgaagagaccacggcccaagggtacgtggagctcgttggacgagagttcctcaggtgggaactgaggggacttcccactcctctgggactagggtaaactaaggtgtagaaggggacgagacatctggcctcttcctgaacaccaccctctt

SEQ ID NO: 705 - DNA, 901 bp, Homo sapiens
  source 1..901: mol_type = genomic DNA
gccggggccgggccgggccgggggcgcgcgctctgcgagctggatgtccaggctgcgggcgctgctgggcctcgggctgctggttgcgggctcgcgcgtgccgcggatcaaaagccagaccatcgcctgtcgctcgggacccacctggtggggaccgcagcggctgaactcgggtggccgctgggactcagaggtcatggcgagcacggtggtgaagtacctgagccaggaggaggcccaggccgtggaccaggagctatttaacgaataccagttcagcgtggaccaacttatggaactggccgggctgagctgtgctacagccatcgccaaggcatatccccccacgtccatgtccaggagcccccctactgtcctggtcatctgtggcccggggaataatggaggagatggtctggtctgtgctcgacacctcaaactctttggctacgagccaaccatctattaccccaaaaggcctaacaagcccctcttcactgcattggtgacccagtgtcagaaaatggacatccctttccttggggaaatgcccgcagagcttcaagggcgatgttcgggaaccgttccacagcatcctgagtgtcctgaagggactcactgtgcccattgccagcatcgacattccctcaggatgggacgtggagaagggaaatgctggagggatccagccagacttgctcatatccctcacagcccccaaaaaatctgcaacccagtttaccggtcgctaccattacctggggggtcgttttgtgccacctgctctggagaagaagtaccagctgaacctgccaccctaccctgacaccgagtgtgtctatcgtctgcagtgagggaaggtgggtgggtattcttcccaataaagacttagagcccctct

SEQ ID NO: 706 - DNA, 1125 bp, Homo sapiens
  source 1..1125: mol_type = genomic DNA
gccggggccgggccgggccgggggcgcgcgctctgcgagctggatgtccaggctgcgggcgctgctgggcctcgggctgctggttgcgggctcgcgcgtgccgcggatcaaaagccagaccatcgcctgtcgctcgggacccacctggtggggaccgcagcggctgaactcgggtggccgctgggactcagaggtcatggcgagcacggtggtgaagtacctgagccaggaggaggcccaggccgtggaccaggagctatttaacgaataccagttcagcgtggaccaacttatggaactggccgggctgagctgtgctacagccatcgccaaggcatatccccccacgtccatgtccaggagcccccctactgtcctggtcatctgtggcccggggaataatggaggagatggtctggtctgtgctcgacacctcaaactctttggctacgagccaaccatctattaccccaaaaggcctaacaagcccctcttcactgcattggtgacccagtgtcagaaaatggacatccctttccttggggaaatgcccgcagagcccatgacgattgatgaactgtatgagctggtggtggatgccatctttggcttcagcttcaagggcgatgttcgggaaccgttccacagcatcctgagtgtcctgaagggactcactgtgcccattgccagcatcgacattccctcaggatgggacgtggagaagggaaatgctggagggatccagccagacttgctcatatccctcacagcccccaaaaaatctgcaacccagtttaccggtcgctaccattacctggggggtcgttttgtgccacctgctctggagaagaagtaccagctgaacctgccaccctaccctgacaccgagtgtgtctatcgtctgcagtgagggaaggtgggtgggtattcttcccaataaagacttagagcccctctcttccagaactgtggattcctgggagctcctctggcaataaaagtcagtgaatggtggaagtcagagaccaaccctggggattgggtgccatctctctaggggtaacacaaagggcaagaggttgctatggtatttggaaacaatgaaaatggactgttagatgccaa

SEQ ID NO: 707 - DNA, 1290 bp, Homo sapiens
  source 1..1290: mol_type = genomic DNA
gccatcacagcacgcctatcggatgtgagaggagaagtcccgctgctcgggcactgtctatatacgcctaacacctacatatattttaaaaacattaaatataattaacaatcaaaagaaagaggagaaaggaagggaagcattactgggttactatgcacttgcgactgatttcttggctttttatcattttgaactttatggaatacatcggcagccaaaacgcctcccggggaaggcgccagcgaagaatgcatcctaacgttagtcaaggctgccaaggaggctgtgcaacatgctcagattacaatggatgtttgtcatgtaagcccagactattttttgctctggaaagaattggcatgaagcagattggagtatgtctctcttcatgtccaagtggatattatggaactcgatatccagatataaataagtgtacaaaatgcaaagctgactgtgatacctgtttcaacaaaaatttctgcacaaaatgtaaaagtggattttacttacaccttggaaagtgccttgacaattgcccagaagggttggaagccaacaaccatactatggagtgtgtcagtattgtgcactgtgaggtcagtgaatggaatccttggagtccatgcacgaagaagggaaaaacatgtggcttcaaaagagggactgaaacacgggtccgagaaataatacagcatccttcagcaaagggtaacctgtgtcccccaacaaatgagacaagaaagtgtacagtgcaaaggaagaagtgtcagaagggagaacgaggaaaaaaaggaagggagaggaaaagaaaaaaacctaataaaggagaaagtaaagaagcaatacctgacagcaaaagtctggaatccagcaaagaaatcccagagcaacgagaaaacaaacagcagcagaagaagcgaaaagtccaagataaacagaaatcggggattgaagtcaccctagctgaaggcctcaccagtgtttcacagaggacacagcccaccccttgcaggaggaggtatctctgagtgtgcagcacagaatcgcatgacccaccttaaccttcctgttgtcatggaaggatgcacggctgctctgtccactgtgattcctagccctctcaagatcactgctttctgaagaatttgcaatgactctggcttctggctgcttatctctggacacccgttctccaccagttgtacagttcatgtaatctacttggcttaattgattttccacttctctcttcctcttctaagatataaacattttaaatgattt

SEQ ID NO: 708 - DNA, 3145 bp, Homo sapiens
  source 1..3145: mol_type = genomic DNA
gtagtgagccggctgagaggcatggagacgcaggaacttcggggggccctggctcttctcctcctttgctttttcacatctgccagtcaggatctgcaggtaattgacctgctgactgtgggcgagtctcggcagatggtagctgtggcagagaagatccggacagccttgctcactgctggggacatctacctcttatccaccttccgcctgccccccaagcagggtggtgtcctctttggcctctattctcgccaagacaacactcgatggctggaggcctctgttgtaggcaagatcaacaaagtactggtgcgataccagcgggaggatggcaaagtccacgccgtgaacctacagcaagcgggcctggctgatgggcgcacacacacagttctcctgcgactccgaggtccctccagacccagccctgccctacatctctacgtggactgcaaactgggtgaccaacatgcaggccttccagcactggcccccattcctccagcggaggtcgatgggctggagattaggactggacagaaggcgtatttgaggatgcagggctttgtggaatctatgaaaattattctgggtgggtccatggcccgggtaggagccctgagtgagtgtccattccaaggggacgagtccatccacagtgcagtgaccaatgcactgcactccattctaggggagcagaccaaggcgctggtcacccaactcaccctcttcaaccagatcctggtggagctgcgggatgatatacgagaccaggtgaaggaaatgtccctgatccgaaacaccattatggagtgtcaggtgtgcggcttccatgagcagcgttcccactgcagccccaatccctgcttccgaggtgtggactgcatggaagtgtacgagtacccaggctaccgctgtgggccctgcccccctggcctgcagggcaacggcacccactgcagtgacatcaatgagtgtgctcacgctgacccctgtttcccgggctccagctgcatcaacaccatgcccggcttccactgtgaggcctgtcctcgagggtacaagggcacacaggtgtctggtgtgggcattgactatgcccgggccagcaaacaggtctgcaatgacatcgatgaatgcaacgatggcaacaatggtggctgtgacccaaactccatctgcaccaacactgtgggctctttcaagtgtggtccctgccgcctgggtttcctgggcaaccagagccagggctgcctcccagcccggacctgccacagcccagcccacagcccctgccacatccatgctcactgtctctttgaacgcaatggtgcagtgtcctgccagtgtaacgtgggctgggctgggaatgggaacgtgtgtgggactgacacagacatcgatggctacccagaccaagcactgccctgcatggacaacaacaaacactgcaaacaggacaactgccttttgacacccaactctgggcaggaagatgctgataatgatggtgtgggggaccagtgtgatgatgatgctgatggggatgggatcaagaatgttgaggacaactgccggctgttccccaacaaagaccagcagaactcagatacagattcatttggtgatgcctgtgacaattgccccaacgttcccaacaatgaccagaaggacacagatggcaatggggaaggagatgcctgtgacaacgacgtggatggggatggcatccccaatggattggacaattgccctaaagtccccaacccactacagacagacagggatgaggacggggtgggagatgcttgcgacagctgccctgaaatgagcaatcctacccagacagatgcagacagcgacctggtgggggatgtctgtgatactaatgaagacagcgatggggatgggcatcaggacaccaaggacaactgcccacagctgccaaatagctcccagctggactctgataacgatggacttggagatgagtgtgatggggatgatgacaatgatggcatcccagattatgtgcctcctggtcccgataactgccgcctggtacccaatcccaatcagaaggactcagatggcaatggcgttggtgatgtgtgtgaggatgactttgacaatgatgctgtggtcgaccccctggatgtgtgtcctgaaagtgcagaggtaacgcttacggattttcgggcctatcagaccgtcgtcctggatcctgagggtgatgctcagattgacccaaactgggttgtgctcaaccagggcatggaaatcgttcagaccatgaacagtgaccctggcttggcagttggatacacggccttcaatggtgtggactttgaaggcaccttccatgtgaacacagtgactgatgatgactacgcaggctttctcttcagttatcaagacagtggccgcttctacgtagtcatgtggaagcagaccgagcagacctactggcaggctacacccttccgggcggttgcccagcccgggctgcagctcaaggcagtgacatcagtgtctggcccaggtgagcacctccgaaatgccctgtggcatactggccacacccctgatcaggtacgactgctgtggacagacccacgaaatgtgggctggcgggacaagacctcctatcgctggcagcttctgcaccggcctcaagttggctacattcgggtgaagctctatgagggaccccagcttgtggcggattctggggtgatcattgacacatccatgcgaggggggcgtcttggtgtattctgcttctcccaagaaaacataatttggtccaatctccagtatcgatgcaatgacacagtgcctgaggactttgagccattccggaggcagctgctccagggaagggtgtgaggaggaggccaccagattcagaattcagaattttagaccctttggccttggggtccatcctggagaccctgaggtctaagctacagcccctcagccaaccacagacccttctctggctcccaaaaggagttcagtcccagaggggtggtcaccccacccttcaggggatgagaagttttcaaggggtattactcaggcactaaccccaggaaagatgacagcacattgccataaagttttggttgttttctaa

SEQ ID NO: 709 - DNA, 2116 bp, Homo sapiens
  source 1..2116: mol_type = genomic DNA
cttgcatttctccaggtgctgtgaaaggagctggctcagagccttgccctctgtcttcccttctccccatcttttgttagggatcctgggctctcttctctctgggaagctagagcccgagtgctccattcccagggagggagtgccctctagggctagggagagtgaaggctggaggagaaggcgccagttggtgaagaagggcagggcctggaggccaagtctggaagggaaggagctgctggccaatcaggggcaagctgactgcaccctgacctgctgggctgggacagcacaggacccacagatatctgctgccatccacactctccagattggtgtcctgggaccacgtggggatgctgccgtggcttcttgtcttctctgctctgggtatccaggcctggggtgattcctcctggaacaaaacacaagctaaacaggtatcagaggggctccagtacctatttgagaacatctcccagctcactgaaaaagatgtctccaccacggtctctcgcaaggcatggggggcagaagctgttggctgcagtattcagctgaccacgccagtgaatgtccttgttatacaccatgtccctggactggagtgtcacgaccagacagtctgcagccagagactgcgggaactgcaggcccatcatgtccacaacaacagtgggtgtgatgtggcctacaacttcctggttggggatgatggcagggtgtatgaaggtgttggctggaatatccaaggagtgcacacccaaggctacaacaacatctccctgggctttgccttctttggcactaagaaaggccacagtcccagccctgctgccctgtcggccatggaaaacctaatcacctatgctgtccagaagggccacctgtcatccagttatgttcagccacttcttgggaaaggcgagaactgcctggcccctcggcagaagacaagcctgaagaaggcttgccccggcgttgtcccacggtctgtgtggggagccagggagacccactgtcccaggatgactctcccagcgaagtatggcatcattatccacactgccgggaggacctgcaacatttctgatgagtgccgcctgctggtccgggacatccagtctttctacatagacaggctcaagtcatgcgacattggttataacttcctggtgggccaggatggcgccatttatgaaggggtgggctggaatgtccaaggctcctccacccctggctacgatgacattgccctgggcattaccttcatgggcaccttcacaggtataccacccaatgctgcagcactagaggcagcccaagacctgatccagtgtgccatggtcaaagggtacctgactcccaactacctgctggtgggccacagtgatgtggcccgaaccttgtctcctgggcaggctttgtacaacatcatcagcacctggcctcatttcaaacactgagagaagccccaggtccttctgagactgctttccctcccctgtcaggtctctcctgtcctaaccatccagcttggctcaacaccttttgccctcctcccctgccacacagtcctgtgcctcctttttcaggttgggatgatcatgccctctcctgccaacatcctccaagggcctccaaacctcatagctggacattcacagccctctgagtctgagtccagatttcttctctccttaccttcctctcccttggaaacccaactcctcagccaggtgagacaatgggctggttcttgtttcatttctctctctctctccattcccctctgcctggtgagccttcccctggtgtctgcctggcagcccccacctcccacctatcacccctcacccataactcaggtcaacgtgaccaaccttccttgcttacacataaacttgtatatatttggatgtagcccttatttaatggctgtcattatttatagatatgtctatccttgctacttggttgtgagtttctccaggggaggaactgtgttttattcatctctatgtcctctgtttctcagcagtgtctgaaatttaatgggttctactgatgtttattagagaaatggatgaataaatgaatgaagagatccaaa

SEQ ID NO: 710 - DNA, 2642 bp, Homo sapiens
  source 1..2642: mol_type = genomic DNA
gggtaggtaaagaagaggcatggaggtgaatgcaggcagcagctttcagggaagaagaagcatcaggctgcagaccttgcctcctccctgccctgatggcaggactgaggcctcccagggatgaagaaactgaggctgaggcagttcaacaacttgcccaaggccacgcagcaggtaaacacagcaacaaaaaagttatgagaaccaagagctctgagaaggctgccaacgatgatcacagtgtccgtgtggcccgtgaagatgtcagagagagttgcccacctcttggtctggaaaccttaaaaatcacagacttccagctccatgcctccacggtgaagcgctatggcctgggggcacatcgagggagactcaacatccaggcgggcattaatgaaaatgatttttatgacggagcgtggtgcgcgggaagaaatgacctccagcagtggattgaagtggatgctcggcgcctgaccagattcactggtgtcatcactcaagggaggaactccctctggctgagtgactgggtgacatcctataaggtcatggtgagcaatgacagccacacgtgggtcactgttaagaatggatctggagacatgatatttgagggaaacagtgagaaggagatccctgttctcaatgagctacccgtccccatggtggcccgctacatccgcataaaccctcagtcctggtttgataatgggagcatctgcatgagaatggagatcctgggctgcccactgccagatcctaataattattatcaccgccggaacgagatgaccaccactgatgacctggattttaagcaccacaattataaggaaatgcgccagttgatgaaagttgtgaatgaaatgtgtcccaatatcaccagaatttacaacattggaaaaagccaccagggcctgaagctgtatgctgtggagatctcagatcaccctggggagcatgaagtcgggtctcattccgtctcccaggctggagtacagtggcacagtcttggctcattacaacctccaccttttgggctcaagcaatcctcccacctcagcctcctgagaagctgggattacaggtgagcccgagttccactacatcgcgggggcccacggcaatgaggtgctgggccgggagctgctgctgctgctggtgcagttcgtgtgtcaggagtacttggcccggaatgcgcgcatcgtccacctggtggaggagacgcggattcacgtcctcccctccctcaaccccgatggctacgagaaggcctacgaaggggtaatggccctggcccatctcacccaataggacatgggcagcgaggccccagctccagaggctcggagctgggaggctggtccctgggacgctggacccacgatggaattgacatcaacaacaactttcctgatttaaacacgctgctctgggaggcagaggatcgacagaatgtccccaggaaagttcccaatcactatattgcaatccctgagtggtttctgtcggaaaatgccacggtggctgccgagaccagagcagtcatagcctggatggaaaaaatcccttttgtgctgggcggcaacctgcagggcggcgagctggtggtggcgtacccctacgacctggtgcggtccccctggaagacgcaggaacacacccccacccccgacgaccacgtgttccgctggctggcctactcctatgcctccacacaccgcctcatgacagacgcccggaggagggtgtgccacacggaggacttccagaaggaggagggcactgtcaatggggcctcctggcacaccgtcgctggaagtctgaacgatttcagctaccttcatacaaactgcttcgaactgtccatctacgtgggctgtgataaatacccacatgagagccagctgcccgaggagtgggagaataaccgggaatctctgatcgtgttcatggagcaggttcatcgtggcattaaaggcttggtgagagattcacatggaaaaggaatcccaaacgccattatctccgtagaaggcattaaccatgacatccgaacaggcagagtttccctgcagaagctttctcttgcctgccgccgtgtgagatgtgcttttgctctttcttcatcttccaccatgattgtgaggcctccccagccatatggaactgtgcctcactctagtcctgaccctgttaccaccaaaatatccccactgaggaacttctagtgaatatatttcaagaagaagggaactaaccccaggaagaagactgaaagcttcatgaggataaactgagactcttcgctattgaaattctattgccaggcgcatcccccagcccacagtgaatggaattggattattctgaagcacaatcagtattccaagtacatggtttctgtaatgggataattggctgcccctggtcctagacaacacctgaagtttaatttctctgaaaggctctgccttgagcttgctttaaaacctgcaattataaggagacacctaatgagaccaggaggaaacttctacaccgcacagctatttttaaaaaatgggattaacaggagaaaatgtcaaacagggggatctccatgtttctgcaatgcatgacaggttacccagcgttcc

SEQ ID NO: 711 - DNA, 704 bp, Homo sapiens
  source 1..704: mol_type = genomic DNA
ggagaccatgcgcaggcgcggtgcactgtgcgcgggcaccacggcggtttttcgacgctggcggtggacgcaggcagcatggaccacggttgctgggcggatggggagcgtctatggtcagttgccttagaagtggtgagatgggaagctgcagttggaagaccctggaggatgcctgacaaggggatgtctgacacatgattggagctctttttgaaatgtttcttgcccttcctggagcagaggagccattatttatgcagtgattatgcctgtcatcgctggtggtatcctggcggccttgctcctgctgatagttgtcgtgctctgtctttacttcaaaatacacaacgcgctaaaagctgcaaaggaacctgaagctgtggctgtaaaaaatcacaacccagacaaggtgtggtgggccaagaacagccaggccaaaaccattgccacggagtcttgtcctgccctgcagtgctgtgaaggatatagaatgtgtgccagttttgattccctgccaccttgctgttgcgacataaatgagggcctctgagttaggaaaggtgggcacaaaaatcttcatgagcaatacttcttagtagattgttttgttattcaaatcaagttctagtgtttttatgtgagattatataatttacagtgttgttttatatacttttgaataaatgtacactattaaaaat

SEQ ID NO: 712 - DNA, 745 bp, Homo sapiens
  source 1..745: mol_type = genomic DNA
atgcgcaggcgcggtgcactgtgcgcgggcaccacggcggtttttcgacgctggcggtggacgcaggcagcatggaccacggttgctgggcggatggggagcgtctatggtcagttgccttagaagtggtgagatgggaagctgcagttggaagaccctggaggatgcctgacaaggggatgtctgacacatgattggagctctttttgaaatgtttcttgcccttcctggagcagaggagccattatttatgcaggtacatcgaagtcttttgacctccatacagtgattatgcctgtcatcgctggtggtatcctggcggccttgctcctgctgatagttgtcgtgctctgtctttacttcaaaatacacaacgcgctaaaagctgcaaaggaacctgaagctgtggctgtaaaaaatcacaacccagacaaggtgtggtgggccaagaacagccaggccaaaaccattgccacggagtcttgtcctgccctgcagtgctgtgaaggatatagaatgtgtgccagttttgattccctgccaccttgctgttgcgacataaatgagggcctctgagttaggaaaggtgggcacaaaaatcttcatgagcaatacttcttagtagattgttttgttattcaaatcaagttctagtgtttttatgtgagattatataatttacagtgttgttttatatacttttgaataaatgtacactattaaaaataatcctctttgctgccaa

SEQ ID NO: 713 - DNA, 2096 bp, Homo sapiens
  source 1..2096: mol_type = genomic DNA
ggcctcggttcaaacgacccggtgggtctacagcggaagggagggagcgaaggtaggaggcagggcttgcctcactggccaccctcccaaccccaagagcccagccccatggtccccgccgccggcgcgctgctgtgggtcctgctgctgaatctgggtccccgggcggcgggggcccaaggcctgacccagactccgaccgaaatgcagcgggtcagtttacgctttgggggccccatgacccgcagctaccggagcaccgcccggactggtcttccccggaagacaaggataatcctagaggacgagaatgatgccatggccgacgccgaccgcctggctggaccagcggctgccgagctcttggccgccacggtgtccaccggctttagccggtcgtccgccattaacgaggaggatgggtcttcagaagagggggttgtgattaatgccggaaaggatagcaccagcagagagcttcccagtgcgactcccaatacagcggggagttccagcacgaggtttatagccaatagtcaggagcctgaaatcaggctgacttcaagcctgccgcgctcccccgggaggtctactgaggacctgccaggctcgcaggccaccctgagccagtggtccacacctgggtctaccccgagccggtggccgtcaccctcacccacagccatgccatctcctgaggatctgcggctggtgctgatgccctggggcccgtggcactgccactgcaagtcgggcaccatgagccggagccggtctgggaagctgcacggcctttccgggcgccttcgagttggggcgctgagccagctccgcacggagcacaagccttgcacctatcaacaatgtccctgcaaccgacttcgggaagagtgccccctggacacaagtctctgtactgacaccaactgtgcctctcagagcaccaccagtaccaggaccaccactacccccttccccaccatccacctcagaagcagtcccagcctgccacccgccagcccctgcccagccctggctttttggaaacgggtcaggattggcctggaggatatttggaatagcctctcttcagtgttcacagagatgcaaccaatagacagaaaccagaggtaatggccacttcatccacatgaggagatgtcagtatctcaacctctcttgccctttcaatcctagcacccactagatatttttagtacagaaaaacaaaactggaaaacacattgtttggtcttgtgtttctttacagaggtacctgagggaggagagacataaatcccttcatccctaagactgaactatgtaactagcagcctctggcttgttttctactccctgtccctcaggataaaatgttgatattgctcattttcctcatttccaacattgttttaaaacaagtacttcttttacaggcttgaaaaatctcaaataaacgctaagaaaagggagtaggaagaacaaggagttgagcccttgaaagatgacagtggtcttcttgccttcatgcttggccctctctcctcaaaagggcaatgttggtacaaaattccatctcagccactttcgaggagttatcttcattagctatatccatcctttaatccaacacacacctgcaatgattactgtgcaactattttgcttaattttttatttgaaaaaatgtatttaaaagtccaacaactttttaatataaattacgactctcaaacccattcccatcactttattagtgatggtagcatacatattagagaaggtagctaaaggcaagagagcaccaaaggaaaaagactgtccaaagaacaggtattagaatgaggccgaagatcacggtgaccagagatttctaggagtctctaacctttccaccctatcctgttaaccctttagatctctagtataacactcaggctactgaggtattttagagcaacaagctgggttactttcagagcaaccagcttgactggaactgagagtaaattgggaatgtatgaccaatcttagaccctgaaaaatggcagaaaatacatggaaatttgaaaaaaaaaaaaaaaaaaaaaaaaaaa

SEQ ID NO: 714 - DNA, 418 bp, Homo sapiens
  source 1..418: mol_type = genomic DNA
tccttttttactttcacagcaatagtgcagaatccagaatggatgtcctctttgtagccatctttgctgtgccacttatcctgggacaagaatatgaggatgaagaaagactgggagaggatgaatattatcaggtggtctattattatacagtcacccccagttatgatgactttagtgcagatttcaccattgattactccatatttgagtcagaggacaggctgaacaggttggataaggacataacagaagcaatagagactaccattagtcttgaaacagcacgtgcagaccatccgaagcctgtaactgtgaaaccagtaacaacggaacctgtggaagaaggctgctatgactctttggatgggagtctggcaagaggaaattggaagataaaataaataataagtgaaat

SEQ ID NO: 715 - DNA, 600 bp, Homo sapiens
  source 1..600: mol_type = genomic DNA
aggagaagagttgctgcagctccttccctgctttggaggaggaggggaggcggggtaagtttggtgggaaactctgtaatttccttttttactttcacagcaatagtgcagaatccagaatggatgtcctctttgtagccatctttgctgtgccacttatcctgggacaagaatatgaggatgaagaaagactgggagaggatgaatattatcaggtggtctattattatacagtcacccccagttatgatgactttagtgcagatttcaccattgattactccatatttgagtcagaggacaggctgaacaggttggataaggacataacagaagcaatagagactaccattagtcttgaaacagcacgtgcagaccatccgaagcctgtaactgtgaaaccagtaacaacggaacctagtccagatctgaacgatgccgtgtccagtttgcgaagtcctattcccctcctcctgtcgtgtgcctttgttcaggtggggatgtatttcatgtagaaggtggaagaaggctgctatgactctttggatgggagtctggcaagaggaaattggaagataaaataaataataagtgaaataa

SEQ ID NO: 716 - DNA, 1251 bp, Homo sapiens
  source 1..1251: mol_type = genomic DNA
aaagctgcttgaaaagtggaagttagccttccggatggttagggagacatggaccaggtagggtaactgtctccaccaagagactcatctgtagaaaagtgaacgcactggaaaggggagaaatctaattaaagagtcttcagagcgatgacagccagagtgtgcgagcacggaagggcgaggtatccgttcctggatcctcccctaaggcacctgactcggcctgcctaggtcagcacagccccctcacgagtctcggccttgggccttctctgacgtcgctgggaggaatataggaggaatctgtgagatccttggaaggtggaaaccaactgcgggaaaggacaaatctcccagacccaacccctcacctccgcccaaacttcacctccgacttatcgtccccaattcaggctcccaggcttgccccagttcctccagccccttccgcacctctctcttcgacgctctcccgcgtctcccgggccctctactcaccctgcgaccaggatgataacgcgaagcgggtccccagccacagtgatcaagaaaagcgcgaaggccgggccgaacgcgacgaaagtgcagccgaaaaacaccgcagcccccatggctggtcagctccagacagacagaagaaagggattcttttcagtctagaaaaatgctcaccccttcctcagaacatttccactgtgacgaaaagagactgatgaagcctcagagagaaaggcaactctgggtggtgatgcaatagtgcagaatccagaatggatgtcctctttgtagccatctttgctgtgccacttatcctgggacaagaatatgaggatgaagaaagactgggagaggatgaatattatcaggtggtctattattatacagtcacccccagttatgatgactttagtgcagatttcaccattgattactccatatttgagtcagaggacaggctgaacaggttggataaggacataacagaagcaatagagactaccattagtcttgaaacagcacgtgcagaccatccgaagcctgtaactgtgaaaccagtaacaacggaacctagtccagatctgaacgatgccgtgtccagtttgcgaagtcctattcccctcctcctgtcgtgtgcctttgttcaggtggggatgtatttcatgtagaaggtggaagaaggctgctatgactctttggatgggagtctggcaagaggaaattggaagataaaataaataataagtgaaataa

SEQ ID NO: 717 - DNA, 931 bp, Homo sapiens
  source 1..931: mol_type = genomic DNA
agcggtcatgtccggcagaggaaagggcggaaaaggcttaggcaaagggggcgctaagcgccaccgcaaggtcttgagagacaacattcagggcatcaccaagcctgccattcggcgtctagctcggcgtggcggcgttaagcggatctctggcctcatttacgaggagacccgcggtgtgctgaaggtgttcctggagaatgtgattcgggacgcagtcacctacaccgagcacgccaagcgcaagaccgtcacagccatggatgtggtgtacgcgctcaagcgccaggggcgcaccctgtacggcttcggaggctaggccgccgctccagctttgcacgtttcgatcccaaaggccctttttagggccgaccacttgctcatctgaggagttggacacttgactgcgtaaagtgcaacagtaacgatgttggaaggcttatgattttactgtgtatgtatttgggagaagaaattctgtcagctcccaaaggataaaccagcagttgctttattggtcttcagatgtggctgcaaacacttgagactgaactaagcttaaaacacggtacttagcaatcgggttgccagcaaagcactggatgcaagccttgccttccagaagcttaccagtcgggttgccagcaaagcagtggatgcaagacttgccctccaggagcttaccatcacaacgaagaagacaaataaatgcataatatatagacgacataaatccatactgtacacatttaagaataaacagtccagtagtaagaggcagtacatattcaatctgctgagaaatgtagacaataactactataagaatcctaatgctacagaagtcactggctgctgggaaaccggggaaaacttggctatggacgtgggggcttgtgtcggactctgaataaagagcagaatgattggc

SEQ ID NO: 718 - DNA, 931 bp, Homo sapiens; identical to SEQ ID NO: 717
  source 1..931: mol_type = genomic DNA

SEQ ID NO: 719 - DNA, 2354 bp, Homo sapiens
  source 1..2354: mol_type = genomic DNA
ggtggaataacatgttcttttaaacgtagagtttaaacattgagttgcatcattgtgaggaaaaccacttagtattttatagtgaggtgactttacaagtaaagatcttcaagaagatttttatgtgatttaaaaaatcagcttagatgcttggaatttggattgttgcattcttgttctttggcacatcaagaggaaaagaagtttgctatgaaaggttagggtgtttcaaagatggtttaccatggaccaggactttctcaacagagttggtaggtttaccctggtctccagagaagataaacactcgtttcctgctctacactatacacaatcccaatgcctatcaggagatcagtgcggttaattcttcaactatccaagcctcatattttggaacagacaagatcacccgtatcaacatagctggatggaaaacagatggcaaatggcagagagacatgtgcaatgtgttgctacagctggaagatataaattgcattaatttagattggatcaacggttcacgggaatacatccatgctgtaaacaatctccgtgttgttggtgctgaggtggcttattttattgatgttctcatgaaaaaatttgaatattccccttctaaagtgcacttgattggccacagcttgggagcacacctggctggggaagctgggtcaaggataccaggccttggaagaataactgggttggacccagctgggccatttttccacaacactccaaaggaagtcaggctagacccctcggatgccaactttgttgacgttattcatacaaatgcagctcgcatcctctttgagcttggtgttggaaccattgatgcttgtggtcatcttgacttttacccaaatggagggaagcacatgccaggatgtgaagacttaattacacctttactgaaatttaacttcaatgcttacaaaaaagaaatggcttccttctttgactgtaaccatgcccgaagttatcaattttatgctgaaagcattcttaatcctgatgcatttattgcttatccttgtagatcctacacatcttttaaagcaggaaattgcttcttttgttccaaagaaggttgcccaacaatgggtcattttgctgatagatttcacttcaaaaatatgaagactaatggatcacattattttttaaacacagggtccctttccccatttgcccgttggaggcacaaattgtctgttaaactcagtggaagcgaagtcactcaaggaactgtctttcttcgtgtaggcggggcagttaggaaaactggggagtttgccattgtcagtggaaaacttgagccaggcatgacttacacaaaattaatcgatgcagatgttaacgttggaaacattacaagtgttcagttcatctggaaaaaacatttgtttgaagattctcagaataagttgggagcagaaatggtgataaatacatctgggaaatatggatataaatctaccttctgtagccaagacattatgggacctaatattctccagaacctgaaaccatgctaatctcagatacagtcttgatggatttctttagtaggagcaatgaagaaaagtgtctccttccacctggcatccagaccaaatttgacccttgtaaatgacttagtcatttacaagggtcttactcagagtcaagtacgggtttgctttttttctgtgtagaatgttcatctaactgcaccttaaaaacacactgaaccctgggacaaaagataattactatgatctgtaggaatctggatatcattgacaaaatagagctgttttggaattttcctgaataagaggaggtgatgcaaatgtatgttgagtgtataaactcactggacaaaagtaagcctctggcttgctgagtttttgaagtatattttcaggtataataatcattgttctaaaattatataaaactatttgttatgttgttaaatcttgctgagacaaattatgactatagtgcatgatatatagtagattataaccttgtgggttgatgtgtctatctagtaataataaaaactaatgagatggcactagtatttccaaggtgttccttggtgttcagggtgtgcacaagagagattttggagcttatctgttatgtgttcatcagttagcaatgggacctgaagttcaacaacccagggtatagcccccttcctccaaagtccctgccacaggagaattactcctctccctgggtcttgaatgctctatggtgaatttgtatttagcctcaaggcagcatttcatttgtaaagcacttgggtaaccctttgttcttgcaataacaatattataatatttaaa

SEQ ID NO: 720 - DNA, 1788 bp, Homo sapiens
  source 1..1788: mol_type = genomic DNA
ggaggtgggtaggagcttgcttatagaaaagtggaatcgagtagtccttgctggtggagccgctgccgccagggaactcagggccggctcctgttccttcaagagtgctggaggccaaacttgaaatacaagtttaatgttcctcgtcgggcaaaagataaggatccgatctcccccggcccggtgtgcagcaggagcgaccaaccccgacccgggttaaaactcccagggactcttcgctgctgccacctcttgttctctcccccgttcccactcggggtctccctcagggccgggaggcacagcggtccctgcttgctgaagggctggatgtacgcatccgcaggttcccgcggacttgggggcgcccgctgagccccggcgcccgcagaagacttgtgtttgcctcctgcagcctcaacccggagggcagcgagggcctaccaccatgatcactggtgtgttcagcatgcgcttgtggaccccagtgggcgtcctgacctcgctggcgtactgcctgcaccagcggcgggtggccctggccgagctgcaggaggccgatggccagtgtccggtcgaccgcagcctgctgaagttgaaaatggtgcaggtcgtgtttcgacacggggctcggagtcctctcaagccgctcccgctggaggagcaggtagagtggaacccccagctattagaggtcccaccccaaactcagtttgattacacagtcaccaatctagctggtggtccgaaaccatattctccttacgactctcaataccatgagaccaccctgaaggggggcatgtttgctgggcagctgaccaaggtgggcatgcagcaaatgtttgccttgggagagagactgaggaagaactatgtggaagacattccctttctttcaccaaccttcaacccacaggaggtctttattcgttccactaacatttttcggaatctggagtccacccgttgtttgctggctgggcttttccagtgtcagaaagaaggacccatcatcatccacactgatgaagcagattcagaagtcttgtatcccaactaccaaagctgctggagcctgaggcagagaaccagaggccggaggcagactgcctctttacagccaggaatctcagaggatttgaaaaaggtgaaggacaggatgggcattgacagtagtgataaagtggacttcttcatcctcctggacaacgtggctgccgagcaggcacacaacctcccaagctgccccatgctgaagagatttgcaaggatgatcgaacagagagctgtggacacatccttgtacatactgcccaaggaagacagggaaagtcttcagatggcagtaggcccattcctccacatcctagagagcaacctgctgaaagccgtggactctgccactgcccccgacaagatcagaaagctgtatctctatgcggctcatgatgtgaccttcataccgctcttaatgaccctggggatttttgaccacaaatggccaccgtttgctgttgacctgaccatggaactttaccagcacctggaatctaaggagtggtttgtgcagctctattaccacgggaaggagcaggtgccgagaggttgccctgatgggctctgcccgctggacatgttcttgaatgccatgtcagtttataccttaagcccagaaaaataccacgcactctgctctcaaactcaggtgatggaagttggaaatgaagagtaactgatttataaaagcaggatgtgttgattttaaaataaagtgcctttatacaa

SEQ ID NO: 721 - DNA, 5036 bp, Homo sapiens
  source 1..5036: mol_type = genomic DNA
acatgtgggttctttcaaacatactggacttcctccttaggttttagttgtgttagtcaatagttgaatgttgaaggagaggatgccaagggatattaaagaagttgtccagtgtacagaagcttactggaaggagtggccaactagttaaaggtttgacacctcaatatcaacaaaatgccaagtggatcattttgactctcacagcaatccaactggacatttgaccatgccccgtggtcagtggagagcttcttctctgaaggccacttttatctagcacatcaaggctatacacctctttcactaagaagaatttgacacttttatgttgtgagagctgagattcaccattctccaccatcctgagaagagctttgatagaagggctactcgtgagcattgcagtgtcgagatggctatgaaccctgtgtaaatgaaggaatgtgtgttacctaccacaatggcacaggatactgcaaatgtccagaaggcttcttgggggaatattgtcaacatcgagacccctgtgagaagaaccgctgccagaatggtgggacttgtgtggcccaggccatgctggggaaagccacgtgccgatgtgcctcagggtttacaggagaggactgccagtactcgacatctcatccatgctttgtgtctcgaccttgcctgaatggcggcacatgccatatgctcagccgggatacctatgagtgcacctgtcaagtcgggtttacaggtaaggagtgccaatggaccgatgcctgcctgtctcatccctgtgcaaatggaagtacctgtaccactgtggccaaccagttctcctgcaaatgcctcacaggcttcacagggcagaagtgtgagactgatgtcaatgagtgtgacattccaggacactgccagcatggtggcacctgcctcaacctgcctggttcctaccagtgccagtgccttcagggcttcacaggccagtactgtgacagcctgtatgtgccctgtgcaccctcgccttgtgtcaatggaggcacctgtcggcagactggtgacttcacttttgagtgcaactgccttccagaaacagtgagaagaggaacagagctctgggaaagagacagggaagtctggaatggaaaagaacacgatgagaattagacactggaaaatatgtatgtgtggttaataaagtgctttaaactgaattgacattaacagtgggtgatcaactttactatgtgcttgtgcttttgcttttgatggagtaattcattgttttcttatccacctaaatgcacccagctgcccttgattttctctgggctactggccttcacaaccctctcccatgtaccctctctgactttggggtaaccctcccctaacttaaagctagagaattctgaaactgaggaggggatcctctgttaatcagtgagcactttttgatgagctgatagatgatatatgagagactatgcgtggcacaatactttgttacactcttcactgatacaagtgttctagagtgtacacacaacccaaagatagaaataaaaagaggagcagtgtcggggagcttggggcctggtgttccatggagagggagaaaggaacaagcttgaccaattcattcaactccttataaaaatgatgaggaggctgaaaaccaagaattttgattgggaacagaatacaagcagctgaatcagatgaattactaagcaacaaagatcctgtttttatacaaatatccttagtacaaaaacaaaagaaggaaaactgtaggggggagtaatgtgctaagtaagcagaattgcctcaaaaagaagttgttctagttactctttcagagtgggaatcttagattctggtattgtggatatggttcacatataatgggattgtgtgttttattttggagggattaaaggtcatagtttggtcctcagtataaaatcaactggtaatttattcatttcatttggtaaaaatgtattgactgcctgctatgttctaggcaccatgctatgtatttggaatacagctatacaaagcattgtcacataattgaaatgaaaattttatattatttaagtcacaagaacaagctatttaattatattacttttagtttctcttttaataaagaatagataatgctatcattctagatactaaataagtattttcttaacataatattactatccactttatcttgtagaagaaataactaaaatacatctgtcttcactcctgtatttgtttgcattttaaggattaaagacagaaatagaaatgtaaacaactttattttgaaaatatttcaacactgcaaatatctctgggtctgatattctagtaatctaattggctagtaattgatgttagtgtgatttattgttgaaggctaaatgtgtttttcagtttcaagaaaattgcttttaataattgcctagaacaagaggttgatttggcagcaagatgttgacgggaagttagagaagtcaataaaggaagtttttagctgagagagagtgattattcactcccatagcctctgcattgttatccattagccacgataagaaccttagggaattctgagagtgtgtccaggaaaggatctgtcaaactagaatagtatctcctccttgagaaaggaaataaccaaggattccgcagctgagaggctgccagggctagtgaaatagagtaaggaaatcttggctgtctcttattctctggttgtagtttaacgcaagacacttatttactcactgatggtgtgtgtgtgtgtgggaggggagattagcatgaggggtgggaatggggagattcgatgaagagaaaactaacatttttttggtgactcaggaactgtgccaggtacttccatgcttattagctcaattacacaaaaatcttgggaccaggtattatttttcaagtcttcccacatgaagtaactgaagtttggagatgttaagtgattcacccaaagttgtacagctaatatgtggttaggctgggtcctgaaaccgaggcagtttattttcaaagcctttgctttgtgcatcttactgcgccacattgcactgcacatctgcttcctgaaagcactttgtaggtgtgtaaaacttttcgttaaatgctttaagctgtttgggttaaaaatatatgttcatgttataagaaaaccaagacactcctaattataatcaaatagtacttgttacatatcaatatgtgtgtgtgtgtgtgtgtgtgtgtgtgtgtgtgtgtgtgtgtgtgtatggcgttgtgcagatgtttaaaagtagttacatagactagttcttgcttttcagggtcccataatctaaaccagatgacttcagctttggataaatatatagaaggaaatttaaagagaattcaaaacaatagatgatgcagtgacactgtgaataaatgttatttatacagtttgtaagatttcatgctcattgttcatatgtcccaggtggagttcagaaaatattctcttcatttccacaaaggggaatagtgcctggagatggttttcttttaaaaagtccttttcataatgcagtgcccttccttccattgcccttcattccattgcttcccatgcttgtcaagagactaaaatgttacttatagtaatagtcactatctcaatgtaaatagcacccttatttgatgagaattattatttcagttctaaaaatggggaaacaaagtcagcaggaggcaaagtagcttgttaaagtattctgcaactttcaaatggttgcttccactgcatttcacgtcttggcacttctaattgagggttactctaaccaccctatttaaaattgtaactgtcccccacccccttaattactaaccctggtctactttttgttttctttttctgtaactcttatcttcttactatataatttatactatataatttacttcattatgtctattgttcattgtctgtcttttccaaattctactgcctcttaccctctccagaatgaaaactagtatctttgtttttgtttactgatgtaacccaaacacctacaaacagtgcccagtatatactaggcccacaaatatatattggctgactgactgtatggtttagtatcatgtcatagtattgagactgtaactttggtcttctcattttcttctttgtattgtgcgtcctagacttagtttggcctctccttttgtccttgtatactctaatactggataagaattttggagtctttttcaactctgagtcagtgaatgccacataacttagtgactatatttaaatggttaatttacaattttttccctgcaaaggatactgtagtcactgtgagtattttagtattattgtaggactcaagagggaattaaaactacaaaaatgactcctcttgtatgacacagaaagaaatgtttcttcacagagggaggagaaaaatatcttcaagagagaactaatagaatcaaatcaatgaaccatgtctcatctttttggataagtaactgttagtaatccagacacttcatgagctttcattatgtaaagtctttagcagaagctaaaggaggggcaccaaccacagtaattttaacttaagaacaaaatggagcatgaaaataaattattaaatcatttactcccactatttttgggttagggccaataatggggagagaaagaggtagactagttttgtgtttgtggctattttaatagagtagcacaagtaatcaaaaaacagtaggctgttttgaatttactggctgtcccttatgagttcacagttagattggactgtcctcaatgtactttcttttttttctttctttcccacatctctttatttctctgattttgtttaaacttcataaagagctctctgatctttcctttccaaacaatgaaggtttatcctttgtaaactacctctgtactccacaggctgatgatatgtgatatccctatatcattaaagtaaagcctaagcaca

SEQ ID NO: 722 - DNA, 2713 bp, Homo sapiens
  source 1..2713: mol_type = genomic DNA
atggtgacgaaggcctttgtcttgttggccatctttgcagaagcctctgcaaaatcgtgtgctccaaataaagcagatgtcattcttgtgttttgctatcccaaaaccatcatcaccaaaatccccgagtgtccctatggatgggaagttcatcagctggccctcggagggctgtgttacaatggggtccacgaaggaggttactaccaatttgtgatcccagatttatcacctaaaaacaagtcctattgtggaacccagtctgagtacaagccacctatctatcacttctacagtcacatcgtttccaatgacaccacagtgattgtaaaaaaccagcctgtcaactactccttctcctgcacctaccactccacctacttggtgaaccaggctgcctttgaccagagagtggccactgttcacgtgaagaacgggagcatgggcacatttgagagccaactgtctctcaacttctacactaatgccaagttctccatcaagaaagaagctccctttgtcctggaggcatccgaaatcggttcagatctgtttgcaggagtggaagccaaagggttaagcattaggtttaaagtggtcttgaacagctgttgggccaccccctcggctgacttcatgtatcccttgcagtggcagctgatcaacaagggctgccccacggatgaaaccgtcctcgtgcatgagaatgggagagatcacagggcaaccttccaattcaatgctttccggttccagaacatccccaaactctccaaggtgtggttacactgtgagacgttcatctgcgacagtgagaaactctcctgcccagtgacctgcgataaacggaagcgcctcctgcgagaccagaccgggggagtcctggtcgtggagctctccctgcggagcaggggattttccagtctctatagcttctcagatgttctccaccacctcatcatgatgttggggatttgtgccgtgttataggagttagccaggcagctgccgctcctccacccacaatagtcctcagcgaatgacaaacacatttattgtgctgccaaaaagaacaaacagaagaccacattgttggggggcagagaatagcactttgccaaatatgcactccaataatttctgtgaatttggtgatgcctttttctttctaagaaaaacttaggctacttcccgtggcccttagatctcacagtccttctacagctgggggaggagcctcctttctccatactcaagtcagggctgcagtaaattcctttgaaagctattttaactttaaaaggttagcagacccaaccaagtactgctgagcattttgaagagaatgtagggtgcaactacaaagtcaacactaaatgcacaacgcacattaatagctgactttgccaaaaaggagctttgtcattgaggcagtgtcattctacttaaggaccagagctgagcccccacgcagggagttccaatctttcaactgatgacatgggagatgatgtgggattcagagtggaatacaatagttttgctcaaacctaatgatataaaggaaatagattcttgaaagcccctagtactgacctaatttgtttttattataccatttgttaaatatataaacatgatataggtagaaactccttgtttttatagcagatgtatacttctaaagtcaaaagaaaattacaaattaaataggaatatttacaaaaagaataatcacaagaagaatacaactcacattaatttaacctaataacacggcattgccccagtgaaactgctgctggaaacatgactataaagtgactccaatgacacaagtgctgtgagtttggtgacccaatcctacagataaatgccttgtgacactcaatgctattttttctctatttgctctactaagaagttttcatttataagaaatggtctgatctcatttagcttttacttaaacatcgaagcttacatctgtttttgtctcattcacttacaatcattagaatgaagctaacacaaaatcagaaacacaaatgcaaatgcagccaatgaaagcatgcagtagcacatcttggtaactggccaccccagtgatccagaatatgcccatataaatgatttacattgtcaacaaaatacaaactgaatgaaccaattctggtagagaattggctggattgtgataggaaaaggcagagttctaagtccttagttatgtaaagacttaattagtaggcttataatttgaaaacaacacatgggtttgtctctctgtatttaaggtatttgagaagttttgcaatttgcagtttgatgattcttttacaacttgtgttagtgaactcagagattaaactagttatgaaatctccggatacatgaagtgtatgtttgtttagtaataggctaaagtaaaatgactcaatttggtctagacttggtctctaagctggagttccaacgagtttaggatctcttctttctgtaaattcagagtttttatagtcaggaaaaacagaagacatattttattggttctagtagaaaactcttaaatagcatactcatagccatgttcaaatcctttgctgtcagaataaaccaatgttgtattagttttgctgtatttcatcattgtgttttatgatcttgtatctctacctggcgctatggaataaataaaatgccttaaaataaa

SEQ ID NO: 723 - DNA, 1934 bp, Homo sapiens
  source 1..1934: mol_type = genomic DNA
aaagctaaccctcgggcttgaggggaagaggctgactgtacgttccttctactctggcaccactctccaggctgccatggggcccagcacccctctcctcatcttgttccttttgtcatggtcgggacccctccaaggacagcagcaccaccttgtggagtacatggaacgccgactagctgctttagaggttgagatccgtagcattttagtgtccgagaggataattgctaagggagcagagacctcttcacaccttcatgcgcttagacctgcctagaggctcagatggctcagtggcactgctcacagagaacacaggctggaggacatggagtcggggaacggctggcccagtgccaggaccagagtagtcggcatgctgctgagctgcgggacttcaagaacaagatgctgccactgctggaggtggcagagaaggagcgggaggcactcagaactgaggccgacaccatctccgggagagtggatcgtctggagcgggaggtagactatctggagacccagaacccagctctgccctgtgtagagtttgatgagaaggtgactggaggccctgggaccaaaggcaagggaagaaggaatgagaagtacgatatggtgacagactgtggctacacaatctctcaagtgagatcaatgaagattctgaagcgatttggtggcccagctggtctatggaccaaggatccactggggcaaacagagaagatctacgtgttagatgggacacagaatgacacagcctttgtcttcccaaggctgcgtgacttcacccttgccatggctgcccggaaagcttcccgagtccgggtgcccttcccctgggtaggcacagggcagctggtatatggtggctttctttattttgctcggaggcctcctggaagacctggtggaggtggtgagatggagaacactttgcagctaatcaaattccacctggcaaaccgaacagtggtggacagctcagtattcccagcagaggggctgatccccccctacggcttgacagcagacacctacatcgacctggcagctgatgaggaaggtctttgggctgtctatgccacccgggaggatgacaggcacttgtgtctggccaagttagatccacagacactggacacagagcagcagtgggacacaccatgtcccagagagaatgctgaggctgcctttgtcatctgtgggaccctctatgtcgtctataacacccgtcctgccagtcgggcccgcatccagtgctcctttgatgccagcggcaccctgacccctgaacgggcagcactcccttattttccccgcagatatggtgcccatgccagcctccgctataacccccgagaacgccagctctatgcctgggatgatggctaccagattgtctataagctggagatgaggaagaaagaggaggaggtttgaggagctagccttgttttttgcatctttctcactcccatacatttatattatatccccactaaatttcttgttcctcattcttcaaatgtgggccagttgtggctcaaatcctctatatttttagccaatggcaatcaaattctttcagctcctttgtttcatacggaactccagatcctgagtaatccttttagagcccgaagagtcaaaaccctcaatgttccctcctgctctcctgccccatgtcaacaaatttcaggctaaggatgccccagacccagggctctaaccttgtatgcgggcaggcccagggagcaggcagcagtgttcttcccctcagagtgacttggggagggagaaataggaggagacgtccagctctgtcctctcttcctcactcctcccttcagtgtcctgaggaacaggactttctccacattgttttgtattgcaacattttgcattaaaaggaaaatccactgctc

SEQ ID NO: 724 - DNA, 1282 bp, Homo sapiens
  source 1..1282: mol_type = genomic DNA
gtccctgccctggcacctgagaacagcttcagaattgggctgaacttcagtgcccagcccacccccttgccctctcccaggttctccttcaccccctgcagagccatcggctccctctatcctttgcaaccccctatgaatctttcctacttgtccaggtggagtgagtctgaggacagcagatgaacagacagaaactgaaagatccccaaaaaggatgagtgagagggtcgagcggaactggagcacgggcggctggctgctggcactgtgcctggcctggctgtggacccacctgaccttggctgccttgcagcctcccactgccacagtgcttgtgcagcagggcacctgcgaggtgattgcggctcaccgctgctgcaaccggaaccgcatcgaggagcgctcccagacggtgaaatgctcctgtttttctggccaggtggccggcaccacgcgggcaaagccctcctgcgtggacgacctgctcttggctgcccactgtgctcgtagagaccctagagctgcactccgcctcctgctcccacagcctccatcgtcctgcagagatggtggtgtcagatggagccctgcctgccgggggaggagtgtaaggtgctcccggacctgtcgggatggagctgcagcagtggacacaaagtcaaaaccaccaaggtcacacgatagctcttgggggtcacggcctggacaagaaaggcttgactgagccgtgaactgaagaatggtatccagtcatcagccaggaaagatggggattcacttacatgcctcatgtcaaatgcagcatcagtctttccggggcatttcagttaagctgctcagcagatatggatggatctgcaatcacatacctaatgtggagctgggcttttctggagacacgaaggtcaacacacaattcctgcccttaaggaatgtccagttgaattggagagttgatgacagacaatttagataatttaggttaaagtacttgataccagactgcggcttctgggccacatgctatggcatgatgggggtttgggaatgagattcccacagttcttcagataccctgtggccacagggcatagaaacaagaggtcacattcagcacccaccacctccctctttcgcatcagttctgaatccccagcaagctgttaacatgttgcaggaaaacactctccccttatgccagaccagcagtatctcatttggatgggattggattgacttgcggaaggaaagtaaaaataaagccaaataacttcccaaa

SEQ ID NO: 725 - DNA, 1521 bp, Homo sapiens
  source 1..1521: mol_type = genomic DNA
agagaaatctccggcccggcccgcatcgccagcccccaggcccggaggaacggcccgagcccaggagaaccacatcttcgtcccagccccggaggctcctgtgggcaagatcgtgagccaacgggttcctgaggcccctcctggccagtgcacttgccggcggtcccaacccagcaggagaagtggacatgaggttggcaggccctctccgcattgtggtcctagtcgtcagtgtgggtgtcacatggatcgtggtcagcatcctcctgggtgggcctggcagtggctttcctcgcatccagcaactcttcaccagtccagagagctcggtgactgcagcgccacgggccaggaagtacaagtgtggcctgccccagccgtgtcctgaggagcacctggccttccgcgtggtcagcggggccgccaacgtcattgggcccaagatctgcctcgaggacaagatgctgatgagcagcgtcaaggacaacgtgggccgcgggctgaacatcgccctggtgaacggggtcagcggcgagctcatcgaggcccgggcctttgacatgtgggccggagatgtcaacgacctgttgaagtttattcggccactgcacgaaggcaccctggtgttcgtggcatcctacgacgacccagccaccaagatgaatgaagagaccagaaagctcttcagtgagctgggcagcaggaacgccaaggagctggccttccgggacagctgggtgtttgtcggggccaagggtgtgcagaacaagagcccctttgagcagcacgtgaagaacagtaagcacagcaacaagtacgaaggctggcccgaggcgctggagatggaaggctgtatcccgcggagaagcacggccagctagcacggccagtgccaggaccgggccgagggaggccagaccaagggaggcacgcgcgctgccgggcggacagaggctgaggctcacaccccacacccgggcaggagcgctccctggccccaacacatcggggctccgaggcagtgaccagaacgtggtctcaaggtggtgggggctatgggggctgcagggggtagccctgccgcactttgtcacgggagcccagggtacccgcctccttttcgtaacactgttccccccggtcagcccatctagccctgtcctccattcctcacgccatctccatccccatcttgagtcctggaacggccctgggtgcctgcccctcactgtgcaactctgggagcagcccggcaggttggggcgtcttccagaacctctcccttctggagccactctgcactgcgggctaaacatgtttccagtgtgattccttccagtgagccaaacccggtggctgcttcatgagcctgactgcctctcgcctgctctcagcaggaagggacccctggagcaggctggcccggggtggtgaagtagctggagcccgatcacagtcccgcggtttgtcagggggcccaccttctagatgaccccttaataaagtgatggccccacagaa

SEQ ID NO: 726 - DNA, 3818 bp, Homo sapiens
  source 1..3818: mol_type = genomic DNA
gagcaggtgggggtgcagcgcggtggcgcgcgggagccccgaggggcggaggcggctgctacacctagggcgtcgcggagcgccccgggcttggcgcgggcggagccgccctaagggccgcgcgtgtccccggcctcggccccgccccgtcccgtccaatgagagcccgcggccgaaggggctgtccgcacactaggcccgcagctcccttcagcgccgcagaccccctgacaccgcacccggtcctcaggcagcgcgccccagaccccgggttcggcacgccgtcgtcggcttccggacatcgcaacttgcgcccctctcggggatcctcctcccgggctctggaccccaggtgatcctaggtccccagccgccggcgaacaccatggccccccaggggggtgaggtaggagcagcctgagtacccccagaaggtgccccgtccacgcccctccgggctgcgcggcgggagtcttcggggagctatgctgagaccgggtggtgcggaggaagctgcgcagctcccgcttcggcgcgccagcgccccggtccctgtgccgtcgcccgcggcccccgacggctcccgggcttcggcccgcctaggtcttgcctgccttctgctcctgctgctgctgacgctgccggcccgcgtagacacgtcctggtggtacattggggcactgggggcacgagtgatctgtgacaatatccctggtttggtgagccggcagcggcagctgtgccagcgttacccagacatcatgcgttcagtgggcgagggtgcccgagaatggatccgagagtgtcagcaccaattccgccaccaccgctggaactgtaccaccctggaccgggaccacaccgtctttggccgtgtcatgctcagaagtagccgagaggcagcttttgtatatgccatctcatcagcaggggtagtccacgctattactcgcgcctgtagccagggtgaactgagtgtgtgcagctgtgacccctacacccgtggccgacaccatgaccagcgtggggactttgactggggtggctgcagtgacaacatccactacggtgtccgttttgccaaggccttcgtggatgccaaggagaagaggcttaaggatgcccgggccctcatgaacttacataataaccgctgtggtcgcacggctgtgcggcggtttctgaagctggagtgtaagtgccatggcgtgagtggttcctgtactctgcgcacctgctggcgtgcactctcagatttccgccgcacaggtgattacctgcggcgacgctatgatggggctgtgcaggtgatggccacccaagatggtgccaacttcaccgcagcccgccaaggctatcgccgtgccacccggactgatcttgtctactttgacaactctccagattactgtgtcttggacaaggctgcaggttccctaggcactgcaggccgtgtctgcagcaagacatcaaaaggaacagacggttgtgaaatcatgtgctgtggccgagggtacgacacaactcgagtcacccgtgttacccagtgtgagtgcaaattccactggtgctgtgctgtacggtgcaaggaatgcagaaatactgtggacgtccatacttgcaaagcccccaagaaggcagagtggctggaccaaacctgaacacacagatacctcactcatccctccaattcaagcctctcaactcaaaagcacaagatccttgcatgcacaccttcctccaccctccaccctgggctgctaccgcttctatttaaggatgtagagagtaatccatagggaccatggtgtcctggctggttccttagccctgggaaggagttgtcaggggatataagaaactgagcaagctccctgatttcccgctctggagatttgaagggagagtagaagagatagggggtctttagagtgaaatgagttgcactaaagtacgtagttgaggctccttttttctttcctttgcaccagcttcccgatacttcttggtgtgcaagaggaagggtacctgtagagagcttctttttgtttctacctggccaaagttagatgggacaaagatgaatggcatgtcccttctctgaagtccgtttgagcagaactacctggtaccccgaaagaaaatcttaggctaccacattctattattgagagcctgagatgttagccatagtggacaaggttccattcacatgctcatatgtttataaactgtgttttgtagaagaaaaagaatcataacaatacaaacacacattcattctctctttttctctctaccattctcaacctgtattggacagcactgcctcttttgcttacttgctgcctgttcaaactgaggtggaatgcagtggttcccatgcttaacaaatcattaaaacaccctagaacactcctaggatagattaatgtagtaagtctggctaggccttgtgttgccttttttttttttttttttttcttttcttttcttctcttcccatgcactattctggaggtttgccaggtttggggagacatggagtaaaagaaagataggcaactcatggatggtgggagagcaggtaagcaggtctgatctcaagggcccacatgaggcatcagtatatattaggcaggtagggatctctggctttggtaattctttatgagaggatcctagcctttgaagctgggagcaggagtcagtggctacagtgggaaggagtactgcaggttggggccaaagtgatacacagcttagaaggcagccttcctccacttactcaacaaatctttatttagtgactctccaagtcctagtgattattattattgttcactccacatttggcttaatgggtaatgctattacccattgcctaactaggtttgcagtagtggaatctccagagatagcaggcttagtaagctggaggtaggacatgaagtcccccaaaacttgatgtcctatttttatgtgagttggacagtggttatcttttgcctgttgatatcttaaagcagcagagtggtatagaaatttgcggttatgacagacccgggttaaaaatcacagctgtgccatttgctttgatattttgagcaaggtagctaaattttctgagcttctattttctcatctgtaaaatgaggatacgtacctgttcttttttttctttctttttatttcttttagagatagggtctcgctttgttgcccaggctggagtgcactggcatgatcatggctcactgcagcctcaaattcccaggctcaagcaatcctcccacctcagcctccccattagctgggactacagggccatgccatcatgcccagctaatttaaacatagttttcagagatggagctcactatgttgcccaggctggtcttgaattcttggtctcaagcaatcctcccactgcagccttccaaagtgctgggcgtacaagcgcaagccactgtgcccagctgtcagacgctgagttttaattatgcaccaaactccagcccgcagatcctcttcaccaaagcccctggctggtctagcccatcatgacttctctaggaacagtccttctttaggactataaagtattaacaaaagtctgtagattaaggagcctgcataaagaattctggatacaggcccctgtctttccaaagttcctctccaatatcccttggggtcctcatgtttttgaagcagcttcactctgcacaggcagcaggaggttgggggagccatagctctgggccacgggggcagatttatttggatgataggactaatatttgtgtaacctgctg

SEQ ID NO: 727 - DNA, 1997 bp, Homo sapiens
  source 1..1997: mol_type = genomic DNA
aagcaatgtggttgtaaaatttgcaaaataagattaaatcttaactgcaatctgttaacactgctgtctcctttcactctttctcctatatcacactttcccacatgttggatggccttggagtggtagccataagcatttttggaattcaactaaaaactgaaggatccttgaggacggcagtacctggcatacctacacagtcagcgttcaacaagtgtttgcaaaggtacattggggcactgggggcacgagtgatctgtgacaatatccctggtttggtgagccggcagcggcagctgtgccagcgttacccagacatcatgcgttcagtgggcgagggtgcccgagaatggatccgagagtgtcagcaccaattccgccaccaccgctggaactgtaccaccctggaccgggaccacaccgtctttggccgtgtcatgctcagaagtagccgagaggcagcttttgtatatgccatctcatcagcaggggtagtccacgctattactcgcgcctgtagccagggtgaactgagtgtgtgcagctgtgacccctacacccgtggccgacaccatgaccagcgtggggactttgactggggtggctgcagtgacaacatccactacggtgtccgttttgccaaggccttcgtggatgccaaggagaagaggcttaaggatgcccgggccctcatgaacttacataataaccgctgtggtcgcacggctgtgcggcggtttctgaagctggagtgtaagtgccatggcgtgagtggttcctgtactctgcgcacctgctggcgtgcactctcagatttccgccgcacaggtgattacctgcggcgacgctatgatggggctgtgcaggtgatggccacccaagatggtgccaacttcaccgcagcccgccaaggctatcgccgtgccacccggactgatcttgtctactttgacaactctccagattactgtgtcttggacaaggctgcaggttccctaggcactgcaggccgtgtctgcagcaagacatcaaaaggaacagacggttgtgaaatcatgtgctgtggccgagggtacgacacaactcgagtcacccgtgttacccagtgtgagtgcaaattccactggtgctgtgctgtacggtgcaaggaatgcagaaatactgtggacgtccatacttgcaaagcccccaagaaggcagagtggctggaccaaacctgaacacacagatacctcactcatccctccaattcaagcctctcaactcaaaagcacaagatccttgcatgcacaccttcctccaccctccaccctgggctgctaccgcttctatttaaggatgtagagagtaatccatagggaccatggtgtcctggctggttccttagccctgggaaggagttgtcaggggatataagaaactgagcaagctccctgatttcccgctctggagatttgaagggagagtagaagagatagggggtctttagagtgaaatgagttgcactaaagtacgtagttgaggctccttttttctttcctttgcaccagcttcccgatacttcttggtgtgcaagaggaagggtacctgtagagagcttctttttgtttctacctggccaaagttagatgggacaaagatgaatggcatgtcccttctctgaagtccgtttgagcagaactacctggtaccccgaaagaaaatcttaggctaccacattctattattgagagcctgagatgttagccatagtggacaaggttccattcacatgctcatatgtttataaactgtgttttgtagaagaaaaagaatcataacaatacaaacacacattcattctctctttttctctctaccattctcaacctgtattggacagcactgcctcttttgcttacttgctgcctgttcaaactgaggtggaatgcagtggttcccatgcttaacaaatcattaaaacaccctagaacactcctaggatagattaatgt

SEQ ID NO: 728 - DNA, 2440 bp, Homo sapiens
  source 1..2440: mol_type = genomic DNA
tctcagtggcgagctctgggtgctgtggcccggccttggcggggcggcctccggctcaggctggctgagaggctcccagctgcagcgtccccgcccgcctcctcgggagctctgatctcagctgacagtgccctcggggaccaaacaagcctggcaggacaaaattagaagatcaaaatggaaaatatgctgctttggttgatatttttcacccctgggtggaccctcattgatggatctgaaatggaatgggattttatgtggcacttgagaaaggtaccccggattgtcagtgaaaggactttccatctcaccagccccgcatttgaggcagatgctaagatgatggtaaatacagtgtgtggcatcgaatgccagaaagaactcccaactcccagcctttctgaattggaggattatctttcctatgagactgtctttgagaatggcacccgaaccttaaccagggtgaaagttcaagatttggttcttgagccgactcaaaatatcaccacaaagggagtatctgttaggagaaagagacaggtgtatggcaccgacagcaggttcagcatcttggacaaaaggttcttaaccaatttccctttcagcacagctgtgaagctttccacgggctgtagtggcattctcatttcccctcagcatgttctaactgctgcccactgtgttcatgatggaaaggactatgtcaaagggagtaaaaagctaagggtagggttgttgaagatgaggaataaaagtggaggcaagaaacgtcgaggttctaagaggagcaggagagaagctagtggtggtgaccaaagagagggtaccagagagcatctgcgggagagagcgaagggtgggagaagaagaaaaaaatctggccggggtcagaggattgccgaagggaggccttcctttcagtggacccgggtcaagaatacccacattccgaagggctgggcacgaggaggcatgggggacgctaccttggactatgactatgctcttctggagctgaagcgtgctcacaaaaagaaatacatggaacttggaatcagcccaacgatcaagaaaatgcctggtggaatgatccacttctcaggatttgataacgatagggctgatcagttggtctatcggttttgcagtgtgtccgacgaatccaatgatctcctttaccaatactgcgatgctgagtcgggctccaccggttcgggggtctatctgcgtctgaaagatccagacaaaaagaattggaagcgcaaaatcattgcggtctactcagggcaccagtgggtggatgtccacggggttcagaaggactacaacgttgctgttcgcatcactcccctaaaatacgcccagatttgcctctggattcacgggaacgatgccaattgtgcttacggctaacagagacctgaaacagggcggtgtatcatctaaatcacagagaaaaccagctctgcttaccgtagtgagatcacttcataggttatgcctggacttgaactctgtcaatagcatttcaacatttttcaaaatcaggagattttcgtccatttaaaaaatgtataggtgcagatattgaaactaggtgggcacttcaatgccaagtatatactcttctttacatggtgatgagtttcatttgtagaaaaattttgttgccttcttaaaaattagacacactttaaaccttcaaacaggtattataaataacatgtgactccttaatggacttattctcagggtcctactctaagaagaatctaataggatgctggttgtgtattaaatgtgaaattgcatagataaaggtagatggtaaagcaattagtatcagaatagagacagaaagttacaacacagtttgtactactctgagatggatccattcagctcatgccctcaatgtttatattgtgttatctgttgggtctgggacatttagtttagtttttttgaagaattacaaatcagaagaaaaagcaagcattataaacaaaactaataactgttttactgctttaagaaataacaattacaatgtgtattatttaaaaatgggagaaatagtttgttctatgaaataaacctagtttagaaatagggaagctgagacattttaagatctcaagtttttatttaactaatactcaaaatatggacttttcatgtatgcatagggaagacacttcacaaattatgaatgatcatgtgttgaaagccacattattttatgctatacattctatgtatgaggtgctacatttttaggacaaagaattctgtaatctttttcaagaaagagtctttttctccttgacaaaatccagcttttgtatgaggactatagggtgaattctctgattagtaattttagatatgtcctttcctaaaaatgaataaaatttatgaatatgacttaaaa

SEQ ID NO: 729 - DNA, 1489 bp, Homo sapiens
  source 1..1489: mol_type = genomic DNA
cacaagtctgccaggggaagtccctggacttcttgcttctttcgtgtaggacaggctgtcgaaacctcagtggataaaagacctagagaatgtgtatcccagaagaagctggccaaggatatgggagcaaccaccatggaccagaagtctctctgggcaggatctgcctacaaactggtttgctactttaccaactggtcccaggaccggcaggaaccaggaaaattcacccctgagaatattgaccccttcctatgctctcatctcatctattcattcgccagcatcgaaaacaacaaggttatcatcaaggacaagagtgaagtgatgctctaccagaccatcaacagtctcaaaaccaagaatcccaaactgaaaattctcttgtccattggagggtacctgtttggttccaaagggttccaccctatggtggattcttctacatcacgcttggaattcattaactccataatcctgtttctgaggaaccataactttgatggactggatgtaagctggatctacccagatcagaaagaaaacactcatttcactgtgctgattcatgagttagcagaagcctttcagaaggacttcacaaaatccaccaaggaaaggcttctcttgactgcgggcgtatctgcagggaggcaaatgattgataacagctatcaagttgagaaactggcaaaagatctggatttcatcaacctcctgtcctttgacttccatgggtcttgggaaaagccccttatcactggccacaacagccctctgagcaaggggtggcaggacagagggccaagctcctactacaatgtggaatatgctgtggggtactggatacataagggaatgccatcagagaaggtggtcatgggcatccccacatatgggcactccttcacactggcctctgcagaaaccaccgtgggggcccctgcctctggccctggagctgctggacccatcacagagtcttcaggcttcctggcctattatgagatctgccagttcctgaaaggagccaagatcacgcggctccaggatcaacaggttccctacgcagtcaaggggaaccagtgggtgggctatgatgatgtgaagagtatggagaccaaggttcagttcttaaagaatttaaacctgggaggagccatgatctggtctattgacatggatgacttcactggcaaatcctgcaaccagggcccttaccctcttgtccaagcagtcaagagaagccttggctccctgtgaaggattaacttacagagaagcaggcaagatgaccttgctgcctggggcctgctctctcccaggaattctcatgtgggattccccttgccaggctggcctttggatctctcttccaagcctttcctgacttcctcttagatcatagattggacctggttttgttttcctgcagctgttgacttgttgccctgaagtacaataaaaaaaattcattttgctccagtaa

SEQ ID NO: 730 - DNA, 1468 bp, Homo sapiens
  source 1..1468: mol_type = genomic DNA
gacaggctgtcgaaacctcagtggataaaagacctagagaatgtgtatcccagaagaagctggccaaggatatgggagcaaccaccatggaccagaagtctctctgggcaggtgtagtggtcttgctgcttctccagggaggatctgcctacaaactggtttgctactttaccaactggtcccaggaccggcaggaaccaggaaaattcacccctgagaatattgaccccttcctatgctctcatctcatctattcattcgccagcatcgaaaacaacaaggttatcatcaaggacaagagtgaagtgatgctctaccagaccatcaacagtctcaaaaccaagaatcccaaactgaaaattctcttgtccattggagggtacctgtttggttccaaagggttccaccctatggtggattcttctacatcacgcttggaattcattaactccataatcctgtttctgaggaaccataactttgatggactggatgtaagctggatctacccagatcagaaagaaaacactcatttcactgtgctgattcatgagttagcagaagcctttcagaaggacttcacaaaatccaccaaggaaaggcttctcttgactgcgggcgtatctgcagggaggcaaatgattgataacagctatcaagttgagaaactggcaaaagatctggatttcatcaacctcctgtcctttgacttccatgggtcttgggaaaagccccttatcactggccacaacagccctctgagcaaggggtggcaggacagagggccaagctcctactacaatgtggaatatgctgtggggtactggatacataagggaatgccatcagagaaggtggtcatgggcatccccacatatgggcactccttcacactggcctctgcagaaaccaccgtgggggcccctgcctctggccctggagctgctggacccatcacagagtcttcaggcttcctggcctattatgagatctgccagttcctgaaaggagccaagatcacgcggctccaggatcaacaggttccctacgcagtcaaggggaaccagtgggtgggctatgatgatgtgaagagtatggagaccaaggttcagttcttaaagaatttaaacctgggaggagccatgatctggtctattgacatggatgacttcactggcaaatcctgcaaccagggcccttaccctcttgtccaagcagtcaagagaagccttggctccctgtgaaggattaacttacagagaagcaggcaagatgaccttgctgcctggggcctgctctctcccaggaattctcatgtgggattccccttgccaggctggcctttggatctctcttccaagcctttcctgacttcctcttagatcatagattggacctggttttgttttcctgcagctgttgacttgttgccctgaagtacaataaaaaaaattcattttgctccagt

SEQ ID NO: 731 - DNA, 3332 bp, Homo sapiens
  source 1..3332: mol_type = genomic DNA
tgctttgaaaccaaggttacagtagctttttggcccgcttgccgtggctttctccaactctcttcttcttttcagtctttgcaatacctgtccctgccggtctccaagtgcccctggttacaggtcagctccacactgaaggggaggagctacttcctagggtctcttcccagcatcacagccctacatcccagcgaccaacggtgttatactcctgggggccaaagaggacccggattgctttgttttgtgccatgtgagtactatgtccaacaggatggctggtggacgagagacatgtttgcctttgattggattcattcttatctgtcttaaaatggttgcttcagcaaaatcagctcctgaaatacccactattgatcaggcatattcaaaactcagcaacagtatcactgtagaatgggctacagtgccgggtgccaccagttacctcctcacggctgaagacggggacacagtcattgaaaccacggtggccaattccccaggcactgtgacgggactaaaggctgcaacctggtatgaaatcaccatcagatccatcagcgctgctgggagaagccaggcgtcacctccaaagcaggcaaagacagtgttggctgcaccaattctagaagtaagctctccaagttcagactccattcttgtgcagtgggaagctgtatatatggcaattgcattctccgtgtccattatgcgagccaatggcttggggagtatatggaaagagaatactacaaacacctccttgacattcaccagtttagaagccggaactctctacaccataaaggcctatgcatggaatgccaacagaatccctggggatgactccacctgcaatcagagaacaagtcctcgggcccctgccaacattcaagtctctttcgatagtggagctctgaaggcatctttttcctgggcacgggcagaaggagctttcaattatactgtgatggctttgagcgactcttcagagctgacctgcagtacaactttcagttcctgcaccatctcttccctccagtgtggaactgaatacttgatttcagttttagcaagtaatgatgctggatctagcaaatcatcttcagcaatgaccctgaaaactgttgcttgtgcacccggaagagtgacgatccaagaagatccccctggccacctgtctgtggcttggtccagtgtagatctgggtgactactatgtggtctttgtgaagagtgatgatggcttggaagtacactgcaacacatctctcactcagtgcaacttcttatctgagtgtggcttcacttattttattagtgtttttgtctataacaaggcagggcaaagtcctttgggtgacatattcaattataccacagctccctgttgtcctagtgacattaaccccgtgttggtgtccagtgacagagttgagattgtctggtctcctgtccgtggtgccgaactgtatgaaaccaaggctgtagatgggtacaacatggttgagtgcaatgacactactcctgcgtgcaccctttcggctctagagtgtgacaccaagtacaacatcacagtgtattcattcaatgaagtccgaggcagcaatatgtcatgtactccccagttcataaccacagctccttgcagtcctgaaataaaaaatgtttcaagggatgcattctccatgattaatgtgcactggcgatccactaatgatgatgctacttacacggtgactgcccaaggggagaaaggactgtatcagtgcagcagcacaggagagtcctgcaccatgcggggcttgccctgtggctcagtgttctctgtcactgctgtggccgaaacacaggcaggacggagcctgcccagctacagtgtgcccctggaaacagtgccatgctgtccaaccggtctgacagtaactcaaatcacccagtcagtaatcaacgtgagctggactattgggagagtggctcaaacccatgttgcagttctggagtcacacactggacagtctaagtgtcacactcatcaaaaccactgcctcctaggatgcatcacatgtggcatcaattacacagtgacattaaaagcaattagtgccaccgggttgactgcagattgctcctaccaaagttatttctctggtgcctgctgccctttgggggtgaaattatataggctgggccctaatggcatccggatctactggcaagcctccaggggctctgccaattacagcactgacctctatggctccaaaggcattttcacgtgcaccccgagtgctggcctcagtttctgtgatgtcactgagataccctgtggggatgtatacactgtgatggtctcaccagttgctaaaacaggattgaagcttactttctgtccaaaaaaaatatattcagtaacttgctctggaagtacacttggaatggtgatttatagagggaagagaaatgaagaatgacaaagtgagccccagataaaaacaaaaacttgaccaaagttgtctcatttgttagtgattagagatggaaaagatctactagaatgtagaataaaaatgcctctaggataggaaaagctcctttggcctttagaagaacaactctgactctgcttcctgagggcaaggtcaggtgtgtcctcacctgcacagcagttggagatctgctatgtgaggactctggagagaaatgaatccagaaagtcccctggacggctgctagcctgagttggcacactgtgagaaccctggaaacaagaaagttctgcttagcagaaattctgagatttcacatccacacacaccacagacttcaacacatccacttcatgagtgttttacaacagcacttgtctgcagccccctcaggggctggaaatgttcactcccagaaagtcaagccacccacatgcagacagcacttatcccaagacaaacctccagcaggacttcagtataggttggaaagcagtagctgccagggcaacctgagataacaaacgccctcatcgcaagttaggagcaaagctgagctgcttgcagggttcgctgagccaaagcatcaggtggcgtgacatctatgggagcatctgggaaagcagagctgccagcctgttgctagaagggttgcagttatgctttctgcatgagagaagatgtcaaatggagagcctcaaactgtggccgactgacatgcgtgcatcttttgggggaggaccatccatcttattggccatatcccccactcatattgtaattacttttttcatctttggagggggaaggcaatgaaatataacataaatctctcata

SEQ ID NO: 732 - DNA, 923 bp, Homo sapiens
  source 1..923: mol_type = genomic DNA
ctgctgcctagtgttccctctcctgctccaggacctccgggtagacctcagaccccgggcccattcccagactcagcctcagcccggacttccccagccccgacagcacagtaggccgccagggggcgccgtgtgagcgccctatcccggccacccggcgccccctcccacggcccgggcgggagcggggcgccgggggccatgcggggccagggccgcaaggagagtttgtccgattcccgagacctggacggctcctacgaccagctcacggacagcgtggacgatgaatttgaattgtccaccgtgtgtcaccggcctgagggtctggagcagctgcaggagcaaaccaaattcacgcgcaaggagttgcaggtcctgtaccggggcttcaagaacgaatgtcccagcggaattgtcaatgaggagaacttcaagcagatttactcccagttctttcctcaaggagactccagcacctatgccacttttctcttcaatgcctttgacaccaaccatgatggctcggtcagttttgaggaaatgcttgacatcatgaagtccatctatgacatgatgggcaagtacacgtaccctgcactccgggaggaggccccaagggaacacgtggagagcttcttccagaagatggacagaaacaaggatggtgtggtgaccattgaggaattcattgagtcttgtcaaaaggatgagaacatcatgaggtccatgcagctctttgacaatgtcatctagcccccaggagagggggtcagtgtttcctggggggaccatgctctaaccctagtccaggcggacctcacccttctcttcccaggtctatcctcatcctacgcctccctgggggctggagggatccaagagcttggggattcagtagtccagatctctggagctgaagg

SEQ ID NO: 733 - DNA, 2351 bp, Homo sapiens
  source 1..2351: mol_type = genomic DNA
ggctctgcgctcacctgctgcctagtgttccctctcctgctccaggacctccgggtagacctcagaccccgggcccattcccagactcagcctcagcccggacttccccagccccgacagcacagtaggccgccagggggcgccgtgtgagcgccctatcccggccacccggcgccccctcccacggcccgggcgggagcggggcgccgggggccatgcggggccagggccgcaaggagagtttgtccgattcccgagacctggacggctcctacgaccagctcacgggccaccctccagggcccactaaaaaagcgctgaagcagcgattcctcaagctgctgccgtgctgcgggccccaagccctgccctcagtcagtgaaagcaacgtggacgatgaatttgaattgtccaccgtgtgtcaccggcctgagggtctggagcagctgcaggagcaaaccaaattcacgcgcaaggagttgcaggtcctgtaccggggcttcaagaacgaatgtcccagcggaattgtcaatgaggagaacttcaagcagatttactcccagttctttcctcaaggagactccagcacctatgccacttttctcttcaatgcctttgacaccaaccatgatggctcggtcagttttgaggactttgtggctggtttgtccgtgattcttcggggaactgtagatgacaggcttaattgggccttcaacctgtatgaccttaacaaggacggctgcatcaccaaggaggaaatgcttgacatcatgaagtccatctatgacatgatgggcaagtacacgtaccctgcactccgggaggaggccccaagggaacacgtggagagcttcttccagaagatggacagaaacaaggatggtgtggtgaccattgaggaattcattgagtcttgtcaaaaggatgagaacatcatgaggtccatgcagctctttgacaatgtcatctagcccccaggagagggggtcagtgtttcctggggggaccatgctctaaccctagtccaggcggacctcacccttctcttcccaggtctatcctcatcctacgcctccctgggggctggagggatccaagagcttggggattcagtagtccagatctctggagctgaaggggccagagagtgggcagagtgcatctcggggggtgttcccaactcccaccagctctcacccccttcctgcctgacacccagtgttgagagtgcccctcctgtaggaattgagcggttccccacctcctacccctactctagaaacacactagacagatgtctcctgctatggtgcttcccccatccctgacctcataaacatttcccctaagactcccctctcagagagaatgctccattcttggcactggctggcttctcagaccagccattgagagccctgtgggagggggacaagaatgtatagggagaaatcttgggcctgagtcaatggataggtcctaggaggtggctggggttgagaatagaagggcctggacagattatgattgctcaggcataccaggttatagctccaagttccacaggtctgctaccacaggccatcaaaatataagtttccaggctttgcagaagaccttgtctccttagaaatgccccagaaattttccacaccctcctcggtatccatggagagcctggggccagatatctggctcatctctggcattgcttcctctccttccttcctgcatgtgttggtggtggttgtggtgggggaatgtggatgggggatgtcctggctgatgcctgccaaaatttcatcccaccctccttgcttatcgtccctgttttgagggctatgacttgagtttttgtttcccatgttctctatagacttgggaccttcctgaacttggggcctatcactccccacagtggatgccttagaagggagagggaaggagggaggcaggcatagcatctgaacccagtgtgggggcattcactagaatcttcaatcaacctgggctctccccaccccaccccagataacctcctcagttccctagggtctcttcttgcttgactcaatctacccagagatgccccttagcacacctagagggcagggaccataggacccaggttccaaccccattgtcagcaccccagccatgcggccaccccttagcacacctgctcgtcccatttagcttaccctcccagttggccagaatctgaggggagagcccccagagagcccccttccccatcagaagactgttgactgctttgcattttgggctcttctatatattttgtaaagtaagaaatataccagatctaataaaacacaatggctatg

SEQ ID NO: 734 - DNA, 3255 bp, Homo sapiens
  source 1..3255: mol_type = genomic DNA
tcctagctctgagaatgcctgcggaatgatcgccccccagggcggctgccgccgctgccgctgctgctgttattgctactgctgctgccgccgcctctgcttccactcggctctgactggcaggcagaaagtgcaactgacgagggaaaggtctctgcagtgagtggagagcctacataaaagagagtaaagaggggcaaaaacccagatcagaatgcaggcgacgtccaaccttctcaacctcctgctgctgtctttgtttgccggattagatccttccaagactcagattagtcctaaagaagggtggcaggtgtacagctcagctcaggatcctgatgggcggtgcatttgcacagttgttgctccagaacaaaacctgtgttcccgggatgccaaaagcaggcaacttcgccaactactggaaaaggttcagaacatgtcccagtctattgaagtcttaaacttgagaactcagagagatttccaatatgttttaaaaatggaaacccaaatgaaagggctgaaggcaaaatttcggcagattgaagatgatcgaaagacacttatgaccaagcattttcaggagttgaaagagaaaatggacgagctcctgcctttgatccccgtgctggaacagtacaaaacagatgctaagttaatcacccagttcaaggaggaaataaggaatctgtctgctgtcctcactggtattcaggaggaaattggtgcctatgactacgaggaactacaccaaagagtgctgagcttggaaacaagacttcgtgactgcatgaaaaagctaacatgtggcaaactgatgaaaatcacaggcccagttacagtcaagacatctggaacccgatttggtgcttggatgacagaccctttagcatctgagaaaaacaacagagtctggtacatggacagttatactaacaataaaattgttcgtgaatacaaatcaattgcagactttgtcagtggggctgaatcaaggacatacaaccttcctttcaagtgggcaggaactaaccatgttgtctacaatggctcactctattttaacaagtatcagagtaatatcatcatcaaatacagctttgatatggggagagtgcttgcccaacgaagcctggagtatgctggttttcataatgtttacccctacacatggggtggattctctgacatcgacctaatggctgatgaaatcgggctgtgggctgtgtatgcaactaaccagaatgcaggcaatattgtcatcagccaacttaaccaagataccttggaggtgatgaagagctggagcactggctaccccaagagaagtgcaggggaatctttcatgatctgtgggacactgtatgtcaccaactcccacttaactggagccaaggtgtattattcctattccaccaaaacctccacatatgagtacacagacattcccttccataaccaatactttcacatatccatgcttgactacaatgcaagagatcgagctctctatgcctggaacaatggccaccaggtgctgttcaatgtcacccttttccatatcatcaagacagaggatgacacataggcaaatgtgacatgttttcattgatttaaacagtgtgatttgtgataaactctataagaccccttccgtttttttcttcactattatttttcatcatttctccaaagcaaagcatttttattgtaaagttggtgtttcaaaaacatagctgagcttgtctaacttaccatgttggaaacacatcttaacttctaaatttacaaggcctatcatgtccttgtcatgaaaagcactaaaaaaaaaaagagtttaagtggctaaagtcatagttttgcaagagattaatgatctgccttatattagagtcagagactaatggtggcttaaatgcacgaatgtctttttttttaaaactgtcattttttactgtcttttgctccatatcaggaaatattttggtaggaattaggagaacaaaaagcacttttatcccatttatttctttaaaaaatgtaaggatttcatttatattgaaaaataatattaatcattttgctgttaacacaattctctgatgcggtgctgtacagtcatttttaaatctcttgctaacattttattggcagtatgtatttctaccattgtaaccaccattgtgctattgtatctcttcacttctgtgaaagtaatattttttataaaatacactgaaatttaacctcagtaattgagtccattttcaagtgtggtcaagaataatcttcttggcttacccctttacataagcattataaactaaaatgaaaaccaaaccagacacctgacatagagtctttattttaccccaagttttttgggccactgacattgaatgcaacaactgatttcatacaactgagttactctgttcactccactgaatgcaacccatatagtttcttgcacaaggtgcatctggattccaaatattggatttgagttgactctactcatttattatacactaaagaaattttgttcttcatagttaaatgtactagcatttaatttatattttacatacaacttgcaataatgaaattccttatgtcaggaccctgaaaataagcacatttgaaaactcttagaaaaaaaaaattctgtaatgtcctctagatttagattatgagccctgaggagttattggcaagatttgtgcaaaataaaatatggggagacttgggagttgtctttgtggtttcaaaagtgtaaataaccaattcagaaaacaaaatggaaaaacgaccccttgttaccttgattcactgtatgtggaaaaataatgtaaccaaaagggaagagctttaataatacttatgttaataactctatgaaacatataagctaactatatatcaaacatttcattgagtttggatgtattttccacatattaaaaaaatagttccctaaggcagctttatggaaactaatataggttggttttacaatttaaaaagtatattctataataaataataaaacaaattgttttaaatgtttagtttcacacatacatagtaccatgattttctttgaaagataaggatgtaatgatttagataaagcatcatgtaaagaaatcctaacatttaagtgtaattcatttcaaatgtcacaagtaaagcatcatcctcaaatatctcactgtcaaaattgtagaattaaataacccaatcttgaaa

SEQ ID NO: 735 - DNA, 1913 bp, Homo sapiens
  source 1..1913: mol_type = genomic DNA
ggctgggggaaatgacccgggagggtcccatgcggctacataaaattggcagccttagaactagtgggaaggcgggtgcgcgaagtcgaggggcggagagagggggccggaggagctgctttctgaatccaagttcgtgggctctctcagaagtcctcaggacggagcagaggtggccggcgggcccggctgactgcgcctctgctttctttccataaccttttctttcggactcgaatcacggctgctgcgaagggtctagttccggacactagggtgcccgaacgcgctgatgccccgagtgctcgcagggcttcccgctaaccatgctgccgccgccgcggcccgcagctgccttggcgctgcctgtgctcctgctactgctggtggtgctgacgccgcccccgaccggcgcaaggccatccccaggcccagattacctgcggcgcggctggatgcggctgctagcggagggcgagggctgcgctccctgccggccagaagagtgcgccgcgccgcggggctgcctggcgggcagggtgcgcgacgcgtgcggctgctgctgggaatgcgccaacctcgagggccagctctgcgacctggaccccagtgctcacttctacgggcactgcggcgagcagcttgagtgccggctggacacaggcggcgacctgagccgcggagaggtgccggaacctctgtgtgcctgtcgttcgcagagtccgctctgcgggtccgacggtcacacctactcccagatctgccgcctgcaggaggcggcccgcgctcggcccgatgccaacctcactgtggcacacccggggccctgcgaatcggggccccagatcgtgtcacatccatatgacacttggaatgtgacagggcaggatgtgatctttggctgtgaagtgtttgcctaccccatggcctccatcgagtggaggaaggatggcttggacatccagctgccaggggatgacccccacatctctgtgcagtttaggggtggaccccagaggtttgaggtgactggctggctgcagatccaggctgtgcgtcccagtgatgagggcacttaccgctgccttggccgcaatgccctgggtcaagtggaggcccctgctagcttgacagtgctcacacctgaccagctgaactctacaggcatcccccagctgcgatcactaaacctggttcctgaggaggaggctgagagtgaagagaatgacgattactactaggtccagagctctggcccatgggggtgggtgagcggctatagtgttcatccctgctcttgaaaagacctggaaaggggagcagggtcccttcatcgactgctttcatgctgtcagtagggatgatcatgggaggcctatttgactccaaggtagcagtgtggtaggatagagacaaaagctggaggagggtagggagagaagctgagaccaggaccggtggggtacaaaggggcccatgcaggagatgccctggccagtaggacctccaacaggttgtttcccaggctggggtgggggcctgagcagacacagaggtgcaggcaccaggattctccacttcttccagccctgctgggccacagttctaactgcccttcctcccaggccctggttcttgctatttcctggtccccaacgtttatctagcttgtttgccctttccccaaactcatcttccagaacttttccctctctcctaagccccagttgcacctactaactgcagtcccttttgctgtctgccgtcttttgtacaagagagagaacagcggagcatgacttagttcagtgcagagagataggtgaggccagctcgagatcttataccactctgtattggacaaaggctagcacagggctaggcaccaataaagatttctaatgatgcacaga

SEQ ID NO: 736 - DNA, 1196 bp, Homo sapiens
  source 1..1196: mol_type = genomic DNA
gcggaggctcggggagtcggcgccatgaccccatcgaggcttccctggttgcttagctgggtctcggccacggcgtggagagcggcaagatcaccccttctgtgtcattctctgaggaaaacaagttcttctcaaggaggaaagtctgaacttgtcaaacagtcccttaagaagccgaagttaccagaaggtcgttttgatgcaccagaggattcccatttagagaaagaaccactggaaaaatttccagatgatgttaatccagtgaccaaagaaaaaggtggacccaggggcccagaacctacccgatatggagattgggaacgaaaaggacgctgtattgatttttaagtcgcatattctttaacttcaatattgttttctgaatatgtacatctgaattaacttatttctgattattttctttctttatatcctttatgtcgtgtagtttgtataatgtgtttaaatatatatatatatgatggctttggaagaaaatatgctgctgtaaattaggaaagggagaccagcctgaccaatatggagaaatctcgcctttactaaaaatacaaaattagccaggcgtggtggcatgcacctgtaatcccaactactctggaggctgaggcaggagaatggcttaaacccaggaggtggaggttgcggtgagctgaggtcgcgccattgcactccagcctgggcaacaagagcgaaactccgtctcaaaaaaaaagataggaaagggaaaatattttttcattaacatatattaatttaatgagtatagaaatgattcttgtttttttgagacagagtctctctctctcacccaggctggagtggagtggcactatcccaactcactgcaacttccgccccgccaggttcaagcaattctcctgcctcagcctcctgagtagctgggattacagacacccaccattgcgcctggctaatttttgtatttttagtaaagacaaggtttcaccatgttagccaggctggtctcgaactcctgacctcagttgatccacctgcctcagcctcccaaagtgctgggattgcaggtgtgagccaccacgcccagcctagaaatgattcttagagctgtaggcctttacttcatcatttttcagtttaaattaatcagttgcttataaaatgcatacataaataaaataatttttaaaaaa

SEQ ID NO: 737 - DNA, 1974 bp, Homo sapiens
  source 1..1974: mol_type = genomic DNA
ccgggactcttcctggagacaccgccatggccgggctatcccgcgggtccgcgcgcgcactgctcgccgccctgctggcgtcgacgctgttggcgctgctcgtgtcgcccgcgcggggtcgcggcggccgggaccacggggactgggacgaggcctcccggctgccgccgctaccaccccgcgaggacgcggcgcgcgtggcccgcttcgtgacgcacgtctccgactggggcgctctggccaccatctccacgctggaggcggtgcgcggccggcccttcgccgacgtcctctcgctcagcgacgggcccccgggcgcgggcagcggcgtgccctatttctacctgagcccgctgcagctctccgtgagcaacctgcaggagaatccatatgctacactgaccatgactttggcacagaccaacttctgcaagaaacatggatttgatccacaaagtcccctttgtgttcacataatgctgtcaggaactgtgaccaaggtgaatgaaacagaaatggatattgcaaagcattcgttattcattcgacaccctgagatgaaaacctggccttccagccataattggttctttgctaagttgaatataaccaatatctgggtcctggactactttggtggaccaaaaatcgtgacaccagaagaatattataatgtcacagttcagtgaagcagactgtggtgaatttagcaacacttatgaagtttcttaaagtggctcatacacacttaaaaggcttaatgtttctctggaaagcgtcccagaatattagccagttttctgtcacatgctggtttgtttgcttgcttgtttacttgcttgtttaccaatagagttgacctgttattggatttcctggaagatgtggtagctacttttttcctattttgaagccattttcgtagagaaatatccttcactataatcaaataagttttgtcccatcaattccaaagatgtttccagtggtgctcttgaagaggaatgagtaccagttttaaattgcccattggcatttgaaggtagttgagtatgtgttctttattcctagaagccactgtgcttggtagagtgcatcactcaccacagctgcctcctgagctgcctgagcctggtgcaaaaggattggcccccattatggtgcttctgaataaatcttgccaagatagacaaacaatgatgaaactcagatggagcttcctactcacgttgatttatgtctcacaatcctgggtattgttaattcaacatagggtgaaactatttctgataaagaacttttgaaaaactttttatactctaaagtgatactcagaacaaaagaaagtcataaaactcctgaatttaatttccccacctaagtcgaaacagtattatcaaaacacatgtgcacacagattattttttggctccaaaactggattgcaaaagaaagaggagaagaatattttgtgtgttcctggtattcttttataagtaaagtttacccaggcatggaccagcttcagccagggacaaaatcccctcccaaaccactctccacagctttttaaaaatacttctactcttaacaattacctaaggcttcctcaactgccccaaatctcttaatagcttctagtgctgctacaatctaagtcaggtcaccagagggaagagaacatggcattaaaagaatcacatcttcagaagagaagacactaatattattacccatatacatgatttcagaagatgacataagattcctcttaaagaggaaatgtcaggaatcaagccactgaatccttaaagagaaaagttgaatatgagtcattgtgtctgaaaactgcaaagtgaacttaactgagatccagcaaacaggttctgtttaagaaaaataatttatactaaatttagtaaaatggacttcttattcaaagcatcaataattaaaagaattattttaatgaaa

SEQ ID NO: 738 - DNA, 3211 bp, Homo sapiens
  source 1..3211: mol_type = genomic DNA
gaacaaaccaacatttgagccaggaataactagagaggaacaatggggttattcagaggttttgttttcctcttagttctgtgcctgctgcaccagtcaaatacttccttcattaagctgaataataatggctttgaagatattgtcattgttatagatcctagtgtgccagaagatgaaaaaataattgaacaaatagaggatatggtgactacagcttctacgtacctgtttgaagccacagaaaaaagattttttttcaaaaatgtatctatattaattcctgagaattggaaggaaaatcctcagtacaaaaggccaaaacatgaaaaccataaacatgctgatgttatagttgcaccacctacactcccaggtagagatgaaccatacaccaagcagttcacagaatgtggagagaaaggcgaatacattcacttcacccctgaccttctacttggaaaaaaacaaaatgaatatggaccaccaggcaaactgtttgtccatgagtgggctcacctccggtggggagtgtttgatgagtacaatgaagatcagcctttctaccgtgctaagtcaaaaaaaatcgaagcaacaaggtgttccgcaggtatctctggtagaaatagagtttataagtgtcaaggaggcagctgtcttagtagagcatgcagaattgattctacaacaaaactgtatggaaaagattgtcaattctttcctgataaagtacaaacagaaaaagcatccataatgtttatgcaaagtattgattctgttgttgaattttgtaacgaaaaaacccataatcaagaagctccaagcctacaaaacataaagtgcaattttagaagtacatgggaggtgattagcaattctgaggattttaaaaacaccatacccatggtgacaccacctcctccacctgtcttctcattgctgaagatcagtcaaagaattgtgtgcttagttcttgataagtctggaagcatggggggtaaggaccgcctaaatcgaatgaatcaagcagcaaaacatttcctgctgcagactgttgaaaatggatcctgggtggggatggttcactttgatagtactgccactattgtaaataagctaatccaaataaaaagcagtgatgaaagaaacacactcatggcaggattacctacatatcctctgggaggaacttccatctgctctggaattaaatatgcatttcaggtgattggagagctacattcccaactcgatggatccgaagtactgctgctgactgatggggaggataacactgcaagttcttgtattgatgaagtgaaacaaagtggggccattgttcattttattgctttgggaagagctgctgatgaagcagtaatagagatgagcaagataacaggaggaagtcatttttatgtttcagatgaagctcagaacaatggcctcattgatgcttttggggctcttacatcaggaaatactgatctctcccagaagtcccttcagctcgaaagtaagggattaacactgaatagtaatgcctggatgaacgacactgtcataattgatagtacagtgggaaaggacacgttctttctcatcacatggaacagtctgcctcccagtatttctctctgggatcccagtggaacaataatggaaaatttcacagtggatgcaacttccaaaatggcctatctcagtattccaggaactgcaaaggtgggcacttgggcatacaatcttcaagccaaagcgaacccagaaacattaactattacagtaacttctcgagcagcaaattcttctgtgcctccaatcacagtgaatgctaaaatgaataaggacgtaaacagtttccccagcccaatgattgtttacgcagaaattctacaaggatatgtacctgttcttggagccaatgtgactgctttcattgaatcacagaatggacatacagaagttttggaacttttggataatggtgcaggcgctgattctttcaagaatgatggagtctactccaggtattttacagcatatacagaaaatggcagatatagcttaaaagttcgggctcatggaggagcaaacactgccaggctaaaattacggcctccactgaatagagccgcgtacataccaggctgggtagtgaacggggaaattgaagcaaacccgccaagacctgaaattgatgaggatactcagaccaccttggaggatttcagccgaacagcatccggaggtgcatttgtggtatcacaagtcccaagccttcccttgcctgaccaatacccaccaagtcaaatcacagaccttgatgccacagttcatgaggataagattattcttacatggacagcaccaggagataattttgatgttggaaaagttcaacgttatatcataagaataagtgcaagtattcttgatctaagagacagttttgatgatgctcttcaagtaaatactactgatctgtcaccaaaggaggccaactccaaggaaagctttgcatttaaaccagaaaatatctcagaagaaaatgcaacccacatatttattgccattaaaagtatagataaaagcaatttgacatcaaaagtatccaacattgcacaagtaactttgtttatccctcaagcaaatcctgatgacattgatcctacacctactcctactcctactcctactcctgataaaagtcataattctggagttaatatttctacgctggtattgtctgtgattgggtctgttgtaattgttaactttattttaagtaccaccatttgaaccttaacgaagaaaaaaatcttcaagtagacctagaagagagttttaaaaaacaaaacaatgtaagtaaaggatatttctgaatcttaaaattcatcccatgtgtgatcataaactcataaaaataattttaagatgtcggaaaaggatactttgattaaataaaaacactcatggatatgtaaaaactgtcaagattaaaatttaatagtttcatttatttgttattttatttgtaagaaatagtgatgaacaaagatcctttttcatactgatacctggttgtatattatttgatgcaacagttttctgaaatgatatttcaaattgcatcaagaaattaaaatcatctatctgagtagtcaaaatacaagtaaaggagagcaaataaacaacatttggaaaaaaa

SEQ ID NO: 739 - DNA, 2294 bp, Homo sapiens
  source 1..2294: mol_type = genomic DNA
ctggctgccggctgctgccaccgcaatcccggctcctaaatcagcgcggggaggcgctccctccccacgcccggctctccgggctctcggggccgcgattggccgcgccggcgccccccaccccgggcccccggctccagctgccgcgccattggctgcgggcctccgccagcctttacataagaccgggcgcgctcgagtggagttgtataaagcgagcgcgcggcgtcggggcgggaggctcgaggccagcccgggaccggggctgggagcaagcaggcggcggcgccggcggcagaggcggcagcgagcgcccgcttcccacgcccctaggcggcggggccgagagcgggaggatggctccgagcgctgaccccggcatgtccaggatgttaccgttcctgctgctgctctggtttctgcccatcactgaggggtcccagcgggctgaacccatgttcactgcagtcaccaactcagttctgcctcctgactatgacagtaatcccacccagctcaactatggtgtggcagttactgatgtggaccatgatggggactttgagatcgtcgtggcggggtacaatggacccaacctggttctgaagtatgaccgggcccagaagcggctggtgaacatcgcggtcgatgagcgcagctcaccctactacgcgctgcgggaccggcaggggaacgccatcggggtcacagcctgcgacatcgacggggacggccgggaggagatctacttcctcaacaccaataatgccttctcgggggtggccacgtacaccgacaagttgttcaagttccgcaataaccggtgggaagacatcctgagcgatgaggtcaacgtggcccgtggtgtggccagcctctttgccggacgctctgtggcctgtgtggacagaaagggctctggacgctactctatctacattgccaattacgcctacggtaatgtgggccctgatgccctcattgaaatggaccctgaggccagtgacctctcccggggcattctggcgctcagagatgtggctgctgaggctggggtcagcaaatatacagggggccgaggcgtcagcgtgggccccatcctcagcagcagtgcctcggatatcttctgcgacaatgagaatgggcctaacttccttttccacaaccggggcgatggcacctttgtggacgctgcggccagtgctggtgtggacgacccccaccagcatgggcgaggtgtcgccctggctgacttcaaccgtgatggcaaagtggacatcgtctatggcaactggaatggcccccaccgcctctatctgcaaatgagcacccatgggaaggtccgcttccgggacatcgcctcacccaagttctccatgccctcccctgtccgcacggtcatcaccgccgactttgacaatgaccaggagctggagatcttcttcaacaacattgcctaccgcagctcctcagccaaccgcctcttccgcgtcatccgtagagagcacggagaccccctcatcgaggagctcaatcccggcgacgccttggagcctgagggccggggcacagggggtgtggtgaccgacttcgacggagacgggatgctggacctcatcttgtcccatggagagtccatggctcagccgctgtccgtcttccggggcaatcagggcttcaacaacaactggctgcgagtggtgccacgcacccggtttggggcctttgccaggggagctaaggtcgtgctctacaccaagaagagtggggcccacctgaggatcatcgacgggggctcaggctacctgtgtgagatggagcccgtggcacactttggcctggggaaggatgaagccagcagtgtggaggtgacgtggccagatggcaagatggtgagccggaacgtggccagcggggagatgaactcagtgctggagatcctctacccccgggatgaggacacacttcaggacccagccccactggagtgtggccaaggattctcccagcaggaaaatggccattgcatggacaccaatgaatgcatccagttcccattcgtgtgccctcgagacaagcccgtatgtgtcaacacctatggaagctacaggtgccggaccaacaagaagtgcagtcggggctacgagcccaacgaggatggcacagcctgcgtggctcaagtggcctttttaggtgggtattcttcagccgcctctagaatctctgagcctctctctcgggcctcatatctttctctaggccttggactttgccttcagttatatgcactttaa

SEQ ID NO: 740 - DNA, 2890 bp, Homo sapiens
  source 1..2890: mol_type = genomic DNA
ctggctgccggctgctgccaccgcaatcccggctcctaaatcagcgcggggaggcgctccctccccacgcccggctctccgggctctcggggccgcgattggccgcgccggcgccccccaccccgggcccccggctccagctgccgcgccattggctgcgggcctccgccagcctttacataagaccgggcgcgctcgagtggagttgtataaagcgagcgcgcggcgtcggggcgggaggctcgaggccagcccgggaccggggctgggagcaagcaggcggcggcgccggcggcagaggcggcagcgagcgcccgcttcccacgcccctaggcggcggggccgagagcgggaggatggctccgagcgctgaccccggcatgtccaggatgttaccgttcctgctgctgctctggtttctgcccatcactgaggggtcccagcgggctgaacccatgttcactgcagtcaccaactcagttctgcctcctgactatgacagtaatcccacccagctcaactatggtgtggcagttactgatgtggaccatgatggggactttgagatcgtcgtggcggggtacaatggacccaacctggttctgaagtatgaccgggcccagaagcggctggtgaacatcgcggtcgatgagcgcagctcaccctactacgcgctgcgggaccggcaggggaacgccatcggggtcacagcctgcgacatcgacggggacggccgggaggagatctacttcctcaacaccaataatgccttctcgggggtggccacgtacaccgacaagttgttcaagttccgcaataaccggtgggaagacatcctgagcgatgaggtcaacgtggcccgtggtgtggccagcctctttgccggacgctctgtggcctgtgtggacagaaagggctctggacgctactctatctacattgccaattacgcctacggtaatgtgggccctgatgccctcattgaaatggaccctgaggccagtgacctctcccggggcattctggcgctcagagatgtggctgctgaggctggggtcagcaaatatacagggggccgaggcgtcagcgtgggccccatcctcagcagcagtgcctcggatatcttctgcgacaatgagaatgggcctaacttccttttccacaaccggggcgatggcacctttgtggacgctgcggccagtgctggtgtggacgacccccaccagcatgggcgaggtgtcgccctggctgacttcaaccgtgatggcaaagtggacatcgtctatggcaactggaatggcccccaccgcctctatctgcaaatgagcacccatgggaaggtccgcttccgggacatcgcctcacccaagttctccatgccctcccctgtccgcacggtcatcaccgccgactttgacaatgaccaggagctggagatcttcttcaacaacattgcctaccgcagctcctcagccaaccgcctcttccgcgtcatccgtagagagcacggagaccccctcatcgaggagctcaatcccggcgacgccttggagcctgagggccggggcacagggggtgtggtgaccgacttcgacggagacgggatgctggacctcatcttgtcccatggagagtccatggctcagccgctgtccgtcttccggggcaatcagggcttcaacaacaactggctgcgagtggtgccacgcacccggtttggggcctttgccaggggagctaaggtcgtgctctacaccaagaagagtggggcccacctgaggatcatcgacgggggctcaggctacctgtgtgagatggagcccgtggcacactttggcctggggaaggatgaagccagcagtgtggaggtgacgtggccagatggcaagatggtgagccggaacgtggccagcggggagatgaactcagtgctggagatcctctacccccgggatgaggacacacttcaggacccagccccactggagtgtggccaaggattctcccagcaggaaaatggccattgcatggacaccaatgaatgcatccagttcccattcgtgtgccctcgagacaagcccgtatgtgtcaacacctatggaagctacaggtgccggaccaacaagaagtgcagtcggggctacgagcccaacgaggatggcacagcctgcgtggggactctcggccagtcaccgggcccccgccccaccacccccaccgctgctgctgccactgccgctgctgctgccgctgctggagctgccactgctgcaccggtcctcgtagatggagatctcaatctggggtcggtggttaaggagagctgcgagcccagctgctgagcaggggtgggacatgaaccagcggatggagtccagcaggggagtgggaaagtgggcttgtgctgctgcctagacagtagggatgtaaaggcctgggagctagaccctccccaagcccatccatgcacattacttagctaacaattagggagactcgtaaggccaggccctgtgctgggcacatagctgtgatcacagcagacagggtcgctgccctgatggcgcttacattccagtgggtctaatgaccatatcttaggacacagatgtgcccagggaggtggtgtcactgcacaggaagtatgaggactttagtgtcctgagttcaaatcctgattcaggaactcacaaagctatgtgaccttacaccagtcacttaacttgttagccatccattatcgcatctgcaaaatggggattaagaatagaatcttggggttagtgtggagattagattaaatgtatgtaagacacttggcacaaaacctggcacatagtaaaggctcaataaaaacaagtgcctctcactgggctttgtcaacacgtga

SEQ ID NO: 741 - DNA, 1695 bp, Homo sapiens
  source 1..1695: mol_type = genomic DNA
gggagacgcaggcggcgaaacggcagaggagccgagccccctccgcccaaggcgccctccctccgtccgcgcacaggcgccgtcgcttggaggagcaaggtgcctcccagcccgcaggggcgccgcgcgcaagcccgcgggctcttcggtggctctgccccgggactgcacctggaggcggccccggacggggatggtcagcggctgctgccgtctggctcgcgagcgggacgctgtgagggcaccatggcgctgactcccgggtgggggtcctcggcggggccggtccggccggagctctggctgctgctgtgggcagccgcgtggcgcctgggtgcctcggcgtgccccgccctctgcacctgcaccggaaccacggtggactgccacggcacggggctgcaggccattcccaagaatatacctcggaacaccgagcgcctggaactcaatggcaacaacatcactcggatccataagaatgactttgcggggctcaagcagctgcgggtgctgcagctgatggagaaccagattggagcagtggaacgtggtgcttttgatgacatgaaggagctggagcggctgcgactgaaccgaaaccagctgcacatgttaccggaactgctgttccagaacaaccaggctttgtcaagactggacttgagtgagaacgccatccaggccatccccaggaaagcttttcggggagctacggaccttaaaaatttacagctggacaagaaccagatcagctgcattgaggaaggggccttccgtgctctgcgggggctggaggtgctgaccctgaacaacaacaatatcaccaccatccccgtgtccagcttcaaccatatgcccaagctacggaccttccgcctgcactccaaccacctgttttgcgactgccacctggcctggctctcgcagtggctgaggcagcggccaaccatcgggctcttcacccagtgctcgggcccagccagcctgcgtggcctcaatgtggcagaggtccagaagagtgagttcagctgctcaggccagggagaagcggggcgcgtgcccacctgcaccctgtcctccggctcctgcccggccatgtgcacctgcagcaatggcatcgtggactgtcgtggaaaaggcctcactgccatcccggccaacctgcccgagaccatgacggagatacgcctggagctgaacggcatcaagtccatccctcctggagccttctcaccctacagaaagctacggaggatagacctgagcaacaatcagatcgctgagattgcacccgacgccttccagggcctccgctccctgaactcgctccacactggccccgtcacctgtccacacacgacaggcacacacagctcccactgcagggcctttgctgttgctgtgcctcactccaggaatgaccttgaagccatgtttgaagaggaagtacccaggattttttactcagcttgaacgtttacgagggtagcttgtggggtccgattatgatattgggaatggcatacaacccccctccccaaacctcctggatgttttcactgtcctcctgaacccacccatgtctacatgtgtttttttgaacttttgtttttttaaaaaacctatacatggaattcatgctcaatgcagaaaactttgaaaatgctaaagtataaaaaaaaaatgcttgaa

SEQ ID NO: 742 - DNA, 7859 bp, Homo sapiens
  source 1..7859: mol_type = genomic DNA
gggagagggagacgcaggcggcgaaacggcagaggagccgagccccctccgcccaaggcgccctccctccgtccgcgcacaggcgccgtcgcttggaggagcaaggtgcctcccagcccgcaggggcgccgcgcgcaagcccgcgggctcttcggtggctctgccccgggactgcacctggaggcggccccggacggggatggtcagcggctgctgccgtctggctcgcgagcgggacgctgtgagggcaccatggcgctgactcccgggtgggggtcctcggcggggccggtccggccggagctctggctgctgctgtgggcagccgcgtggcgcctgggtgcctcggcgtgccccgccctctgcacctgcaccggaaccacggtggactgccacggcacggggctgcaggccattcccaagaatatacctcggaacaccgagcgcctggaactcaatggcaacaacatcactcggatccataagaatgactttgcggggctcaagcagctgcgggtgctgcagctgatggagaaccagattggagcagtggaacgtggtgcttttgatgacatgaaggagctggagcggctggacttgagtgagaacgccatccaggccatccccaggaaagcttttcggggagctacggaccttaaaaatttacagctggacaagaaccagatcagctgcattgaggaaggggccttccgtgctctgcgggggctggaggtgctgaccctgaacaacaacaatatcaccaccatccccgtgtccagcttcaaccatatgcccaagctacggaccttccgcctgcactccaaccacctgttttgcgactgccacctggcctggctctcgcagtggctgaggcagcggccaaccatcgggctcttcacccagtgctcgggcccagccagcctgcgtggcctcaatgtggcagaggtccagaagagtgagttcagctgctcaggccagggagaagcggggcgcgtgcccacctgcaccctgtcctccggctcctgcccggccatgtgcacctgcagcaatggcatcgtggactgtcgtggaaaaggcctcactgccatcccggccaacctgcccgagaccatgacggagatacgcctggagctgaacggcatcaagtccatccctcctggagccttctcaccctacagaaagctacggaggatagacctgagcaacaatcagatcgctgagattgcacccgacgccttccagggcctccgctccctgaactcgctggtcctctatggaaacaagatcacagacctcccccgtggtgtgtttggaggcctatacaccctacagctcctgctcctgaatgccaacaagatcaactgcatccggcccgatgccttccaggacctgcagaacctctcactgctctccctgtatgacaacaagatccagagcctcgccaagggcactttcacctccctgcgggccatccagactctgcacctggcgcagaaccctttcatttgcgactgtaacctcaagtggctggcagacttcctgcgcaccaatcccatcgagacgagtggtgcccgctgtgccagtccccggcgcctcgccaacaagcgcatcgggcagatcaagagcaagaagttccggtgctcagccaaagagcagtacttcattccaggcacggaggattaccagctgaacagcgagtgcaacagcgacgtggtctgtccccacaagtgccgctgtgaggccaacgtggtggagtgctccagcctgaagctcaccaagatccctgagcgcatcccccagtccacggcagaactgcgattgaataacaatgagatttccatcctggaggccactgggatgtttaaaaaacttacacatctgaagaaaatcaatctgagcaacaacaaggtgtcagaaattgaagatggggccttcgagggcgcagcctctgtgagcgagctgcacctaactgccaaccagctggagtccatccggagcggcatgttccggggtctggatggcttgaggaccctaatgctgcggaacaaccgcatcagctgcatccacaacgacagcttcacgggcctgcgcaacgtccggctcctctcgctctacgacaaccagatcaccaccgtatccccaggagccttcgacaccctccagtccctctccacactgaatctcctggccaaccctttcaactgcaactgccagctggcctggctaggaggctggctacggaagcgcaagatcgtgacggggaacccgcgatgccagaaccctgactttttgcggcagattcccctgcaggacgtggccttccctgacttcaggtgtgaggaaggccaggaggaggggggctgcctgccccgcccacagtgcccacaggagtgcgcctgcctggacaccgtggtccgatgcagcaacaagcacctgcgggccctgcccaagggcattcccaagaatgtcacagaactctatttggacgggaaccagttcacgctggttccgggacagctgtctaccttcaagtacctgcagctcgtggacctgagcaacaacaagatcagttccttaagcaattcctccttcaccaacatgagccagctgaccactctgatcctcagctacaatgccctgcagtgcatcccgcctttggccttccagggactccgctccctgcgcctgctgtctctccacggcaatgacatctccaccctccaagagggcatctttgcagacgtgacctccctgtctcacctggccattggtgccaaccccctatactgtgactgccacctccgctggctgtccagctgggtgaagactggctacaaggaaccgggcattgctcgttgtgctgggccccaggacatggagggcaagctgctcctcaccacgcctgccaagaagtttgaatgccaaggtcctccaacgctggctgtccaggccaagtgtgatctctgcttgtccagtccgtgccagaaccagggcacctgccacaacgacccccttgaggtgtacaggtgcgcctgccccagcggctataagggtcgagactgtgaggtgtccctggacagctgttccagtggcccctgtgaaaatgggggcacctgccatgcacaggagggcgaggatgccccgttcacgtgctcctgtcccaccggctttgaaggaccaacctgtggggtgaacacagatgactgtgtggatcatgcctgtgccaatgggggcgtctgtgtggatggtgtgggcaactacacctgccagtgccccctgcagtatgagggaaaggcctgtgagcagctggtggacttgtgctctccggatctgaacccatgtcaacacgaggcccagtgtgtgggcaccccggatgggcccaggtgtgagtgcatgccaggttatgcaggtgacaactgcagtgagaaccaggatgactgcagggaccaccgctgccagaatggggcccagtgtatggatgaagtcaacagctactcctgcctctgtgctgagggctacagtggacagctctgtgagatccctccccatctgcctgcccccaagagcccctgtgaggggactgagtgccagaatggggccaactgtgtggaccagggcaacaggcctgtgtgccagtgcctcccaggcttcggtggccctgagtgtgagaagttgctcagtgtcaactttgtggatcgggacacttacctgcagttcactgacctgcaaaactggccacgggccaacatcacgttgcaggtctccacggcagaggacaatgggatccttctgtacaacggggacaacgaccacattgcagttgagctgtaccagggccatgtgcgtgtcagctacgacccaggcagctaccccagctctgccatctacagtgctgagacgatcaacgatgggcaattccacaccgttgagctggttgcctttgaccagatggtgaatctctccattgatggcgggagccccatgaccatggacaactttggcaaacattacacgctcaacagcgaggcgccactctatgtgggagggatgcccgtggatgtcaactcagctgccttccgcctgtggcagatcctcaacggcaccggcttccacggttgcatccgaaacctgtacatcaacaacgagctgcaggacttcaccaagacgcagatgaagccaggcgtggtgccaggctgcgaaccctgccgcaagctctactgcctgcatggcatctgccagcccaatgccaccccagggcccatgtgccactgcgaggctggctgggtgggcctgcactgtgaccagcccgctgacggcccctgccatggccacaagtgtgtccatgggcaatgcgtgcccctcgacgctctttcctacagctgccagtgccaggatgggtactcgggggcactgtgcaaccaggccggggccctggcagagccctgcagaggcctgcagtgcctgcatggccactgccaggcctcaggcaccaagggggcacactgtgtgtgtgaccccggcttttcgggcgagctgtgtgagcaagagtccgagtgccggggggaccctgtccgggactttcaccaggtccagaggggctatgccatctgccagaccacgcgccccctgtcatgggtggagtgccggggctcgtgcccaggccagggctgctgccagggccttcggctgaagcggaggaagttcacctttgagtgcagcgatgggacctcttttgccgaggaggtggaaaagcccaccaagtgtggctgtgccctctgcgcatagcgctgggcgtggacaggccggtgagggcgggcaaggggccccagccgctgcagcagcggagacagtcgccagcagctgggctggggtgcaggtcatcacaggacggctcctgggcagctgggccctcctgggtggggtggtgccagagcagccttttaaaagcaaattgcgccatagctgggggcagcgggggtgggcgaggcctgagctgcgggctgccctctccggaagtgccttgcacaaataggcgcttaataaatatttgttgagtgaatgtgtgcgtgaggtcaggccaagaagtgcagaacgatgacacccctccttacctgctatctgaatctggagaagaaaaatgacagccttccaaaccaacccttccctttggcctgtggcccaggctggcttggaactgggtctgtggccccagaagcctcttacccctctgcgggcaaccatgaagtactgtcagcctccccgggaagccagcctggttcattctgctgctacagaatctgctggtggtaggccaggctctggagcgggggtgccgcctcctgctggccagggagggtcggacccttgccccctgggctgactggcagctctgcagccacggcttgggaacgaggctgtgggtggaggtggttcttaggaccaggcctctgaatcctaaagttctagcatgactactgtagctgcgagggcttatgtggaggaaacagtcacaggggctgctcagggtggcagaccccactaaagagggcagagggttctttgctctagataaacaaacatcatctgcctccagacactggccacagtaggagtattggtcctgggcttccccagccaccagtcagccacaagctgtcggtgacctattggtagagggactgggtgtgagggtctgggccagggtgcttgacctgggagcagctggttcagagtccttcacaccgcaggccagtagggagcagtggaagggacagtgctccaggcattgggaagtccctgctggctctatcactcggggcaaacttctccccacctgggccttgggttcttcagctataaaatggccagaggtggggggcgggatgactaaaggaacagtgcagactcccccactgtggtcttgggaggccagaggagttagaagacctatctatctatctatctatctacattgatcacatcaaaagtatttatgtgcctaacccggggctggggattgtggacgttctggcctaatggacagatgtgaactcatcccagagcatcgcaggaatgaccaggatgcccgggaagagttgagctgagtgggggctccagccacagacagcggcccaggccagggagttgctggcaacgaaggagccagtggtggaagaagaagaggccctgaatatacgattgcctgcccacgttgtcttctcttccatacacagtgaaaatgtagaaagatggtttgtgaggccaaactgtgaatgggctaaagggaggcaaagttgcactctccttccccagagggctcaccaagagggcacacccccgggggttctggtgggcaacgggggtgagcatgtccctgccctggctccctccatctgtgaccaggaggcatggctgggtgtatgttcaggtgaggctcagagtggcattgtgtccctgtcccctgcccagggcagtgaggggagcccttgatgctgattagaaggctagaactggggtagaggtgcctggcatgtctcatgccatggggactcaatctagcaactgtgagtcctggggtccctgtgatgggaagagggcagtgccctgcccaatgtggcaggtgtcctcatggcaggatctgcccctcaccagggggctgggatctacttgcttggagctctgagcaaggccacaatgcccgcccccacccccaagtagactgcagcctgggcctcatggggcttctcccaggcccacatggcatccctctctgagtttccaggccaccgtgggaccctgcagagcatctgcaccgggctggatagggcagaaaagctcaagggcagctagcttgcctcttccctggaagaaaggtgctctgggactcaccaaccctgagaaagatagctttcctggccaccaccattccccaccaccctggagaagccaattcccaggcttgaagggcactggctggcaggaggcctcttcattctgcaggaggtggaaaggacacctgtagacaggtgatgctcacccctcacctggcgccatggggctgggaggtgagcggctggcatgtttgttcctagggagcaccatgtgagcttaaggctcccctgaccggccccaccacatggcccagcctcctagcacagcagcgctgacctcagtgcagtctgaggattggaatccaccatgagatgatgtgagagctgtgtgccccaggatcaactttttctccaacttggccatcagccagcgagttgctaaggacctgagtcagcactcacgttgcctattcacactccgcttgaaagtccggaaggtggctactgcaaaatcacccctctgagaagtcctctctccacatcttgtccccctttgtgaagacccctagttcgctctgcattttaggcatgaagagatacagcagggtgcgtccggagggagctgtggccttgcaacaccactggcaacagggccggggctcccggtgaaggtgtcaggaagtggaaaaggctggactttgtctcctctttgcctgctggtagcctaaccgcaaaagtatctctttatacagaatacttacagattctaatatatatttgtatttcattttgttacagtatttttatatgttaaagtcaacatccagcgtcttgttttgcctttcagatgctatgtggtcgtggcacgttttgttgggggtttctgtagtcgtcttgtttggatcaactcctagaggctggtttagaacaggcccatgagggagctgcacctgccctggaagtattgttttagactatgtcgatattgtctgttgtcttccatgtgaacatgacattgagtcactctgc

SEQ ID NO: 743 - DNA, 7889 bp, Homo sapiens
  source 1..7889: mol_type = genomic DNA
gggagagggagacgcaggcggcgaaacggcagaggagccgagccccctccgcccaaggcgccctccctccgtccgcgcacaggcgccgtcgcttggaggagcaaggtgcctcccagcccgcaggggcgccgcgcgcaagcccgcgggctcttcggtggctctgccccgggactgcacctggaggcggccccggacggggatggtcagcggctgctgccgtctggctcgcgagcgggacgctgtgagggcaccatggcgctgactcccgggtgggggtcctcggcggggccggtccggccggagctctggctgctgctgtgggcagccgcgtggcgcctgggtgcctcggcgtgccccgccctctgcacctgcaccggaaccacggtggactgccacggcacggggctgcaggccattcccaagaatatacctcggaacaccgagcgcctggaactcaatggcaacaacatcactcggatccataagaatgactttgcggggctcaagcagctgcgggtgctgcagctgatggagaaccagattggagcagtggaacgtggtgcttttgatgacatgaaggagctggagcggctgcgactgaaccgaaaccagctgcacatgttaccggaactgctgttccagaacaaccaggctttgtcaagactggacttgagtgagaacgccatccaggccatccccaggaaagcttttcggggagctacggaccttaaaaatttacagctggacaagaaccagatcagctgcattgaggaaggggccttccgtgctctgcgggggctggaggtgctgaccctgaacaacaacaatatcaccaccatccccgtgtccagcttcaaccatatgcccaagctacggaccttccgcctgcactccaaccacctgttttgcgactgccacctggcctggctctcgcagtggctgaggcagcggccaaccatcgggctcttcacccagtgctcgggcccagccagcctgcgtggcctcaatgtggcagaggtccagaagagtgagttcagctgctcaggccagggagaagcggggcgcgtgcccacctgcaccctgtcctccggctcctgcccggccatgtgcacctgcagcaatggcatcgtggactgtcgtggaaaaggcctcactgccatcccggccaacctgcccgagaccatgacggagatacgcctggagctgaacggcatcaagtccatccctcctggagccttctcaccctacagaaagctacggaggatatgccccctctccttctgctcaccttgcagagacctgagcaacaatcagatcgctgagattgcacccgacgccttccagggcctccgctccctgaactcgctggtcctctatggaaacaagatcacagacctcccccgtggtgtgtttggaggcctatacaccctacagctcctgctcctgaatgccaacaagatcaactgcatccggcccgatgccttccaggacctgcagaacctctcactgctctccctgtatgacaacaagatccagagcctcgccaagggcactttcacctccctgcgggccatccagactctgcacctggcgcagaaccctttcatttgcgactgtaacctcaagtggctggcagacttcctgcgcaccaatcccatcgagacgagtggtgcccgctgtgccagtccccggcgcctcgccaacaagcgcatcgggcagatcaagagcaagaagttccggtgctcagccaaagagcagtacttcattccaggcacggaggattaccagctgaacagcgagtgcaacagcgacgtggtctgtccccacaagtgccgctgtgaggccaacgtggtggagtgctccagcctgaagctcaccaagatccctgagcgcatcccccagtccacggcagaactgcgattgaataacaatgagatttccatcctggaggccactgggatgtttaaaaaacttacacatctgaagaaaatcaatctgagcaacaacaaggtgtcagaaattgaagatggggccttcgagggcgcagcctctgtgagcgagctgcacctaactgccaaccagctggagtccatccggagcggcatgttccggggtctggatggcttgaggaccctaatgctgcggaacaaccgcatcagctgcatccacaacgacagcttcacgggcctgcgcaacgtccggctcctctcgctctacgacaaccagatcaccaccgtatccccaggagccttcgacaccctccagtccctctccacactgaatctcctggccaaccctttcaactgcaactgccagctggcctggctaggaggctggctacggaagcgcaagatcgtgacggggaacccgcgatgccagaaccctgactttttgcggcagattcccctgcaggacgtggccttccctgacttcaggtgtgaggaaggccaggaggaggggggctgcctgccccgcccacagtgcccacaggagtgcgcctgcctggacaccgtggtccgatgcagcaacaagcacctgcgggccctgcccaagggcattcccaagaatgtcacagaactctatttggacgggaaccagttcacgctggttccgggacagctgtctaccttcaagtacctgcagctcgtgatcctcagctacaatgccctgcagtgcatcccgcctttggccttccagggactccgctccctgcgcctgctgtctctccacggcaatgacatctccaccctccaagagggcatctttgcagacgtgacctccctgtctcacctggccattggtgccaaccccctatactgtgactgccacctccgctggctgtccagctgggtgaagactggctacaaggaaccgggcattgctcgttgtgctgggccccaggacatggagggcaagctgctcctcaccacgcctgccaagaagtttgaatgccaaggtcctccaacgctggctgtccaggccaagtgtgatctctgcttgtccagtccgtgccagaaccagggcacctgccacaacgacccccttgaggtgtacaggtgcgcctgccccagcggctataagggtcgagactgtgaggtgtccctggacagctgttccagtggcccctgtgaaaatgggggcacctgccatgcacaggagggcgaggatgccccgttcacgtgctcctgtcccaccggctttgaaggaccaacctgtggggtgaacacagatgactgtgtggatcatgcctgtgccaatgggggcgtctgtgtggatggtgtgggcaactacacctgccagtgccccctgcagtatgagggaaaggcctgtgagcagctggtggacttgtgctctccggatctgaacccatgtcaacacgaggcccagtgtgtgggcaccccggatgggcccaggtgtgagtgcatgccaggttatgcaggtgacaactgcagtgagaaccaggatgactgcagggaccaccgctgccagaatggggcccagtgtatggatgaagtcaacagctactcctgcctctgtgctgagggctacagtggacagctctgtgagatccctccccatctgcctgcccccaagagcccctgtgaggggactgagtgccagaatggggccaactgtgtggaccagggcaacaggcctgtgtgccagtgcctcccaggcttcggtggccctgagtgtgagaagttgctcagtgtcaactttgtggatcgggacacttacctgcagttcactgacctgcaaaactggccacgggccaacatcacgttgcaggtctccacggcagaggacaatgggatccttctgtacaacggggacaacgaccacattgcagttgagctgtaccagggccatgtgcgtgtcagctacgacccaggcagctaccccagctctgccatctacagtgctgagacgatcaacgatgggcaattccacaccgttgagctggttgcctttgaccagatggtgaatctctccattgatggcgggagccccatgaccatggacaactttggcaaacattacacgctcaacagcgaggcgccactctatgtgggagggatgcccgtggatgtcaactcagctgccttccgcctgtggcagatcctcaacggcaccggcttccacggttgcatccgaaacctgtacatcaacaacgagctgcaggacttcaccaagacgcagatgaagccaggcgtggtgccaggctgcgaaccctgccgcaagctctactgcctgcatggcatctgccagcccaatgccaccccagggcccatgtgccactgcgaggctggctgggtgggcctgcactgtgaccagcccgctgacggcccctgccatggccacaagtgtgtccatgggcaatgcgtgcccctcgacgctctttcctacagctgccagtgccaggatgggtactcgggggcactgtgcaaccaggccggggccctggcagagccctgcagaggcctgcagtgcctgcatggccactgccaggcctcaggcaccaagggggcacactgtgtgtgtgaccccggcttttcgggcgagctgtgtgagcaagagtccgagtgccggggggaccctgtccgggactttcaccaggtccagaggggctatgccatctgccagaccacgcgccccctgtcatgggtggagtgccggggctcgtgcccaggccagggctgctgccagggccttcggctgaagcggaggaagttcacctttgagtgcagcgatgggacctcttttgccgaggaggtggaaaagcccaccaagtgtggctgtgccctctgcgcatagcgctgggcgtggacaggccggtgagggcgggcaaggggccccagccgctgcagcagcggagacagtcgccagcagctgggctggggtgcaggtcatcacaggacggctcctgggcagctgggccctcctgggtggggtggtgccagagcagccttttaaaagcaaattgcgccatagctgggggcagcgggggtgggcgaggcctgagctgcgggctgccctctccggaagtgccttgcacaaataggcgcttaataaatatttgttgagtgaatgtgtgcgtgaggtcaggccaagaagtgcagaacgatgacacccctccttacctgctatctgaatctggagaagaaaaatgacagccttccaaaccaacccttccctttggcctgtggcccaggctggcttggaactgggtctgtggccccagaagcctcttacccctctgcgggcaaccatgaagtactgtcagcctccccgggaagccagcctggttcattctgctgctacagaatctgctggtggtaggccaggctctggagcgggggtgccgcctcctgctggccagggagggtcggacccttgccccctgggctgactggcagctctgcagccacggcttgggaacgaggctgtgggtggaggtggttcttaggaccaggcctctgaatcctaaagttctagcatgactactgtagctgcgagggcttatgtggaggaaacagtcacaggggctgctcagggtggcagaccccactaaagagggcagagggttctttgctctagataaacaaacatcatctgcctccagacactggccacagtaggagtattggtcctgggcttccccagccaccagtcagccacaagctgtcggtgacctattggtagagggactgggtgtgagggtctgggccagggtgcttgacctgggagcagctggttcagagtccttcacaccgcaggccagtagggagcagtggaagggacagtgctccaggcattgggaagtccctgctggctctatcactcggggcaaacttctccccacctgggccttgggttcttcagctataaaatggccagaggtggggggcgggatgactaaaggaacagtgcagactcccccactgtggtcttgggaggccagaggagttagaagacctatctatctatctatctatctacattgatcacatcaaaagtatttatgtgcctaacccggggctggggattgtggacgttctggcctaatggacagatgtgaactcatcccagagcatcgcaggaatgaccaggatgcccgggaagagttgagctgagtgggggctccagccacagacagcggcccaggccagggagttgctggcaacgaaggagccagtggtggaagaagaagaggccctgaatatacgattgcctgcccacgttgtcttctcttccatacacagtgaaaatgtagaaagatggtttgtgaggccaaactgtgaatgggctaaagggaggcaaagttgcactctccttccccagagggctcaccaagagggcacacccccgggggttctggtgggcaacgggggtgagcatgtccctgccctggctccctccatctgtgaccaggaggcatggctgggtgtatgttcaggtgaggctcagagtggcattgtgtccctgtcccctgcccagggcagtgaggggagcccttgatgctgattagaaggctagaactggggtagaggtgcctggcatgtctcatgccatggggactcaatctagcaactgtgagtcctggggtccctgtgatgggaagagggcagtgccctgcccaatgtggcaggtgtcctcatggcaggatctgcccctcaccagggggctgggatctacttgcttggagctctgagcaaggccacaatgcccgcccccacccccaagtagactgcagcctgggcctcatggggcttctcccaggcccacatggcatccctctctgagtttccaggccaccgtgggaccctgcagagcatctgcaccgggctggatagggcagaaaagctcaagggcagctagcttgcctcttccctggaagaaaggtgctctgggactcaccaaccctgagaaagatagctttcctggccaccaccattccccaccaccctggagaagccaattcccaggcttgaagggcactggctggcaggaggcctcttcattctgcaggaggtggaaaggacacctgtagacaggtgatgctcacccctcacctggcgccatggggctgggaggtgagcggctggcatgtttgttcctagggagcaccatgtgagcttaaggctcccctgaccggccccaccacatggcccagcctcctagcacagcagcgctgacctcagtgcagtctgaggattggaatccaccatgagatgatgtgagagctgtgtgccccaggatcaactttttctccaacttggccatcagccagcgagttgctaaggacctgagtcagcactcacgttgcctattcacactccgcttgaaagtccggaaggtggctactgcaaaatcacccctctgagaagtcctctctccacatcttgtccccctttgtgaagacccctagttcgctctgcattttaggcatgaagagatacagcagggtgcgtccggagggagctgtggccttgcaacaccactggcaacagggccggggctcccggtgaaggtgtcaggaagtggaaaaggctggactttgtctcctctttgcctgctggtagcctaaccgcaaaagtatctctttatacagaatacttacagattctaatatatatttgtatttcattttgttacagtatttttatatgttaaagtcaacatccagcgtcttgttttgcctttcagatgctatgtggtcgtggcacgttttgttgggggtttctgtagtcgtcttgtttggatcaactcctagaggctggtttagaacaggcccatgagggagctgcacctgccctggaagtattgttttagactatgtcgatattgtctgttgtcttccatgtgaacatgacattgagtcactctgc

SEQ ID NO: 744 - DNA, 4564 bp, Homo sapiens
  source 1..4564: mol_type = genomic DNA
ggactgcacctggaggcggccccggacggggatggtcagcggctgctgccgtctggctcgcgagcgggacgctgtgagggcaccatggcgctgactcccgggtgggggtcctcggcggggccggtccggccggagctctggctgctgctgtgggcagccgcgtggcgcctgggtgcctcggcgtgccccgccctctgcacctgcaccggaaccacggtggactgccacggcacggggctgcaggccattcccaagaatatacctcggaacaccgagcgcctggaactcaatggcaacaacatcactcggatccataagaatgactttgcggggctcaagcagctgcgggtgctgcagctgatggagaaccagattggagcagtggaacgtggtgcttttgatgacatgaaggagctggagcggctgcgactgaaccgaaaccagctgcacatgttaccggaactgctgttccagaacaaccaggctttgtcaagactggacttgagtgagaacgccatccaggccatccccaggaaagcttttcggggagctacggaccttaaaaatttacagctggacaagaaccagatcagctgcattgaggaaggggccttccgtgctctgcgggggctggaggtgctgaccctgaacaacaacaatatcaccaccatccccgtgtccagcttcaaccatatgcccaagctacggaccttccgcctgcactccaaccacctgttttgcgactgccacctggcctggctctcgcagtggctgaggcagcggccaaccatcgggctcttcacccagtgctcgggcccagccagcctgcgtggcctcaatgtggcagaggtccagaagagtgagttcagctgctcaggccagggagaagcggggcgcgtgcccacctgcaccctgtcctccggctcctgcccggccatgtgcacctgcagcaatggcatcgtggactgtcgtggaaaaggcctcactgccatcccggccaacctgcccgagaccatgacggagatacgcctggagctgaacggcatcaagtccatccctcctggagccttctcaccctacagaaagctacggaggatagacctgagcaacaatcagatcgctgagattgcacccgacgccttccagggcctccgctccctgaactcgctggtcctctatggaaacaagatcacagacctcccccgtggtgtgtttggaggcctatacaccctacagctcctgctcctgaatgccaacaagatcaactgcatccggcccgatgccttccaggacctgcagaacctctcactgctctccctgtatgacaacaagatccagagcctcgccaagggcactttcacctccctgcgggccatccagactctgcacctggcgcagaaccctttcatttgcgactgtaacctcaagtggctggcagacttcctgcgcaccaatcccatcgagacgagtggtgcccgctgtgccagtccccggcgcctcgccaacaagcgcatcgggcagatcaagagcaagaagttccggtgctcagccaaagagcagtacttcattccaggcacggaggattaccagctgaacagcgagtgcaacagcgacgtggtctgtccccacaagtgccgctgtgaggccaacgtggtggagtgctccagcctgaagctcaccaagatccctgagcgcatcccccagtccacggcagaactgcgattgaataacaatgagatttccatcctggaggccactgggatgtttaaaaaacttacacatctgaagaaaatcaatctgagcaacaacaaggtgtcagaaattgaagatggggccttcgagggcgcagcctctgtgagcgagctgcacctaactgccaaccagctggagtccatccggagcggcatgttccggggtctggatggcttgaggaccctaatgctgcggaacaaccgcatcagctgcatccacaacgacagcttcacgggcctgcgcaacgtccggctcctctcgctctacgacaaccagatcaccaccgtatccccaggagccttcgacaccctccagtccctctccacactgaatctcctggccaaccctttcaactgcaactgccagctggcctggctaggaggctggctacggaagcgcaagatcgtgacggggaacccgcgatgccagaaccctgactttttgcggcagattcccctgcaggacgtggccttccctgacttcaggtgtgaggaaggccaggaggaggggggctgcctgccccgcccacagtgcccacaggagtgcgcctgcctggacaccgtggtccgatgcagcaacaagcacctgcgggccctgcccaagggcattcccaagaatgtcacagaactctatttggacgggaaccagttcacgctggttccgggacagctgtctaccttcaagtacctgcagctcgtggacctgagcaacaacaagatcagttccttaagcaattcctccttcaccaacatgagccagctgaccactctgatcctcagctacaatgccctgcagtgcatcccgcctttggccttccagggactccgctccctgcgcctgctgtctctccacggcaatgacatctccaccctccaagagggcatctttgcagacgtgacctccctgtctcacctggccattggtgccaaccccctatactgtgactgccacctccgctggctgtccagctgggtgaagactggctacaaggaaccgggcattgctcgttgtgctgggccccaggacatggagggcaagctgctcctcaccacgcctgccaagaagtttgaatgccaaggtcctccaacgctggctgtccaggccaagtgtgatctctgcttgtccagtccgtgccagaaccagggcacctgccacaacgacccccttgaggtgtacaggtgcgcctgccccagcggctataagggtcgagactgtgaggtgtccctggacagctgttccagtggcccctgtgaaaatgggggcacctgccatgcacaggagggcgaggatgccccgttcacgtgctcctgtcccaccggctttgaaggaccaacctgtggggtgaacacagatgactgtgtggatcatgcctgtgccaatgggggcgtctgtgtggatggtgtgggcaactacacctgccagtgccccctgcagtatgagggaaaggcctgtgagcagctggtggacttgtgctctccggatctgaacccatgtcaacacgaggcccagtgtgtgggcaccccggatgggcccaggtgtgagtgcatgccaggttatgcaggtgacaactgcagtgagaaccaggatgactgcagggaccaccgctgccagaatggggcccagtgtatggatgaagtcaacagctactcctgcctctgtgctgagggctacagtggacagctctgtgagatccctccccatctgcctgcccccaagagcccctgtgaggggactgagtgccagaatggggccaactgtgtggaccagggcaacaggcctgtgtgccagtgcctcccaggcttcggtggccctgagtgtgagaagttgctcagtgtcaactttgtggatcgggacacttacctgcagttcactgacctgcaaaactggccacgggccaacatcacgttgcaggtctccacggcagaggacaatgggatccttctgtacaacggggacaacgaccacattgcagttgagctgtaccagggccatgtgcgtgtcagctacgacccaggcagctaccccagctctgccatctacagtgctgagacgatcaacgatgggcaattccacaccgttgagctggttgcctttgaccagatggtgaatctctccattgatggcgggagccccatgaccatggacaactttggcaaacattacacgctcaacagcgaggcgccactctatgtgggagggatgcccgtggatgtcaactcagctgccttccgcctgtggcagatcctcaacggcaccggcttccacggttgcatccgaaacctgtacatcaacaacgagctgcaggacttcaccaagacgcagatgaagccaggcgtggtgccaggctgcgaaccctgccgcaagctctactgcctgcatggcatctgccagcccaatgccaccccagggcccatgtgccactgcgaggctggctgggtgggcctgcactgtgaccagcccgctgacggcccctgccatggccacaagtgtgtccatgggcaatgcgtgcccctcgacgctctttcctacagctgccagtgccaggatgggtactcgggggcactgtgcaaccagagtccgagtgccggggggaccctgtccgggactttcaccaggtccagaggggctatgccatctgccagaccacgcgccccctgtcatgggtggagtgccggggctcgtgcccaggccagggctgctgccagggccttcggctgaagcggaggaagttcacctttgagtgcagcgatgggacctcttttgccgaggaggtggaaaagcccaccaagtgtggctgtgccctctgcgcata

SEQ ID NO: 745 - DNA, 665 bp, Homo sapiens
  source 1..665: mol_type = genomic DNA
cccagagggagtggaaaggctttgaaagtcagtataaaagattaaactctacagaagaatgcaatcaagtgatggcttttcctttagaatttgaatatggaggctacaggaacagatgaagttgacaagctaaaaaccaaatttatatctgcttggaacaacatgaaatatagttgggtgttgaaaacaaagacgtattttagtagaaattctcctgtattattgcttggaaaatgttaccattttaaatatgaagatgaagataaaacgttacctgcagagtcgggatgtacaatagaggatcacgtaattgcaggaaatgtagaagaatttcgtaaagatttcatttctagaatatggctgacctacagggaagaattccctcaaatagaaggctcagctttgacaacagactgtgggtggggctgcacattgagaactggccagatgctcttggctcaaggactcatactacactttcttggtagagcttggacctggcctgatgctttgaatattgaaaattcagactctgaatcatggacttcccacactgtcaaaaaatttactgcatcatttgaagcatcactttcaggggaaagagaattcaaaaccccaacaatttctctgaaggaaacaattgggaaatattctgatgatcatga

SEQ ID NO: 746 - DNA, 2890 bp, Homo sapiens
  source 1..2890: mol_type = genomic DNA
gtacctgtagctgcggcgctgaggtcggaacgtctgcgtgtgtgcgggctggttttgtggcggctgctgctagagctggagcatttgccggtcagtataaaagattaaactctacagaagaatgcaatcaagtgatggcttttcctttagaatttgaatatggaggctacaggaacagatgaagttgacaagctaaaaaccaaatttatatctgcttggaacaacatgaaatatagttgggtgttgaaaacaaagacgtattttagtagaaattctcctgtattattgcttggaaaatgttaccattttaaatatgaagatgaagataaaacgttacctgcagagtcgggatgtacaatagaggatcacgtaattgcaggaaatgtagaagaatttcgtaaagatttcatttctagaatatggctgacctacagggaagaattccctcaaatagaaggctcagctttgacaacagactgtgggtggggctgcacattgagaactggccagatgctcttggctcaaggactcatactacactttcttggtagagcttggacctggcctgatgctttgaatattgaaaattcagactctgaatcatggacttcccacactgtcaaaaaatttactgcatcatttgaagcatcactttcaggggaaagagaattcaaaaccccaacaatttctctgaaggaaacaattgggaaatattctgatgatcatgaaatgcgaaatgaagtttatcataggaaaatcatctcttggtttggtgattcccccttggctctttttggcttacatcaactaatagaatatggaaagaagtctgggaaaaaagcaggagattggtatggaccagctgtggttgctcacattttaagaaaagcagttgaagaagcaaggcatcctgatttacaaggaataactatttatgttgcacaagattgtacagtttacaattctgatgtaattgataaacagagtgcttccatgacttctgataatgcagatgacaaagctgttattattctagttcctgttagacttggtggagaaagaaccaacaccgactacttagaatttgtgaagggtattttaagcctggaatattgtgtgggtattattggtggcaaacctaaacagtcatattactttgctggatttcaagatgacagtttgatttacatggatcctcattactgccaatcttttgtagatgtcagcataaaggatttccctcttgagacattccactgcccttctcccaaaaagatgtcttttcgaaaaatggatcccagctgtacaataggattttactgtcgaaatgttcaggacttcaaacgagcttctgaagaaatcaccaagatgctgaaattttcttctaaggagaaatatcccttatttacttttgtaaatggtcattccagagactatgattttacatctactacaaccaatgaagaagaccttttttcagaggatgaaaagaaacaattaaaaagatttagcacggaagagtttgtcttgctttaaagattagcacatttgtgcttgataagaagaattccattgaaaggggaaaaatgaagagaaacaagtatatctgaaatgtttattttcacaaatatcttaattttatatgttctttaaaaaagaacatttgaaaatataacagttaaagatatttttctaaaagagaaatgatttaatgaatcttgctttctaataaataaattgagtgattctggttgcattcctatttccctaagatctactagtgataattctaccttaactgtaagccttttagtcttcaaagtcttccacctgagcccattgttctcatggaggttttgtgatattaaccctcccccaaagactgggatcaccaaatagtttcaaaattctcagtttgtactgaagaccagaagatcagagaaggaaactttaatgctgtctagcctcctgctattaatgcaatcaaagaatacttttgcatatgtcttgataattaaatagtatttgttaactgtgatatgcatacacttatataagcagaattatgagttaaagtaatacttagcaatatgattttataatggctcctcattatgcttgctgttgaaccttttatgaggagtgaatataaagtattggttttccctcacaaatttaaagattatgttattaatactattataactgcatcaatcaagtcagataaaggcaactataaaatagtagtagtgtttgtttcctatctcaagggcgaaattttatgggaactcaatttattatgcagtttttaagtttaaaataccaagaaagatgtcactagattctcttctatgtgatttttgttttttatataaagcagtgtagtggtgtttagaagctgaggccacctgtaaggcaaatctgccttaagtgtattatgtgttacttaaaggcaaatttgtgatctaaaagtacaagagtgatttttgagctaggattataaaatacataataaagatgtgagaagataaaatgcttttgttttggttttaatgttgggattattttaatcctttcatttgaaaaatcagtgtctcaaatgaattctgttcatttataataaatgcatatattgctctgaaaacaatattaatttttttaagtggagctttcatgtttcagtgtagaaacgtgacttataaagacataaaattgtgtatcatctaaagtcattgatctcttccatcagaaaacctgtttgtttagagttgcatgtaaagctgaaagagagggtgggcggattgttttagtatacctgatgagaaaaatcaggtttgacatttctcagtgaagattacttactgagttgaaataaatagtctgaaatcta

SEQ ID NO: 747 - DNA, 12875 bp, Homo sapiens
  source 1..12875: mol_type = genomic DNA
gactgcttgcattaaaggacttcctcatcctttttttcatgaaactgagcttgcttaatcagagatggagcaaactgactgcaaaccctaccagcctctaccaaaagtcaagcatgaaatggatctagcttacaccagttcttctgatgagagtgaagatggaagaaaaccaagacagtcatacaactccagggagaccctgcacgagtataaccaggagctgaggatgaattacaatagccagagtagaaagaggaaagaagtagaaaaatctactcaagagatggaattctgtgaaacctctcacactctgtgctctggctaccaaacagacatgcacagcgtttctcggcatggctaccagctagagatgggatctgatgtggacacagagacagaaggtgctgcctcacctgaccatgcactaagaatgtggataaggggaatgaaatcagagcatagttcctgtttgtccagccgggccaactctgcattatccttgactgacactgaccatgaaaggaagtctgatggggaaaatggtttcaaattctctcctgtttgttgtgacatggaggctcaagctgggtctactcaagatgtgcagagcagcccacacaaccagttcaccttcagacccctcccaccgccacctccgcctcctcatgcctgcacctgtgccaggaagccaccccctgcagcggactctcttcagaggagatcaatgactacccgcagccagcccagcccagctgctccagctcccccaaccagcacgcaggattcagtccatctgcataacagctgggtcctgaacagcaacataccattggagaccaggcatttcctgttcaaacatggatctggttcctctgcgatcttcagtgcagccagtcagaactaccctctgacatccaataccgtgtactcgccccctcccaggcctcttcctcgaagcaccttttcccgacctgcctttacctttaacaaaccttacaggtgctgcaactggaagtgcacagcattgagcgccactgcaatcacagtgactttggccttgttactagcctatgtgattgcagtgcatttgttcggcctgacttggcagttgcaaccagttgaaggagagctgtatgcaaatggagttagcaaagggaacagggggaccgagtccatggacactacttactctccaattggaggaaaagtttctgataaatcagagaaaaaagtgtttcagaagggacgggcgatagacactggagaagttgacattggtgcacaggtcatgcagaccattccacctggtttattctggcgtttccagattactatccaccatccaatatatctgaagttcaatatttctttagccaaggactctctgctgggaatttatggcagaagaaacattccacctacacatactcagtttgattttgtaaaactaatggatggcaaacagctggtcaagcaggactccaagggctctgatgatacacagcactcccctcggaacctgatcttaacttcgcttcaggagacaggtttcatagagtatatggatcaaggaccttggtatctggcgttttacaatgatggaaaaaagatggagcaagtattcgtgttaactacagcaattgaaataatggatgactgttcaaccaattgcaatggaaatggagagtgtatctctggccattgtcattgtttcccaggattccttggacctgactgtgctagagattcctgccctgtgctgtgtggtgggaatggagaatacgagaaaggacactgtgtctgccggcatggctggaaggggccagagtgtgacgttccggaagaacaatgcattgatccaacatgctttggccacggcacctgcatcatgggagtctgcatctgtgtgccaggatacaaaggagaaatatgcgaggaagaggactgcctagacccaatgtgttccaaccatggcatctgtgtaaaaggagaatgtcactgttctactggctggggaggagttaactgtgaaacaccacttcctgtatgtcaagagcagtgctcaggacacggaacttttcttctggacgctggagtatgcagctgtgatcccaagtggacaggatctgactgctcaacagagctgtgtaccatggagtgtggtagccatggagtctgctcaagaggaatttgccagtgtgaagaaggctgggtaggaccaacatgtgaggaacgctcctgtcattctcattgtactgagcatggccaatgcaaagatggaaaatgtgagtgtagccctggatgggagggcgaccactgcacaattgctcactacttagatgctgtccgagatggctgcccagggctctgctttggaaatggacgatgtaccctggatcaaaatggttggcactgtgtgtgtcaggtgggttggagtgggacaggctgcaatgttgtcatggaaatgctttgtggagataacttggacaatgatggagatggtttaaccgactgtgtggatcctgactgttgtcaacaaagcaactgttatataagtcctctctgccagggctcaccagatcctcttgacctcattcagcaaagccaaactctcttctctcagcacacttcaagacttttttatgatcgaatcaaattcctcattggcaaggacagtactcatgtcattcctcctgaggtgtcatttgacagcaggcgtgcctgtgtgattcgaggccaagtggtggccatagatggaactcctctagtgggagtgaatgtcagtttcttgcaccacagtgattatgggtttaccatcagccggcaagatggaagctttgacctcgtggccatcggtggcatctctgtcatcttaatcttcgaccgatcccctttcctgcctgagaagagaacactctggttgccttggaatcagtttattgtggtagagaaagtcaccatgcagagagttgtatcagacccgccatcctgcgatatctccaactttatcagcccaaaccctattgtgcttccttcaccgctcacatcatttggagggtcctgtccagagaggggaactattgttcctgagctgcaggttgtacaggaggaaattcccattccctccagctttgtgaggctgagttacctgagcagccgcacccctgggtataaaaccctgctacggatccttctgacacattcaacgattcctgtaggcatgataaaagtacacctcacagtagctgtggaagggcgactcacacagaagtggtttcccgccgcaattaatcttgtctacacatttgcttggaacaagaccgacatctatggacagaaggtttggggcctggcagaggctttggtatctgtgggatatgaatatgaaacgtgccctgactttattctctgggagcaaaggacagtcgttttacaaggttttgagatggatgcttctaacctaggaggctggtctttgaataagcatcacattttgaatcctcaaagtggaatcatacataaagggaatggagaaaatatgttcatttcccagcagcccccagtcatatcaaccataatgggtaatggacaccaaaggagtgtagcctgcaccaactgcaatggcccagcccacaacaacaaactctttgctcctgtcgccttagcttctggccctgatggcagtgtgtatgttggcgacttcaattttgtaaggagaatatttccctcgggaaactccgttagtattttggaattaagcacaagtcctgctcacaaatactatctggctatggaccctgtgtctgaatcactctatctatcagacaccaatactcgcaaagtctacaagttgaaatctcttgtggagacgaaagatctgtccaagaattttgaagtggtggcaggaactggtgatcagtgccttccctttgaccagagtcattgtggagatggtgggagagcatcggaagcttcactgaatagccctcgaggcatcacagttgataggcatggatttatttactttgtggatgggactatgattcgcaaaattgatgagaatgctgtgatcacaactgtaatcggctcaaatggtctgacttccacacaaccactgagctgtgactcaggaatggacatcactcaggtgcgattagagtggccaacagaccttgcagtaaatcctatggacaattcattgtatgtcttggataacaacattgtgctgcaaatttctgagaacaggcgtgttcggatcatcgcaggacgccccattcactgccaggtgccaggcatcgatcatttcctggtcagcaaggtagcaattcactccactctagagtcagcgagggccatcagtgtctcccacagcgggctgctcttcatagctgaaacagacgagaggaaagtaaaccgcattcagcaagtaaccaccaatggggagatctacatcatcgctggtgcccccactgactgtgactgcaaaattgatccaaactgtgactgtttttcaggtgatggtggctatgccaaagatgcaaagatgaaagccccttcctccttagcagtgtcgcctgatggaaccctctatgtggcagacctcggaaatgttcgaattcgtaccatcagcaggaaccaagcccacctgaatgacatgaacatttatgagattgcttcacccgctgatcaggaactgtaccagttcactgtaaatggaacccacctacacaccctgaacttgataacaagggactatgtttataacttcacctacaattctgaaggtgacttgggcgcgattaccagcagcaatggcaattcagtgcacattcgccgtgatgcaggcggaatgccgctatggcttgtggtgcctggcggacaagtatactggctgactataagcagcaatggagtcctgaaaagagtgtcagcccaaggctataatctggccttaatgacctatccaggaaacacagggcttctggctaccaaaagtaacgaaaatggatggacaaccgtttatgagtatgaccccgagggacacctgaccaatgcaacgtttcccactggagaggtcagcagcttccacagtgacctggagaagctgacaaaagtggagctagatacttccaaccgtgaaaatgtcctcatgtcaaccaacttgacggcaactagtaccatatatattttaaaacaagaaaatactcaaagtacctatcgggtgaatccagatggttccctgcgtgtcacttttgccagcgggatggagatcggcctcagctcagagccccacatcctggcaggggcagtcaaccctaccctgggcaaatgcaacatctcattgcccggagagcacaatgcaaacctcatcgagtggcggcagaggaaggagcaaaacaaaggcaatgtttcggcttttgaaaggaggctgagggcccacaacagaaacctactctccatagattttgatcatataacccgcacaggaaagatctatgatgaccatcgaaaattcacccttcgaattctttatgaccagactgggcgacccattctgtggtctcctgtaagcagatataatgaagtgaacatcacatattcaccttcgggattggtgacgtttattcaaagaggaacgtggaatgaaaaaatggaatatgaccagagtgggaaaattatttcaagaacttgggctgatgggaaaatttggagctatacctacttagaaaaatctgtgatgcttctcctacacagccagcggcgttacatctttgagtatgaccaaccagattgtctgctctcagtcaccatgcctagcatggtgcgtcacagcttacaaaccatgctttcagtgggctactaccggaacatctacaccccaccggacagtagcacttcttttatccaagactatagtcgagatggccgattgctacagaccctgcatctggggacagggcgcagagtcttatacaagtacaccaagcaagcaaggctttctgaggttctctatgataccactcaggtcacattaacatatgaagagtcttctggagtgattaagacaatacacctgatgcatgacggattcatctgcacaatcagatacaggcaaacaggacctcttattggacgccagattttcagattcagtgaagaaggccttgtgaatgcacggttcgactacagctacaacaatttccgagtcacaagcatgcaagctgtaatcaatgaaacccctttgcctatagatctttaccgatatgttgatgtctctggcagaacagagcagtttggaaaattcagtgtaattaattacgatttaaatcaggtcataactactacagtgatgaaacacaccaaaatcttcagtgccaatggacaagtcattgaagtccaatatgaaatcctaaaggcaattgcctactggatgaccattcaatatgataatgtgggccgcatggtaatatgtgacataagggtaggagtagatgccaatataacaaggtacttctatgaatacgatgctgatgggcaacttcagactgtttctgtaaatgacaaaacccagtggcgttatagttacgatctgaatggaaacatcaacctcttaagccatgggaagagtgctcgtcttactcctctccgatatgacctccgagaccgcatcaccagattaggagaaattcagtataaaatggatgaagatggctttctgaggcagaggggaaatgatatttttgaatataattctaatggcctgctgcagaaagcctacaataaggcttctggctggactgtgcagtattactatgatgggcttgggcgacgtgtcgcgagtaagtccagcctagggcagcaccttcagttcttttatgcagaccttaccaaccccataagagttactcatttgtacaaccacacaagctcggagattacatctctgtattatgatctccaaggtcaccttattgccatggagttaagcagtggtgaagaatattatgtagcctgtgataatacaggtaccccactagctgtgttcagcagccgaggtcaggtcataaaggagatactatacacaccttatggcgatatctatcatgacacttaccctgactttcaggtcattattggttttcatggaggactctatgatttccttactaaattagtgcacctggggcaaagggattatgatgttgttgctggcagatggacaacgcctaatcatcacatatggaaacagttgaacctccttcctaaaccattcaacctctactcctttgaaaataactacccagttggcaaaattcaagatgttgcaaagtataccacagacatcagaagttggttggagctatttggtttccaattacacaatgtactacctggatttcccaaacctgaattagaaaatttagaattaacttacgagcttctacggcttcagacaaaaactcaagagtgggatcctggaaagactatcctgggcattcagtgtgaactccagaaacagctcaggaatttcatttccttggaccaactacctatgactccccgatacaatgatggacggtgccttgaaggagggaagcaaccaaggtttgctgctgtcccttctgtttttgggaaaggtataaaatttgccatcaaggatggcatagtaacagctgatattataggagtagccaatgaagatagcaggcggcttgctgccattctcaataatgcccattacctggaaaacctacattttaccatagaggggagggacactcactacttcattaagcttgggtctctggaggaagacctggtgctcatcggtaacactggggggaggcggattctggagaatggtgtcaatgtcactgtgtcccagatgacttctgtgttgaatgggaggactagacggtttgcagatattcagctccagcatggagccctgtgcttcaacatccggtatgggacaactgtcgaagaggaaaagaatcacgtgttggagattgccagacagcgcgcagtggcccaggcctggactaaggaacaaagaaggctgcaagagggggaagaggggattagggcatggacagaaggggaaaagcagcagcttttgagcactgggcgggtacaaggttacgatgggtattttgttttgtctgttgagcagtatttagaactttctgacagtgccaataatattcactttatgagacagagcgaaataggcaggaggtaacaaaaatatctctgcctttgcgtcaccaaagactgcctgtttttaaaacataaaatggtttattgtattggttttctagatcagaactctgtatatgtaaatatggaggaaaaacatatccaactgcctttcaatgtgacggaagatggtattttaatattgtttgtttaaactctttaagaaatgacagagatttttagttcttgtgtggcagtattcaaaataacacaagtagaactcaaacagctaaaaacagttttcagaaagcaccactttcaatttgccgagccatgcatatgttccaatatccagaaagaacccaaggttctctatctctattgtgagaagcagtttcatccttaactgttggcagaacttacgggctatttgaataggtggtgcaatagtatctgaaacttgcctttcgaaagactgccagccctttgacgttttccagatctgttataggaaacttaaaaacaggtgtaaaatgtcttcagccaccatctcctagagtgaggacccaattgcccttccttcttgattattcctccttgcttgttaaagtaaatgccatattgttgtgctgtgttttggcgtgtggtggctgggttctgtctaccatgcttccctgtgggtgtggtaaccagactgtatagccgctatttgctcgtgtgtacatgataccaaagcagctggccagcgtgacctctctcacacgacctgttttgactcaattttttactaaaagttgttcagctgtattggtatcatgtaaacatagcttttattaacctgggtaggaatttctcatttatatataggatgtgttttggtcatagtttcacattagtgattcagtatctatacactgacccaatggttttgtgcacatgaacggtaatttacttaaaagtatgattctggtacaaaaacaaacaaaggctttagcaggcatacgtgtctgggatgccgatacatacattaactactactgcagaaattcataagagccaaaaccttaaaaaaatagacctggtacttaagtgaaagtactaaagggaagaccagaccaaacatcacagcagttgctgccacattgtttcagcccacttagatttatctttcaaatgtacaattctgtattgaacatctcccagccatcttcaggaaatcgaatcaagtaaatcctttccaaccgaaaacatttcaactaactatagagaggcagactcatttttactaaaataatttatacagttagttattttcgttctccgtacttacccatttatctttatttaatcgtctctactgcctaggaaaataactattttccaggacgggttatttgttctgcgatcatttaaaatttggagaaaggtcaggattagtgttaatatcagctgcagtttctcaatctctaggaatcctgcagtaaaacaagccccttggtgagctggaagatttgtgcccagtgacaaagagatagtttgtaaaatgctgtgtaattgtaagttaccacaaatgaaaatacatgacagcacaatgtggcccgtagaaaattcccctgagccagcttctgcactttcatcaccgaatctgaacatttgctatgtctgaaggcaaatttatgatggaatgttagtttggattctttccagatgctacctaaatgcagtgtggggtcattgccttgctttgcgatgacagtttctttgaaaatatgcaaagtcataagctcatgttaaggtttttcaagagtctgcctcctactacacaaaggaaagcaagggaaaggaaatgaccctggcaaacagtagggaagggtgtattcaaacatttcattttcaaaaccttcgggttagaataccacttacacatgtattctgagagacagaattcatgaggaactcatctctctttataactggaaacacaccagcttgatatattgctaatccatactaaaatcatattattgggttttttctgaatcaggcctgtattaatggtacagtatttattcagaatggaattctaaaattactaacaaacttgttgaaaatttgaatacctccacaccaacctaaaaatggaccttaagttcctagaacctctgatgttcttttaaattaatggaaaaataatttgtgaactgtatatagagagtgcattcataaatgtgattatgtattttatcacaaatccaaaatgtcaatattagagtctattttgcttatattttaagcaattatacgtttttgcaattcattgatgatgtatcattttcaaactgctttaaatatccattagaaacaaatatttgaagcttttacttaatagtgattaccttgaactgtgcatttctagtttgtaatacgtatttggttggttcgtgcctttagtttgttaaagttacatttgtattatattcaggaaatgcactttttattacttacagctgtggttttaatactgccttgaactattattattctttttacaactcctaaagcttgagggaggaaagaaaaaaaaaacaaaactactaatcagtagtaaatcgaagagaaacattttggcatttcttaagaagaagatggagatattgagtatatcacttcctattcagctgaatagaaagaatgccttcattgacttgcagttctgcagtttaaattattgaaagaacaattcgtttgcatttcctgatgaaagtaaaagcatttttcagagaaacatatgaatttctcatacccagcagacagatggctgacactgcacagccacacaccattcgagtaagttaaagtgagagcatagtagttggactctcctatgaagaacattctgggctggaggcagggaatactccatggttgtttctttttcctacttaagcccattttgtttgtgcttttctgttttgttttgttttcactcttgcactacagtctagagatccaaatgaactgaaaagttcaaagtttaacacatttaaatatgtttacttttagttgtcattctaatcgttattgattagaagcatgactcctgaaggaaagggaaataaatctcaattcatactaacttgcaacaaaacacttttaccatataaataagtatatgatttatttttaacccaaaaaatgtataaaataagtgtgtcctttactgtcaatttatctagaagatctataatatatagactacatatatataatatatacaacatagccaaatgtatgaaaacttgacaatgtataatttggaattcacatgctacctatgtagacaggtatgaaattaagttataattttcatgagacattttcatcactgttgacacagtttcaagcattccatcatgttattttgactctttttcttttttttttctttaaaaatatatttttaactagaccaggccccactataatatcacttaagagagtcagggcaaagtttttgcatttatgaagatgtgttcatgtaagggtgattgtaatggagttcattggtaatagaagcaaaagtacagtaacgaagtattgaaaagaaaattttggagacattggagcatattatatatagcttgtggaaagacataaggctacagatggaatggaacattcctgttttcttgaagaaattcacatacacatagctgacctgactagtacttcagctcttccacagccttctataaaggttctttcttctgcaaagaaaacaaaacaaaacaaaacaaaacaaaaaaaacaaaaaaagcgcaaaaaacaaaaaaacaaaaaaaagcaaagtaaaatttaaaaatacagaaaacaaacaacaaaaaagaattcaaccataaatagtgactattattttcagtgtgtccttcatgtgaaagctattaaggaccaaatatactactgttcataagaagaaattactttctaaacagtaactgaaaatacttagagttaaacttgctgtggattttgtcttggcagttgtcatcttacattatttgtcaaaggaaatgtgtttggcagttaaaaatctttccttagatttagtggtggactttaacctcttaaataaatgttagtatatcagattgtgtccttgaaaaatattttacttgtatgaatcatgacaacgtctaaatctttactattcttctggcaaaagcatcagtaagaaagaaggcgaaaaagagaagtatagcctttatgtcagaaaaacattctttttagctgcttactttctcatgaaaagtaaagatgtttacagtgtatgccaagttttcagtttctgtataacaacaggtagaggttctaatcatattgaaaattgtgttataatggtctgagccatgttgctaggaaacaataggttccaattttgtattcctgctctcctgtgctgaaaagtgactggatactgtacaggttcatgttctctggctgcagttaaatggtcttttgcattttgctctggctttcaggccagaagcatgcatttttctacaagagcatcacaacaacatgctgtaaatatttaaagttaaacattatgtgttgatatttgaaagaaaagtactttgaatatttcatttttaaaaaataaaattgccaatgaaaaa

SEQ ID NO: 748 - DNA, 384 bp, Homo sapiens
  source 1..384: mol_type = genomic DNA
tgaaaaaggaggtctgttgccccctttttttaagaaactctctaccatgaagattcaactttttttctttattctgcacttttgggtcacaattttaccagccaaaaagaaatatcctgagtatggtagcttggacttgaggagagagtgcagaataggtaatggtcaatgtaaaaatcagtgtcatgaaaatgaaattaggattgcttactgcataagacctggaactcattgctgcttgcagcagtaacgatgacagaagaaaagagtcacaagctccaagaagagagaccagcgttattaagttttcccagcacatccttcaaggcgtgtgtgtctctataatacacaagaactaaataaaaattaatgttgaaccattca

SEQ ID NO: 749 - DNA, 872 bp, Homo sapiens
  source 1..872: mol_type = genomic DNA
accttccttctgtcaatagatgaaacaaatacttcatcctgctctggaaaccactgcatgtaccaatcattttaatgcagatccctgttccaccggttttgttttcccagcaatgacattattcccagtgctgttgttcctggttgctgggctgcttccatcttttccagcaaatgaagataaggatcccgcttttactgctttgttaaccacccaaacacaagtgcaaagggagattgtgaataagcacaatgaactgaggagagcagtatctccccctgccagaaacatgctgaagatggaatggaacaaagaggctgcagcaaatgcccaaaagtgggcaaaccagtgcaattacagacacagtaacccaaaggatcgaatgacaagtctaaaatgtggtgagaatctctacatgtcaagtgcctccagctcatggtcacaagcaatccaaagctggtttgatgagtacaatgattttgactttggtgtagggccaaagactcccaacgcagtggttggacattatacacaggttgtttggtactcttcatacctcgttggatgtggaaatgcctactgtcccaatcaaaaagttctaaaatactactatgtttgccaatattgtcctgctggtaattgggctaatagactatatgtcccttatgaacaaggagcaccttgtgccagttgcccagataactgtgacgatggactatgcaccaatggttgcaagtacgaagatctctatagtaactgtaaaagtttgaagctcacattaacctgtaaacatcagttggtcagggacagttgcaaggcctcctgcaattgttcaaacagcatttattaaatacgcattacacaccgagtag

SEQ ID NO: 750 - DNA, 2723 bp, Homo sapiens
  source 1..2723: mol_type = genomic DNA
ttcctgttggacacaaagtccccggggcatttctgcagcgccagctccttgtgcggggcctggcacatacgatgttcaagcaaggcttgggatcaataaaggagcgggcattccatattctcggccggaagttacactggctcccagacctattattgcattaagagttgcacaatacgattttccaattctgttattcctgctgcattcttgcgtgaaaaagacttttccctcaactgtctgcagcaacctccttccctcctctgagctaaatccgcatgtctgaaggaagttgtcctgcgtgtcccactaaatacaggctcctttcagctccctcggagtggggatgggaagaacctgtagcgagcacctactctgtgctttagcaagtgagatctcctttcatttgcacaacagcccctgggtcggagctgaacagccccactggatggatgagaagacccagaccaggggagttaaatgacttgtccaaggtgacctggcaagttacaggctgaactgggattgatcccagatctacccggccctaaaagttatgccctttctcctccactcactttccttccaggcctgagttccttcccttcctgatagtgtggtcggtgcagatctcagaacgtgtaaacctggtgacaccagatccgtcactttacagtgagtaaaggaagtacccagggatcggcttactaattctaggggccggtgaattattcatgccaccattaacttggaggccctttcagcctcacctctctttcccttgctccggaccctgagatcctggcctacctgagctcggcagacctgtgggggcccctggtgaggagatgctggcagagtggggggcttgcctgctgctggcagtggcactgctgggcccagggctccaggcccaagccatggaaggtgtcaaatgtgggggtgtgctctcagcaccttctggaaacttctccagccccaacttccctagactgtacccctacaacacagagtgcagctggctgatcgtggtggccgagggatcctcggtgctgctcaccttccatgcctttgacctagagtaccacgacacctgcagcttcgactttctggagatctacaatggggcctcaccagacaagggcaacctgctggggaggttctgcggcaaggtgcccccgccgcccttcacctcctcctggcatgtcatgtctgtcatcttccactcggacaagcatgtggccagccatggcttttctgcgggctaccagaaagatgtgtgtggcggcgtcctgactggcctgtcaggggtcctcaccagtcctgagtatcccaacaactacccgaacagcatggagtgccactgggtgatccgggccgctggccctgcccacgtcaagctggtgttcgtggacttccaggtggagggcaatgaagagtgcacctatgactacgtggctgtgcttggggggcctggccccacccgtgggcaccactactgtggcagcaccaggccccccaccctcgtgtctctgggccacgaactgcaggtggtcttcaagtccgacttcaacatcggaggccgtggcttcaaggcctactacttctcaggagaatgccaggaggtatacatggccatgcggggcaacttctccagcccacagtaccccagctcctaccccaacaacatccgctgccactggaccatccgcctgcccccgggctaccaggtcaaggtgttcttcctggacctggacctggaggagcccaacagcctgaccaagacctgtgactttgaccatctggcggccttcgatggggccagcgaggaggcacccctgctggggaattggtgtggacaccacctgccaccacccgtgacctcaagccacaaccagcttctgcttctgctgcacacagaccgcagcaccacccgcaggggcttctctgtggcctacatcggaggtcagctgggctgtgggagtgggtccactgagggcgaaggggaggctttgcagcctcagtctttgcagtctccttcctccatcccaccagtttgtcctgccccccccatgaatggtcttctccagctccttctccattggctacacccttgcccactctcgggacccctaagactggacggtacggctcccgcttgtttccactattgcagagcctccttccccagcttctaacttcgtgagtcctcacccctccccatctggttccttccccctgggcccctggcccctcttgtgttgttattggtcccctgtatccaggggaaatagacaaaatatggtaatattgtttatggcaaaaaaattggtataactgtggggatgtctaccagccctgcttgtatcattcagaactactcattgaaaacatggtgcttgtttttcctcactcaacaggaagcctggagctaggcagctgctgtattggtccaggggctcaacactgttccaaatgttatctctgggactctctgagcctcacagctgcaagatggctgccatagctccaggcatcgcatccatgttcaagactggaggggacaggggaagtgccagctgcaaatggctctttatcaagaaagcaaaagcatctctagaacctctcataagacttttacaaaatgtcccatcagtttgaactcagtcagatggccatgcctggctgcagaggaagctggggagctggtatttggctttctc

SEQ ID NO: 751 - DNA, 2606 bp, Homo sapiens
  source 1..2606: mol_type = genomic DNA
aggtgctccgctccagagttgagcgcaggtgagctcctgcgcgttccgggggcgttcctccagtcaccctcccgccgttacccgcggcgcgcccgagggagtctcctccagaccctccctcccgttgctccaaactaatacggactgaacggatcgctgcgagggtgggagagaaaattagggggagaaaggacagagagagcaactaccatccatagccagatagattatcttacactgaactgatcaagtactttgaaaatgacttcgaaatttctcttggtgtccttcatacttgctgcactgagtctttcaaccaccttttctctccaaccagaccagcaaaaggttctactagtttcttttgatggattccgttgggattacttatataaagttccaacgccccattttcattatattatgaaatatggtgttcacgtgaagcaagttactaatgtttttattacaaaaacctaccctaaccattatactttggtaactggcctctttgcagagaatcatgggattgttgcaaatgatatgtttgatcctattcggaacaaatctttctccttggatcacatgaatatttatgattccaagttttgggaagaagcgacaccaatatggatcacaaaccagagggcaggacatactagtggtgcagccatgtggcccggaacagatgtaaaaatacataagcgctttcctactcattacatgccttacaatgagtcagtttcatttgaagatagagttgccaaaattattgaatggtttacgtcaaaagagcccataaatcttggtcttctctattgggaagaccctgatgacatgggccaccatttgggacctgacagtccgctcatggggcctgtcatttcagatattgacaagaagttaggatatctcatacaaatgctgaaaaaggcaaagttgtggaacactctgaacctaatcatcacaagtgatcatggaatgacgcagtgctctgaggaaaggttaatagaacttgaccagtacctggataaagaccactataccctgattgatcaatctccagtagcagccatcttgccaaaagaaggtaaatttgatgaagtctatgaagcactaactcacgctcatcctaatcttactgtttacaaaaaagaagacgttccagaaaggtggcattacaaatacaacagtcgaattcaaccaatcatagcagtggctgatgaagggtggcacattttacagaataagtcagatgactttctgttaggcaaccacggttacgataatgcgttagcagatatgcatccaatatttttagcccatggtcctgccttcagaaagaatttctcaaaagaagccatgaactccacagatttgtacccactactatgccacctcctcaatatcaccgccatgccacacaatggatcattctggaatgtccaggatctgctcaattcagcaatgccaagggtggtcccttatacacagagtactatactcctccctggtagtgttaaaccagcagaatatgaccaagaggggtcatacccttatttcataggggtctctcttggcagcattatagtgattgtattttttgtaattttcattaagcatttaattcacagtcaaatacctgccttacaagatatgcatgctgaaatagctcaaccattattacaagcctaatgttactttgaagtggatttgcatattgaagtggagattccataattatgtcagtgtttaaaggtttcaaattctgggaaaccagttccaaacatttgcagaaaccattaagcagttacatatttaggtatacacacacacacacacacacatacacacacacggaccaaaatacttacacctgcaaaggaataaagatgtgagagtatgtctccattgttcactgtagcatagggatagataagatcctgctttatttggacttggcgcagataatgtatatatttagcaactttgcactatgtaaagtaccttatgtattgcactttaaatttctctcctgatgggtactttaatttgaaatgcactttatgcacagttatgtcttataacttgattgaaaatgacaactttttgcacccatgtcacagaatacttgttacgcattgttcaaactgaaggaaatttctaataatcccgaataatgaacgtagaaatctatctccataaattgagagaagaagaaggtgataagtgttgaaaattaaatgtgataacctttgaaccttgaattttggagatgtattcccaacagcagaatgcaactgtgggcatttcttgtcttatttctttccagagaacgtggttttcatttatttttccctcaaaagagagtcaaatactgacagattcgttctaaatatattgtttctgtcataaaattattgtgatttcctgatgagtcatattactgtgattttcataataatgaagacaccatgaatatactttttttctatatagttcagcaatggcctgaatagaagcaaccaggcaccatctcagcaatgttttctcttgtttgtaattatttgctcctttgaaaattaaatcactattaattacattaa

SEQ ID NO: 752 - DNA, 1590 bp, Homo sapiens
  source 1..1590: mol_type = genomic DNA
gcgacatgggctccgctccctgggccccggtcctgctgctggcgctcgggctgcgcggcctccaggcgggggcccgcagggccccggaccccggcttccaggagcgcttcttccagcagcgtctggaccacttcaacttcgagcgcttcggcaacaagaccttccctcagcgcttcctggtgtcggacaggttctgggtccggggcgaggggcccatcttcttctacactgggaacgagggcgacgtgtgggccttcgccaacaactcggccttcgtcgcggagctggcggccgagcggggggctctactggtcttcgcggagcaccgctactacgggaagtcgctgccgttcggtgcgcagtccacgcagcgcgggcacacggagctgctgacggtggagcaggccctggccgacttcgcagagctgctccgcgcgctacgacgcgacctcggggcccaggatgcccccgccatcgccttcggtggaagttatggggggatgctcagtgcctacctgaggatgaagtatccccacctggtggcgggggcgctggcggccagcgcgcccgttctagctgtggcaggcctcggcgactccaaccagttcttccgggacgtcacggcggactttgagggccagagtcccaaatgcacccagggtgtgcgggaagcgttccgacagatcaaggacttgttcctacagggagcctacgacacggtccgctgggagttcggcacctgccagccgctgtcagacgagaaggacctgacccagctcttcatgttcgcccggaatgccttcaccgtgctggccatgatggactacccctaccccactgacttcctgggtcccctccctgccaaccccgtcaaggtgggctgtgatcggctgctgagtgaggcccagaggatcacggggctgcgagcactggcagggctggtctacaacgcctcgggctccgagcactgctacgacatctaccggctctaccacagctgtgctgaccccactggctgcggcaccggccccgacgccagggcctgggactaccaggcctgcaccgagatcaacctgaccttcgccagcaacaatgtgaccgatatgttcccggacctgcccttcactgacgagctccgccagcggtactgcctggacacctggggcgtgtggccccggcccgactggctgctgaccagcttctgggggggtgatctcagagccgccagcaacatcatcttctccaacgggaacctggacccctgggcagggggcgggattcggaggaacctgagtgcctcagtcatcgccgtcaccatccaggggggagcgcaccacctcgacctcagagcctcccacccagaagatcctgcttccgtggttgaggcgcggaagctggaggccaccatcatcggcgagtgggtaaaggcagccaggcgtgagcagcagccagctctgcgtggggggcccagactcagcctctgagcacaggactggaggggtctcaaggctcctcatggagtgggggcttcactcaagcagctggcggcagagggaaggggctgaataaacgcctggaggcctggccatg

SEQ ID NO: 753 - DNA, 4127 bp, Homo sapiens
  source 1..4127: mol_type = genomic DNA
aagacaacgtcactagcagtttctggagctacttgccaaggctgagtgtgagctgagcctgccccaccaccaagatgatcctgagcttgctgttcagccttgggggccccctgggctgggggctgctgggggcatgggcccaggcttccagtactagcctctctgatctgcagagctccaggacacctggggtctggaaggcagaggctgaggacaccggcaaggaccccgtaggacgtaactggtgcccctacccaatgtccaagctggtcaccttactagctctttgcaaaacagagaaattcctcatccactcgcagcagccgtgtccgcagggagctccagactgccagaaagtcaaagtcatgtaccgcatggcccacaagccagtgtaccaggtcaagcagaaggtgctgacctctttggcctggaggtgctgccctggctacacgggccccaactgcgagcaccacgattccatggcaatccctgagcctgcagatcctggtgacagccaccaggaacctcaggatggaccagtcagcttcaaacctggccaccttgctgcagtgatcaatgaggttgaggtgcaacaggaacagcaggaacatctgctgggagatctccagaatgatgtgcaccgggtggcagacagcctgccaggcctgtggaaagccctgcctggtaacctcacagctgcagtgatggaagcaaatcaaacagggcacgagttccctgatagatccttggagcaggtgctgctaccccacgtggacaccttcctacaagtgcatttcagccccatctggaggagctttaaccaaagcctgcacagccttacccaggccataagaaacctgtctcttgacgtggaggccaaccgccaggccatctccagagtccaggacagtgccgtggccagggctgacttccaggagcttggtgccaaatttgaggccaaggtccaggagaacactcagagagtgggtcagctgcgacaggacgtggaggaccgcctgcacgcccagcactttaccctgcaccgctcgatctcagagctccaagccgatgtggacaccaaattgaagaggctgcacaaggctcaggaggccccagggaccaatggcagtctggtgttggcaacgcctggggctggggcaaggcctgagccggacagcctgcaggccaggctgggccagctgcagaggaacctctcagagctgcacatgaccacggcccgcagggaggaggagttgcagtacaccctggaggacatgagggccaccctgacccggcacgtggatgagatcaaggaactgtactccgaatcggacgagactttcgatcagattagcaaggtggagcggcaggtggaggagctgcaggtgaaccacacggcgctccgtgagctgcgcgtgatcctgatggagaagtctctgatcatggaggagaacaaggaggaggtggagcggcagctcctggagctcaacctcacgctgcagcacctgcagggtggccatgccgacctcatcaagtacgtgaaggactgcaattgccagaagctctatttagacctggacgtcatccgggagggccagagggacgccacgcgtgccctggaggagacccaggtgagcctggacgagcggcggcagctggacggctcctccctgcaggccctgcagaacgccgtggacgccgtgtcgctggccgtggacgcgcacaaagcggagggcgagcgggcgcgggcggccacgtcgcggctccggagccaagtgcaggcgctggatgacgaggtgggcgcgctgaaggcggccgcggccgaggcccgccacgaggtgcgccagctgcacagcgccttcgccgccctgctggaggacgcgctgcggcacgaggcggtgctggccgcgctcttcggggaggaggtgctggaggagatgtctgagcagacgccgggaccgctgcccctgagctacgagcagatccgcgtggccctgcaggacgccgctagcgggctgcaggagcaggcgctcggctgggacgagctggccgcccgagtgacggccctggagcaggcctcggagcccccgcggccggcagagcacctggagcccagccacgacgcgggccgcgaggaggccgccaccaccgccctggccgggctggcgcgggagctccagagcctgagcaacgacgtcaagaatgtcgggcggtgctgcgaggccgaggccggggccggggccgcctccctcaacgcctcccttcacggcctccacaacgcactcttcgccactcagcgcagcttggagcagcaccagcggctcttccacagcctctttgggaacttccaagggctcatggaagccaacgtcagcctggacctggggaagctgcagaccatgctgagcaggaaagggaagaagcagcagaaagacctggaagctccccggaagagggacaagaaggaagcggagcctttggtggacatacgggtcacagggcctgtgccaggtgccttgggcgcggcgctctgggaggcaggatcccctgtggccttctatgccagcttttcagaagggacggctgccctgcagacagtgaagttcaacaccacatacatcaacattggcagcagctacttccctgaacatggctacttccgagcccctgagcgtggtgtctacctgtttgcagtgagcgttgaatttggcccagggccaggcaccgggcagctggtgtttggaggtcaccatcggactccagtctgtaccactgggcaggggagtggaagcacagcaacggtctttgccatggctgagctgcagaagggtgagcgagtatggtttgagttaacccagggatcaataacaaagagaagcctgtcgggcactgcatttgggggcttcctgatgtttaagacctgaaccccagccccaatctgatcagacatcatggactcgcccagctctcctcggcctggggctctggccaaggatgggctggaggtcattcagttggtctgtctcttccctggaaaccttctgcaaagatggtgtggtgtacgtggcttccctgtaaccacatggggcttggccatttctccatgatgagaaggactggaatgcttctccgggcaggacatggtcctaggaagcctgaaccttggcttggcatgccttctcagacagcacggcctgggctccaactcttcaccacaccctgtattctacaacttctttggtgttttgctcctcctgtggttggaaacttctgtacaacactttaaacttttctcttgcttcctcttctcttctcccttatcgtatgatagaaagacattcttccccaggaggaatgtttaaaatggaggcaacattttggccaacattggaaagcactagagggcaatgggattaaaccaacctgcttggtctctattagtcagtaatgaagacgacagcctggccaaccaagggaaaggaaattagtatctttagtttcagtcattccttgtaggatatggtttagctgtgcccccacctaaaatatcatcttgaattgtaatccctataatccccacatcaagggagagatcaggtggaggtaattggatcttgggggcggttcccccatgctgttcttgtgatagttctcacgagatctgatgattttataagtttgatagttcctcctgtgttcattctccttcctgccaccttgtgaagatgccttggttcctcttcactgtctgccatgattgtaagtttcctgaggcctccccagccatgtggaacagtgagtcaattaaacctctttcctttataaattatccagtcttgggcaattcttgatagcagtgtgaaaatggactaatacacttgtgtttatctgtaatttaaatttcatgtctttttctccttgccttacatagggtaaagaccaagaaatgccaaacgtgaactaaaatatgtagggccttcaacttttttacttcctccagtatcttaggaccatcgtaattcttgttagcatctctaaccaggaggcagctgagggaggagggaaagaagactgtaaaaatccccctcactaatgatcaactttggaataaagtgatgcccttcaaa

SEQ ID NO: 754 - DNA, 888 bp, Homo sapiens
  source 1..888: mol_type = genomic DNA
ctctgcccattgggaaacacctctctatgactctataaatgtccaaggtggccccaagggaggacttctgcagcacagctcccttcccaggacgtgaaaatctgccttctcaccatgaggcttctagtcctttccagcctgctctgtatcctgcttctctgcttctccatcttctccacagaagggaagaggcgtcctgccaaggcctggtcaggcaggagaaccaggctctgctgccaccgagtccctagccccaactcaacaaacctgaaaggacatcatgtgaggctctgtaaaccatgcaagcttgagccagagccccgcctttgggtggtgcctggggcactcccacaggtgtagcactcccaaagcaagactccagacagcggagaacctcatgcctggcacctgaggtacccagcagcctcctgtctcccctttcagccttcacagcagtgagctgcaatgttggagggcttcatctcgggctgcaaggaccctgggaaagttccagaactccacgtccttgtctcaattgtgccatcaactttcagagctatcatgagccaacctcaccccacagggcctcagtcgccaccatgtgggcctctccagtgcaaaccaccgagcattccaccatgaccggtcacagctacaaatccagagaccatcaatcctgctagagtgcagggtggcaagcacccaagggtggctgaccaagactgcagagtctcctccatcttcaggtccattcagcctcctggcatttaactaccagcatccagtggtccccaaggaatcccttcctagcctcctgacatgagtctgctggaaagagcatccaaacaaacaagtaataaataaataaataaactcaatgcagacaca

SEQ ID NO: 755 - DNA, 2058 bp, Homo sapiens
  source 1..2058: mol_type = genomic DNA
agtatcctctgatcacagaagagaaagctgcccctacccagggacatgatcctgagccacctggattgtgagggagaatcaggcattgatgaggaggggaatgaggaagtagtctgcctacaggggacatagctcggcacagctccacagagctaggggctgcaacttggggcatgagaagagagagcagcaagagaaccatttgagaaggctgtcctttctctgtcatcactcctgatgccctggtgagctccacggtgcaggaacctccatgtgtgtgctgcatccccaagttctggtggcagcaggtgcttagcagcccttgtccagtctcgcctgtgacactgctgctcccttcccctgtcctgacctcctggttggctgtcctgccagagccttgcctggaagatgaaattccagctaccctgtgggagcagtaacgccttcttccttcttctcaatctccagaaatgtctttcctccaggacccaagtttcttcaccatggggatgtggtccattggtgcaggagccctgggggctgctgccttggcattgctgcttgccaacacagacgtgtttctgtccaagccccagaaagcggccctggagtacctggaggatatagacctgaaaacactggagaaggaaccaaggactttcaaagcaaaggagctatgggaaaaaaatggagctgtgattatggccgtgcggaggccaggctgtttcctctgtcgagaggaagctgcggatctgtcctccctgaaaagcatgttggaccagctgggcgtccccctctatgcagtggtaaaggagcacatcaggactgaagtgaaggatttccagccttatttcaaaggagaaatcttcctggatgaaaagaaaaagttctatggtccacaaaggcggaagatgatgtttatgggatttatccgtctgggagtgtggtacaacttcttccgagcctggaacggaggcttctctggaaacctggaaggagaaggcttcatccttgggggagttttcgtggtgggatcaggaaagcagggcattcttcttgagcaccgagaaaaagaatttggagacaaagtaaacctactttctgttctggaagctgctaagatgatcaaaccacagactttggcctcagagaaaaaatgattgtgtgaaactgcccagctcagggataaccagggacattcacctgtgttcatgggatgtattgtttccactcgtgtccctaaggagtgagaaacccatttatactctactctcagtatggattattaatgtattttaatattctgtttaggcccactaaggcaaaatagccccaaaacaagactgacaaaaatctgaaaaactaatgaggattattaagctaaaacctgggaaataggaggcttaaaattgactgccaggctgggtgcagtggctcacacctgtaatcccagcactttgggaggccaaggtgagcaagtcacttgaggtcgggagttcgagaccagcctgagcaacatggcgaaaccccgtctctactaaaaatacaaaaatcacccgggtgtggtggcaggcacctgtagtcccagctacccgggaggctgaggcaggagaatcacttgaacctgggaggtggaggttgcggtgagctgagatcacaccactgtattccagcctgggtgactgagactctaactaaaaaaaaaaaaaaaaaaaaattgattgctgtgcctcattacaaatgcatatgatgtttgagtgctgttgtttgaaattatttttcttttcgggtcttcaaaaattcaagaaaagttgatgattgacttgaagattacaaaatttaaggttttttggcatgtgtgttttctattaataattggttatatgatgtcaaagtaatactttcataatagaattgacatgctctgggatagtttgacaaaggtaaattataaagtgaaatctcttgtttcattatcttccattctaacctcagagatctgtttctctagaaaaaatgtccatctctggctttaataaaattatgcatcagaaatca

SEQ ID NO: 756 - DNA, 1723 bp, Homo sapiens
  source 1..1723: mol_type = genomic DNA
tggcggtggcgcggtagcgcgcgatgcagcacaggctagaggctgcgcaagcgcggggcccgcccctgggaccctccgggccgggcggtttggccccttagcgcccgggcgtcggggcggtaaaaggccggcagaagggaggcacttgaggacccaagtttcttcaccatggggatgtggtccattggtgcaggagccctgggggctgctgccttggcattgctgcttgccaacacagacgtgtttctgtccaagccccagaaagcggccctggagtacctggaggatatagacctgaaaacactggagaaggaaccaaggactttcaaagcaaaggagctatgggaaaaaaatggagctgtgattatggccgtgcggaggccaggctgtttcctctgtcgagaggaagctgcggatctgtcctccctgaaaagcatgttggaccagctgggcgtccccctctatgcagtggtaaaggagcacatcaggactgaagtgaaggatttccagccttatttcaaaggagaaatcttcctggatgaaaagaaaaagttctatggtccacaaaggcggaagatgatgtttatgggatttatccgtctgggagtgtggtacaacttcttccgagcctggaacggaggcttctctggaaacctggaaggagaaggcttcatccttgggggagttttcgtggtgggatcaggaaagcagggcattcttcttgagcaccgagaaaaagaatttggagacaaagtaaacctactttctgttctggaagctgctaagatgatcaaaccacagactttggcctcagagaaaaaatgattgtgtgaaactgcccagctcagggataaccagggacattcacctgtgttcatgggatgtattgtttccactcgtgtccctaaggagtgagaaacccatttatactctactctcagtatggattattaatgtattttaatattctgtttaggcccactaaggcaaaatagccccaaaacaagactgacaaaaatctgaaaaactaatgaggattattaagctaaaacctgggaaataggaggcttaaaattgactgccaggctgggtgcagtggctcacacctgtaatcccagcactttgggaggccaaggtgagcaagtcacttgaggtcgggagttcgagaccagcctgagcaacatggcgaaaccccgtctctactaaaaatacaaaaatcacccgggtgtggtggcaggcacctgtagtcccagctacccgggaggctgaggcaggagaatcacttgaacctgggaggtggaggttgcggtgagctgagatcacaccactgtattccagcctgggtgactgagactctaactaaaaaaaaaaaaaaaaaaaaattgattgctgtgcctcattacaaatgcatatgatgtttgagtgctgttgtttgaaattatttttcttttcgggtcttcaaaaattcaagaaaagttgatgattgacttgaagattacaaaatttaaggttttttggcatgtgtgttttctattaataattggttatatgatgtcaaagtaatactttcataatagaattgacatgctctgggatagtttgacaaaggtaaattataaagtgaaatctcttgtttcattatcttccattctaacctcagagatctgtttctctagaaaaaatgtccatctctggctttaataaaattatgcatcagaaatca

SEQ ID NO: 757 - DNA, 1741 bp, Homo sapiens
  source 1..1741: mol_type = genomic DNA
atggcggtggcgcggtagcgcgcgatgcagcacaggctagaggctgcgcaagcgcggggcccgcccctgggaccctccgggccgggcggtttggccccttagcgcccgggcgtcggggcggtaaaaggccggcagaagggaggcacttgagaaatgtctttcctccaggacccaagtttcttcaccatggggatgtggtccattggtgcaggagccctgggggctgctgccttggcattgctgcttgccaacacagacgtgtttctgtccaagccccagaaagcggccctggagtacctggaggatatagacctgaaaacactggagaaggaaccaaggactttcaaagcaaaggagctatgggaaaaaaatggagctgtgattatggccgtgcggaggccaggctgtttcctctgtcgagaggaagctgcggatctgtcctccctgaaaagcatgttggaccagctgggcgtccccctctatgcagtggtaaaggagcacatcaggactgaagtgaaggatttccagccttatttcaaaggagaaatcttcctggatgaaaagaaaaagttctatggtccacaaaggcggaagatgatgtttatgggatttatccgtctgggagtgtggtacaacttcttccgagcctggaacggaggcttctctggaaacctggaaggagaaggcttcatccttgggggagttttcgtggtgggatcaggaaagcagggcattcttcttgagcaccgagaaaaagaatttggagacaaagtaaacctactttctgttctggaagctgctaagatgatcaaaccacagactttggcctcagagaaaaaatgattgtgtgaaactgcccagctcagggataaccagggacattcacctgtgttcatgggatgtattgtttccactcgtgtccctaaggagtgagaaacccatttatactctactctcagtatggattattaatgtattttaatattctgtttaggcccactaaggcaaaatagccccaaaacaagactgacaaaaatctgaaaaactaatgaggattattaagctaaaacctgggaaataggaggcttaaaattgactgccaggctgggtgcagtggctcacacctgtaatcccagcactttgggaggccaaggtgagcaagtcacttgaggtcgggagttcgagaccagcctgagcaacatggcgaaaccccgtctctactaaaaatacaaaaatcacccgggtgtggtggcaggcacctgtagtcccagctacccgggaggctgaggcaggagaatcacttgaacctgggaggtggaggttgcggtgagctgagatcacaccactgtattccagcctgggtgactgagactctaactaaaaaaaaaaaaaaaaaaaaattgattgctgtgcctcattacaaatgcatatgatgtttgagtgctgttgtttgaaattatttttcttttcgggtcttcaaaaattcaagaaaagttgatgattgacttgaagattacaaaatttaaggttttttggcatgtgtgttttctattaataattggttatatgatgtcaaagtaatactttcataatagaattgacatgctctgggatagtttgacaaaggtaaattataaagtgaaatctcttgtttcattatcttccattctaacctcagagatctgtttctctagaaaaaatgtccatctctggctttaataaaattatgcatcagaaatca

SEQ ID NO: 758 - DNA, 829 bp, Homo sapiens
  source 1..829: mol_type = genomic DNA
tgcccagactggtcttgaactcctgggctcaagcgatcctcccaaagccctgagattacaggcgtgagccagcgcgccggacacaacctcctactttcatgaaagagtgggcacttccaacaggaggaaaatgtctttcctccaggacccaagtttcttcaccatggggatgtggtccattggtgcaggagccctgggggctgctgccttggcattgctgcttgccaacacagacgtgtttctgtccaagccccagaaagcggccctggagtacctggaggatatagacctgaaaacactggagaaggaaccaaggactttcaaagcaaaggagctatgggaaaaaaatggagctgtgattatggccgtgcggaggccaggctgtttcctctgtcgagaggaagctgcggatctgtcctccctgaaaagcatgttggaccagctgggcgtccccctctatgcagtggtaaaggagcacatcaggactgaagtgaaggatttccagccttatttcaaaggagaaatcttcctggatgaaaagaaaaagttctatggtccacaaaggcggaagatgatgtttatgggatttatccgtctgggagtgtggtacaacttcttccgagcctggaacggaggcttctctggaaacctggaaggagaaggcttcatccttgggggagttttcgtggtgggatcaggaaagcagggcattcttcttgagcaccgagaaaaagaatttggagacaaagtaaacctactttctgttctggaagctgctaagatgatcaaaccacagactttggcctcagagaaaaaatgattgtgtgaa

SEQ ID NO: 759 - DNA, 1600 bp, Homo sapiens
  source 1..1600: mol_type = genomic DNA
ttgctttctgagagatgcaggtggattcttgggcatttgctattaacttccttccaaaatgtcaccattcctgtatctggttctcttggtacttgggcttcatgctacaatccactgtgcatcacctgaaggcaaagtaacagcctgccattcatcccaaccaaatgccactctctacaagatgtcatccattaatgctgactttgcattcaatctgtaccggaggttcactgtggagaccccagataagaacatcttcttttcccctgtgagcatttctgcagctttggttatgctttcctttggggcctgctgcagcacccaaactgagattgtggagaccttggggttcaacctcacagacactccaatggtagagatccagcatggcttccagcatctgatctgttcactgaattttccaaagaaggaactggaattgcagataggaaatgccctcttcattggcaagcatctgaaaccactggcaaagttcttgaatgatgtcaagaccctctatgagactgaagtcttttctaccgacttctccaacatttctgcagccaagcaggagattaacagtcatgtggagatgcaaaccaaagggaaagttgtgggtctaattcaagacctcaagccaaacaccatcatggtcttagtgaactatattcactttaaagcccagtgggcaaatccttttgatccatccaagacagaagacagttccagcttcttaatagacaagaccaccactgttcaagtgcccatgatgcaccagatggaacaatactatcacctagtggatatggaattgaactgcacagttctgcaaatggactacagcaagaatgctctggcactctttgttcttcccaaggagggacagatggagtcagtggaagctgccatgtcatctaaaacactgaagaagtggaaccgcttactacagaagggatgggttgacttgtttgttccaaagttttccatttctgccacatatgaccttggagccacacttttgaagatgggcattcagcatgcctattctgaaaatgctgatttttctggactcacagaggacaatggtctgaaactttccaatgctgcccataaggctgtgctgcacattggtgaaaagggaactgaagctgcagctgtccctgaagttgaactttcggatcagcctgaaaacactttcctacaccctattatccaaattgatagatctttcatgttgttgattttggagagaagcacaaggagtattctctttctagggaaagttgtgaacccaacggaagcgtagttgggaaaaaggccattggctaattgcacgtgtgtattgcaatgggaaataaataaataatatagcctggtgtgattgatgtgagcttggacttgcattcccttatgatgggatgaagattgaaccctggctgaactttgttggctgtggaagaggccaatcctatggcagagcattcagaatgtcaatgagtaattcattattatccaaagcataggaaggctctatgtttgtatatttctctttgtcagaatacccctcaactcatttgctctaataaatttgactgggttg

SEQ ID NO: 760 - DNA, 706 bp, Homo sapiens
  source 1..706: mol_type = genomic DNA
aaagcagaaataaatgatatctttcattctatcggcaagaacacaagactggttatgtgaaaggaggaggcgtcattcctgcggaagccctatcccacatgacgaacgacaaggccaggggcaagcaaaaagaggaaggactctcttgctctgctccgacttggccagtagaggcagtgaggagctaaagatcattccttctttccttccttcactctccgtagacagctctgcagggaagtctgtgacaacctggccagacatagggctcacgatctgatcagagtcatggcaccccagactctgctgcctgtcctggttctctgtgtgctgctgctgcaggcccagggaggataccgtgacaagaagaggatgcagaaaacacagctatccccagaaatcaaagtctgccagcagcagcctaaactatatctatgcaaacacttatgtgaatctcaccgagattgtcaagcaaataacatatgctgttctacctactgtgggaatgtttgcatgagcatcctgtgagtgggagagtgggctgggatgtgcatcctgcttcccaactcctctatccaagactgtgcccacatccgaagcacaaggacctcaagtcaccagcataagaacatcaacaggaatgccgccctctctactgtctgaaccccttgtccctgtcaaataaaccagaacaaatgcccaggga

SEQ ID NO: 761 - DNA, 486 bp, Homo sapiens
  source 1..486: mol_type = genomic DNA
atgggactctcaggacttctgccaatcctggtaccattcatccttttgggggacatccaggaacctgggcacgctgaaggcatccttggcaagccgtgtcccaaaatcaaagtggaatgcgaagtggaagaaatagaccagtgtaccaaacccagagattgcccagaaaacatgaagtgttgcccgttcagccgtggaaagaaatgtttagacttcagaaagatatatgcagtatgccacaggaggctggcccctgcctggcctccataccacactggtggtacaataaaaaaaactaagatctgctccgaattcatctatggcggtagccaggggaacaataacaacttccaaactgaagctatctgtctggtcacctgcaaaaaataccataagtcagccttactttataccataaggaggagcttgaataacctccaggatttggctcataatccaggcctctctccacgtgtgcctgattga

SEQ ID NO: 762 - DNA, 620 bp, Homo sapiens
  source 1..620: mol_type = genomic DNA
acaccggggcaggcaaagtgcagatgtaggagctgctgaggagcagttcttagttttggtgccatcaaccaggccagtacttcctaaaatgggactctcaggacttctgccaatcctggtaccattcatccttttgggggacatccaggaacctgggcacgctgaaggcatccttggcaagccgtgtcccaaaatcaaagtggaatgcgaagtggaagaaatagaccagtgtaccaaacccagagattgcccagaaaacatgaagtgttgcccgttcagccgtggaaagaaatgtttagacttcagaaaggtcagccttactttataccataaggaggagcttgaataacctccaggatttggctcataatccaggcctctctccacgtgtgcctgattgatgctccaaattggcttccacgggccaaaccttggctgttccagaaactgaaccccaggaattgcttacacactttcttccagcgtagcatctcttcaaacacaatgctcttccccttgaccacttctcagtatgaaactctatgtcttcaactttcagaccccccatttatttgtatgaaggcttcagttgccttaataaagtgctctgtggggtccga

SEQ ID NO: 763 - DNA, 614 bp, Homo sapiens
  source 1..614: mol_type = genomic DNA
ccccctcccgcgcgcgcggttaaatccccgcacctgagcatcggctcacacctgcaccccgcccgggcatagcaccatgcctgcttgtcgcctaggcccgctagccgccgccctcctcctcagcctgctgctgttcggcttcaccctagtctcaggcacaggagcagagaagactggcgtgtgccccgagctccaggctgaccagaactgcacgcaagagtgcgtctcggacagcgaatgcgccgacaacctcaagtgctgcagcgcgggctgtgccaccttctgctctctgcccaatgataaggagggttcctgcccccaggtgaacattaactttccccagctcggcctctgtcgggaccagtgccaggtggacagccagtgtcctggccagatgaaatgctgccgcaatggctgtgggaaggtgtcctgtgtcactcccaatttctgagctccagccaccaccaggctgagcagtgaggagagaaagtttctgcctggccctgcatctggttccagcccacctgccctcccctttttcgggactctgtattccctcttgggctgaccacagcttctccctttcccaaccaataaagtaaccactttcagca

SEQ ID NO: 764 - DNA, 1496 bp, Homo sapiens
  source 1..1496: mol_type = genomic DNA
gccggaagcggagagcggctgatcgcagtccggaggtgaggcggaactctgagcaggtggtccattatggctgacatgcaaaatctggtagaaagattggagagggcagtgggccgcctggaggcagtatctcatacctctgacatgcaccgtgggtatgcagacagtccttcaaaagcaggagcagctccatatgtgcaggcatttgactcgctgcttgctggtcctgtggcagagtacttgaagatcagtaaagagattgggggagacgtgcagaaacatgcggagatggtccacacaggtttgaagttggagcgagctctgttggttacagcttctcagtgtcaacagccagcagaaaataagctttccgatttgttggcacccatctcagagcagatcaaagaagtgataacctttcgggagaagaaccgaggcagcaagttgtttaatcacctgtcagctgtcagcgaaagtatccaggccctgggctgggtggctatggctcccaagcctggcccttatgtgaaagaaatgaatgatgccgccatgttttatacaaaccgagtcctcaaagagtacaaagatgtggataagaagcatgtagactgggtcaaagcttatttaagtatatggacagagctgcaggcttacattaaggagttccataccaccggactggcctggagcaaaacggggcctgtggcaaaagaactgagcggactgccatctggaccctctgccggatcatgtcctcctccccctccaccatgcccccctcctcccccagtctctaccatttcatgctcatatgagtctgcttcccgctcatcactgttcgcgcagattaatcagggggagagcattacacatgccctgaaacatgtatctgatgacatgaagactcacaagaaccctgccctgaaggctcagagtggtccagtacgcagtggccccaaaccattctctgcacctaaaccccaaaccagcccatcccccaaacgagccacaaagaaggagccagctgtacttgaactggagggcaagaagtggagagtggaaaatcaggaaaatgtttccaacctggtgattgaggacacagagctgaaacaggtggcttacatatacaagtgtgtcaacacgacattgcaaatcaagggcaaaattaactccattacagtagataactgtaagaaacttggcctggtattcgatgacgtggtgggcattgtggagataatcaacagtaaggatgtcaaagttcaggtaatgggtaaagtgccaaccatatccatcaacaaaacagatggctgccatgcttacctgagcaagaattccctggattgtgaaatagtcagtgccaaatcttccgagatgaatgtcctcattcctacagaaggcggtgactttaatgaattcccagttcctgagcagttcaagaccctatggaacgggcagaagttggtcaccacagtgacagaaattgctggataagc

SEQ ID NO: 765 - DNA, 1746 bp, Homo sapiens
  source 1..1746: mol_type = genomic DNA
gctgatcgcagtccggaggtgaggcggaactctgaggtggtccattatggctgacatgcaaaatctggtagaaagattggagagggcagtgggccgcctggaggcagtatctcatacctctgacatgcaccgtgggtatgcagacagtccttcaaaagcaggagcagctccatatgtgcaggcttacattaaggagttccataccaccggactggcctggagcaaaacggggcctgtggcaaaagaactgagcggactgccatctggaccctctgccggatcatgtcctcctccccctccaccatgcccccctcctcccccagtctctaccatttcatgctcatatgagtctgcttcccgctcatcactgttcgcgcagattaatcagggggagagcattacacatgccctgaaacatgtatctgatgacatgaagactcacaagaaccctgccctgaaggctcagagtggtccagtacgcagtggccccaaaccattctctgcacctaaaccccaaaccagcccatcccccaaacgagccacaaagaaggagccagctgtacttgaactggagggcaagaagtggagagtggaaaatcaggaaaatgtttccaacctggtgattgaggacacagagctgaaacaggtggcttacatatacaagtgtgtcaacacgacattgcaaatcaagggcaaaattaactccattacagtagataactgtaagaaacttggcctggtattcgatgacgtggtgggcattgtggagataatcaacagtaaggatgtcaaagttcaggtaatgggtaaagtgccaaccatatccatcaacaaaacagatggctgccatgcttacctgagcaagaattccctggattgtgaaatagtcagtgccaaatcttccgagatgaatgtcctcattcctacagaaggcggtgactttaatgaattcccagttcctgagcagttcaagaccctatggaacgggcagaagttggtcaccacagtgacagaaattgctggataagcgaagtgccactgggttctttgccctcccttcacaccatgggataaatctgtatcaagacggttcttttctagatttcctctacctttttgctcttaaaactgcttctctgctctgagaagcacagctacctgccttcactgaaatatacctcaggctgaaatttggggtgggatagcaggtcagttgatcttctgcaggaaggtgcagcttttccatatcagctcaaccacgccgccagtccattcttaaggaactgccgactaggactgatgatgcattttagctttgagcttttgggggttattctaccaacaaacagtccattggaaagaaaacagtccctggaattaacagatcagaatgttcacactggttaatctttttttaacaatgagcatgaaggtagcagaagctggtgtgtttccagatggttcttctaaccaaactaatttttcactgttgacaagcgaggcaagggttgcactggaccaaaggctgaggcttggccatctagcattccatacaaaattgtttcctataagcattccttttattctctattctatcctgggtctgcctcaaccgtgagataggagagtctctggtactagctgctgtagcagtgcccttcatccagggcagttaatggagtcttggaccctttctttctctgggatccctgcccagcaccttcctatagagatgactttaaaagg

SEQ ID NO: 766 - DNA, 3105 bp, Homo sapiens
  source 1..3105: mol_type = genomic DNA
gcggagcgtggcctcgatcaccaccgagagctgacggccgcccggattcccgccctcagagaatcctggcccccagtcgttccaagaccctttacggactgcagcttaaaggaaccggcctctgccattgagaccaaactgacagaggaactggtcactcttctgttctttccagagaggagcttagccagggacttctgcccttcctgggcccgggcctcgggggcgattccgggtaggtaaagcggaacgagggcgtggcctctcttgtgagcccgccctccccgtgtcgctcccgccttgagggcggggctctttcccaagtgccctctgtgagagccgggccgctctctccggggcgtggcgaagaggggcggagtcacgagcggggcggtgagacttcctgcccagtcgcgggccagcctagcgcttcagccggcggctcatttccggtgggggcgccgcgcccagtgagggcccggaagtgggtcgcgcggagattgctgggcggttcttgccggaagcggagagcggctgatcgcagtccggaggtggtccattatggctgacatgcaaaatctggtagaaagattggagagggcagtgggccgcctggaggcagtatctcatacctctgacatgcaccgtgggtatgcagacagtccttcaaaagcaggagcagctccatatgtgcaggcatttgactcgctgcttgctggtcctgtggcagagtacttgaagatcagtaaagagattgggggagacgtgcagaaacatgcggagatggtccacacaggtttgaagttggagcgagctctgttggttacagcttctcagtgtcaacagccagcagaaaataagctttccgatttgttggcacccatctcagagcagatcaaagaagtgataacctttcgggagaagaaccgaggcagcaagttgtttaatcacctgtcagctgtcagcgaaagtatccaggccctgggctgggtggctatggctcccaagcctggcccttatgtgaaagaaatgaatgatgccgccatgttttatacaaaccgagtcctcaaagagtacaaagatgtggataagaagcatgtagactgggtcaaagcttatttaagtatatggacagagctgcaggcttacattaaggagttccataccaccggactggcctggagcaaaacggggcctgtggcaaaagaactgagcggactgccatctggaccctctgccggatcatgtcctcctccccctccaccatgcccccctcctcccccagtctctaccatttcatgctcatatgagtctgcttcccgctcatcactgttcgcgcagattaatcagggggagagcattacacatgccctgaaacatgtatctgatgacatgaagactcacaagaaccctgccctgaaggctcagagtggtccagtacgcagtggccccaaaccattctctgcacctaaaccccaaaccagcccatcccccaaacgagccacaaagaaggagccagctgtacttgaactggagggcaagaagtggagagtggaaaatcaggaaaatgtttccaacctggtgattgaggacacagagctgaaacaggtggcttacatatacaagtgtgtcaacacgacattgcaaatcaagggcaaaattaactccattacagtagataactgtaagaaacttggcctggtattcgatgacgtggtgggcattgtggagataatcaacagtaaggatgtcaaagttcaggtaatgggtaaagtgccaaccatatccatcaacaaaacagatggctgccatgcttacctgagcaagaattccctggattgtgaaatagtcagtgccaaatcttccgagatgaatgtcctcattcctacagaaggcggtgactttaatgaattcccagttcctgagcagttcaagaccctatggaacgggcagaagttggtcaccacagtgacagaaattgctggataagcgaagtgccactgggttctttgccctcccttcacaccatgggataaatctgtatcaagacggttcttttctagatttcctctacctttttgctcttaaaactgcttctctgctctgagaagcacagctacctgccttcactgaaatatacctcaggctgaaatttggggtgggatagcaggtcagttgatcttctgcaggaaggtgcagcttttccatatcagctcaaccacgccgccagtccattcttaaggaactgccgactaggactgatgatgcattttagctttgagcttttgggggttattctaccaacaaacagtccattggaaagaaaacagtccctggaattaacagatcagaatgttcacactggttaatctttttttaacaatgagcatgaaggtagcagaagctggtgtgtttccagatggttcttctaaccaaactaatttttcactgttgacaagcgaggcaagggttgcactggaccaaaggctgaggcttggccatctagcattccatacaaaattgtttcctataagcattccttttattctctattctatcctgggtctgcctcaaccgtgagataggagagtctctggtactagctgctgtagcagtgcccttcatccagggcagttaatggagtcttggaccctttctttctctgggatccctgcccagcaccttcctatagagatgactttaaaaggaaaaaaaaaaaaaaaaaaacccacatgatttcaaggagtctggcattcctgaatccttcttccctgccaggtgcctgtcacctgtcttcactgcctccttttccctgtcatgctcatcagcttatggcttctgtctaagcacctgaacagaggactgaaacctccactgcaggctggttttaggtcttgaattatgtaagaatcttgcacagcactgctaatgtaaatttcagttgtttttccctctaggacaaacacttaccaaaatatgcaacttttttttggtgggaagagagattgtcctgtgatttctacccatttcctgaggcctgtggaaataaacctttatgtacttaaagttatacagaaaatagaataaagttaataccaaacttgc

SEQ ID NO: 767 - DNA, 1563 bp, Homo sapiens
  source 1..1563: mol_type = genomic DNA
ggaagcggagagcggctgatcgcagtccggaggtgaggcggaactctgagcaggtggtccattatggctgacatgcaaaatctggtagaaagattggagagggcagtgggccgcctggaggcagtatctcatacctctgacatgcaccgtgggtatgcagacagtccttcaaaaggagcagctccatatgtgcaggcatttgactcgctgcttgctggtcctgtggcagagtacttgaagatcagtaaagagattgggggagacgtgcagaaacatgcggagatggtccacacaggtttgaagttggagcgagctctgttggttacagcttctcagtgtcaacagccagcagaaaataagctttccgatttgttggcacccatctcagagcagatcaaagaagtgataacctttcgggagaagaaccgaggcagcaagttgtttaatcacctgtcagctgtcagcgaaagtatccaggccctgggctgggtggctatggctcccaagcctggcccttatgtgaaagaaatgaatgatgccgccatgttttatacaaaccgagtcctcaaagagtacaaagatgtggataagaagcatgtagactgggtcaaagcttatttaagtatatggacagagctgcaggcttacattaaggagttccataccaccggactggcctggagcaaaacggggcctgtggcaaaagaactgagcggactgccatctggaccctctgccggatcatgtcctcctccccctccaccatgcccccctcctcccccagtctctaccatttcatgctcatatgagtctgcttcccgctcatcactgttcgcgcagattaatcagggggagagcattacacatgccctgaaacatgtatctgatgacatgaagactcacaagaaccctgccctgaaggctcagagtggtccagtacgcagtggccccaaaccattctctgcacctaaaccccaaaccagcccatcccccaaacgagccacaaagaaggagccagctgtacttgaactggagggcaagaagtggagagtggaaaatcaggaaaatgtttccaacctggtgattgaggacacagagctgaaacaggtggcttacatatacaagtgtgtcaacacgacattgcaaatcaagggcaaaattaactccattacagtagataactgtaagaaacttggcctggtattcgatgacgtggtgggcattgtggagataatcaacagtaaggatgtcaaagttcaggtaatgggtaaagtgccaaccatatccatcaacaaaacagatggctgccatgcttacctgagcaagaattccctggattgtgaaatagtcagtgccaaatcttccgagatgaatgtcctcattcctacagaaggcggtgactttaatgaattcccagttcctgagcagttcaagaccctatggaacgggcagaagttggtcaccacagtgacagaaattgctggataagcgaagtgccactgggttctttgccctcccttcacaccatgggataaatctgtatcaagacggttcttttctaga

SEQ ID NO: 768 - DNA, 2964 bp, Homo sapiens
  source 1..2964: mol_type = genomic DNA
gtggcctcgatcaccaccgagagctgacggccgcccggattcccgccctcagagaatcctggcccccagtcgttccaagaccctttacggactgcagcttaaaggaaccggcctctgccattgagaccaaactgacagaggaactggtcactcttctgttctttccagagaggagcttagccagggacttctgcccttcctgggcccgggcctcgggggcgattccgggtaggtaaagcggaacgagggcgtggcctctcttgtgagcccgccctccccgtgtcgctcccgccttgagggcggggctctttcccaagtgccctctgtgagagccgggccgctctctccggggcgtggcgaagaggggcggagtcacgagcggggcggtgagacttcctgcccagtcgcgggccagcctagcgcttcagccggcggctcatttccggtgggggcgccgcgcccagtgagggcccggaagtgggtcgcgcggagattgctgggcggttcttgccggaagcggagagcggctgatcgcagtccggagcaggtggtccattatggctgacatgcaaaatctggtagaaagattggagagggcagtgggccgcctggaggcagtatctcatacctctgacatgcaccgtgggtatgcagacagtccttcaaaaggagcagctccatatgtgcaggcatttgactcgctgcttgctggtcctgtggcagagtacttgaagatcagtaaagagattgggggagacgtgcagaaacatgcggagatggtccacacaggtttgaagttggagcgagctctgttggttacagcttctcagtgtcaacagccagcagaaaataagctttccgatttgttggcacccatctcagagcagatcaaagaagtgataacctttcgggagaagaaccgaggcagcaagttgtttaatcacctgtcagctgtcagcgaaagtatccaggccctgggctgggtggctatggctcccaagcctggcccttatgtgaaagaaatgaatgatgccgccatgttttatacaaaccgagtcctcaaagagtacaaagatgtggataagaagcatgtagactgggtcaaagcttatttaagtatatggacagagctgcaggcttacattaaggagttccataccaccggactggcctggagcaaaacggggcctgtggcaaaagaactgagcggactgccatctggaccctctgccggatcatgtcctcctccccctccaccatgcccccctcctcccccagtctctaccatttcatgctcatatgagtctgcttcccgctcatcactgttcgcgcagattaatcagggggagagcattacacatgccctgaaacatgtatctgatgacatgaagactcacaagaaccctgccctgaaggctcagagtggtccagtacgcagtggccccaaaccattctctgcacctaaaccccaaaccagcccatcccccaaacgagccacaaagaaggagccagctgtacttgaactggagggcaagaagtggagagtggaaaatcaggaaaatgtttccaacctggtgattgaggacacagagctgaaacaggtggcttacatatacaagtgtgtcaacacgacattgcaaatcaagggcaaaattaactccattacagtagataactgtaagaaacttggcctggtattcgatgacgtggtgggcattgtggagataatcaacagtaaggatgtcaaagttcaggtaatgggtaaagtgccaaccatatccatcaacaaaacagatggctgccatgcttacctgagcaagaattccctggattgtgaaatagtcagtgccaaatcttccgagatgaatgtcctcattcctacagaaggcggtgactttaatgaattcccagttcctgagcagttcaagaccctatggaacgggcagaagttggtcaccacagtgacagaaattgctggataagcgaagtgccactgggttctttgccctcccttcacaccatgggataaatctgtatcaagacggttcttttctagatttcctctacctttttgctcttaaaactgcttctctgctctgagaagcacagctacctgccttcactgaaatatacctcaggctgaaatttggggtgggatagcaggtcagttgatcttctgcaggaaggtgcagcttttccatatcagctcaaccacgccgccagtccattcttaaggaactgccgactaggactgatgatgcattttagctttgagcttttgggggttattctaccaacaaacagtccattggaaagaaaacagtccctggaattaacagatcagaatgttcacactggttaatctttttttaacaatgagcatgaaggtagcagaagctggtgtgtttccagatggttcttctaaccaaactaatttttcactgttgacaagcgaggcaagggttgcactggaccaaaggctgaggcttggccatctagcattccatacaaaattgtttcctataagcattccttttattctctattctatcctgggtctgcctcaaccgtgagataggagagtctctggtactagctgctgtagcagtgcccttcatccagggcagttaatggagtcttggaccctttctttctctgggatccctgcccagcaccttcctatagagatgactttaaaaggaaaaaaaaaaaaaaaaaaacccacatgatttcaaggagtctggcattcctgaatccttcttccctgccaggtgcctgtcacctgtcttcactgcctccttttccctgtcatgctcatcagcttatggcttctgtctaagcacctgaacagaggactgaaacctccactgcaggctggttttaggtcttgaattatgtaagaatcttgcacagcactgctaatgtaaatttcagttgtttttccctctaggacaaacacttacc

SEQ ID NO: 769 - DNA, 2217 bp, Homo sapiens
  source 1..2217: mol_type = genomic DNA
gagcggctgatcgcagtccggaggtgaggcggaactctgaggtggtccattatggctgacatgcaaaatctggtagaaagattggagagggcagtgggccgcctggaggcagtatctcatacctctgacatgcaccgtgggtatgcagacagtccttcaaaagcaggagcagctccatatgtgcaggcatttgactcgctgcttgctggtcctgtggcagagtacttgaagatcagtaaagagattgggggagacgtgcagaaacatgcggagatggtccacacaggtttgaagttggagcgagctctgttggttacagcttctcagtgtcaacagccagcagaaaataagctttccgatttgttggcacccatctcagagcagatcaaagaagtgataacctttcgggagaagaaccgaggcagcaagttgtttaatcacctgtcagctgtcagcgaaagtatccaggccctgggctgggtggctatggctcccaagcctggcccttatgtgaaagaaatgaatgatgccgccatgttttatacaaaccgagtcctcaaagagtacaaagatgtggataagaagcatgtagactgggtcaaagcttatttaagtatatggacagagctgcaggcttacattaaggagttccataccaccggactggcctggagcaaaacggggcctgtggcaaaagaactgagcggactgccatctggaccctctgccggatcatgtcctcctccccctccaccatgcccccctcctcccccagtctctaccatttcatgctcatatgagtctgcttcccgctcatcactgttcgcgcagattaatcagggggagagcattacacatgccctgaaacatgtatctgatgacatgaagactcacaagaaccctgccctgaaggctcagagtggtccagtacgcagtggccccaaaccattctctgcacctaaaccccaaaccagcccatcccccaaacgagccacaaagaaggagccagctgtacttgaactggagggcaagaagtggagagtggaaaatcaggaaaatgtttccaacctggtgattgaggacacagagctgaaacaggtggcttacatatacaagtgtgtcaacacgacattgcaaatcaagggcaaaattaactccattacagtagataactgtaagaaacttggcctggtattcgatgacgtggtgggcattgtggagataatcaacagtaaggatgtcaaagttcaggtaatgggtaaagtgccaaccatatccatcaacaaaacagatggctgccatgcttacctgagcaagaattccctggattgtgaaatagtcagtgccaaatcttccgagatgaatgtcctcattcctacagaaggcggtgactttaatgaattcccagttcctgagcagttcaagaccctatggaacgggcagaagttggtcaccacagtgacagaaattgctggataagcgaagtgccactgggttctttgccctcccttcacaccatgggataaatctgtatcaagacggttcttttctagatttcctctacctttttgctcttaaaactgcttctctgctctgagaagcacagctacctgccttcactgaaatatacctcaggctgaaatttggggtgggatagcaggtcagttgatcttctgcaggaaggtgcagcttttccatatcagctcaaccacgccgccagtccattcttaaggaactgccgactaggactgatgatgcattttagctttgagcttttgggggttattctaccaacaaacagtccattggaaagaaaacagtccctggaattaacagatcagaatgttcacactggttaatctttttttaacaatgagcatgaaggtagcagaagctggtgtgtttccagatggttcttctaaccaaactaatttttcactgttgacaagcgaggcaagggttgcactggaccaaaggctgaggcttggccatctagcattccatacaaaattgtttcctataagcattccttttattctctattctatcctgggtctgcctcaaccgtgagataggagagtctctggtactagctgctgtagcagtgcccttcatccagggcagttaatggagtcttggaccctttctttctctgggatccctgcccagcaccttcctatagagatgactttaaaaggaaaaaaaaaaaaaaaaaaa

SEQ ID NO: 770 - DNA, 4822 bp, Homo sapiens
  source 1..4822: mol_type = genomic DNA
actcgcgggaaccgcaccaagcgggtggctgcaggagctcgcccatcgcccctgcgctgctcggaccgcggccacagccggactggcgggtacggcggcgacagacggattggccgagagtcccagtccgcagagtagccccggcctcgaggcggtggcgtccgcgtcctctcgtccaggagccaggacaggtgtcgcgcggcgggcgctccagggaccgcgctgaggccgcggtcgccgcccgtcccgccccgccccgccgcccgccgcccgccgagcccagcctccttgccgtcggggcgtccccaggccctgggtcggccgcggagccgatgcgcgcccgctgagcgccccagctgagcgcccccggcctgccatgaccgcgctccccggcccgctctggctcctgggcctggcgctatgcgcgctgggcgggggcggccccggcctgcgacccccgcccggctgtccccagcgacgtctgggcgcgcgcgagcgccgggacgtgcagcgcgagatcctggcggtgctcgggctgcctgggcggccccggccccgcgcgccacccgccgcctcccggctgcccgcgtccgcgccgctcttcatgctggacctgtaccacgccatggccggcgacgacgacgaggacggcgcgcccgcggagcggcgcctgggccgcgccgacctggtcatgagcttcgttaacatggtggagcgagaccgtgccctgggccaccaggagccccattggaaggagttccgctttgacctgacccagatcccggctggggaggcggtcacagctgcggagttccggatttacaaggtgcccagcatccacctgctcaacaggaccctccacgtcagcatgttccaggtggtccaggagcagtccaacagggagtctgacttgttctttttggatcttcagacgctccgagctggagacgagggctggctggtgctggatgtcacagcagccagtgactgctggttgctgaagcgtcacaaggacctgggactccgcctctatgtggagactgaggacgggcacagcgtggatcctggcctggccggcctgctgggtcaacgggccccacgctcccaacagcctttcgtggtcactttcttcagggccagtccgagtcccatccgcacccctcgggcagtgaggccactgaggaggaggcagccgaagaaaagcaacgagctgccgcaggccaaccgactcccagggatctttgatgacgtccacggctcccacggccggcaggtctgccgtcggcacgagctctacgtcagcttccaggacctcggctggctggactgggtcatcgctccccaaggctactcggcctattactgtgagggggagtgctccttcccactggactcctgcatgaatgccaccaaccacgccatcctgcagtccctggtgcacctgatgatgccagacgcagtccccaaggcgtgctgtgcacccaccaagctgagcgccacctctgtgctctactatgacagcagcaacaatgtcatcctgcgcaagcaccgcaacatggtggtcaaggcctgcggctgccactgagtccacccgcccggcccagctgcagccacccttctcatctggatcgggcccctcagaagcaggaaaccctcaaacccagccagaccccaggccggggcattgccagggaggaccctcacaaccacgtacatgaccctttctccttcatgccaggctcctatgctccccttgccctgccaggcatttgtgtgactgtcctgtttccagcccaggtggtctcaatcatcaggcagtgttctacccaaatgcaaacgcctctcccggaggcatgtcctggctggttctttggggttggcacagaagtcctgtctgaggtcctatccatgccccttactggctcaggtcgtgagatagatgtggaatgacctgagaggcacctggagcccactgttggccaccttgagctcttcaccatccatcacagggtgtggtgtgtgtagtcagggtctggttggctccccattgcctgcccgaggtgcaaggtggggtataaaactggataacccctgaagtattgtatattcatggatctgaagcactgatccactggtcacaggtagacatgtggagtcaactcaagaaaaagctgagtgaacagcatgatttagggctaaagccaatggcatttatcttcccttgtcttcctgctttgcatttgcctctgccatctaggaaagacatgtaagagcatggacattttactttggagaaacagaaaaatcttggggcttccaattgacccatctatctgccaccatgttgccccaccaggagctcagctctgtggagttttccctttgctgagcaagcatgtggttgcattgggtggcccaggatgacaatgcacagcacagatgccatcatttccctttcccctctgaatggcagacatcagtaatcaatctggaatgtttttcttccaaatctgagtggaattttcaaatgatcagcacagccactgccaacagatatgatgtaaagtgaaacctggttgccatcttctgccatgctgaggagcagtccatccctgcccgagcatgtatcggcaacatgggcagcctgtgaccgggtctggggcgaggccaggggccatcaaaaacaggctgatcaccaaagtcagtgtcaccctggatgcccagcagccctgtcctgtgtcttgggcctgtgagtcaaagaaaaggtccttttcagggagtgacaagtagtaattaggctgagttgggtggagaggtttgtctcagcctctgctgttctcggaaactgctgttctccttggagcagccactgggagttggagtgtttatttgatttctgacttgctaagcctgtaatttacctgctggaatagacagagtccagctgcccaaaccgtgtcattaaaagcagatcctgcgcccgccccatccacaggcacagcccggcagagtggttccacctccccatgggcccaaggatgcgcctctctggagttcacgtgctgcacccccagggaggggcctggggaaagctggtccagcagcaggggtggaggctggggccacactgcgggacagcagcccctccacctggaccagggagggcctccatgtgcaagcgcagaggaagagaccctcccatgtacgcaaagggcagccccaggctgtctggaagttggagaattccctatcagcacagggatctcagctctggcctggaggtgaagagacctgccttgtaggtggcttccttatctgcgcctccattttctatctgcactttttgatctccaaacaaccttcagccaaagaatctgtctaccaactcctcatagtgagccagaagcagcctcataaccctgaatgtggggctctggtggctgtcacgaagcagagttggcacataacatggaacctggccaggcatggtggctcacacctataaccccagcactttgggaggccaaggcaggcagatcacctgaagtcaggagttcaagaccatcctggccaacacagtgaaaccccatctgtactaaaaatacaagattacctgggcatggtggtgcatgcctataatcccagctactcaggaggctgaggcagaattgcttgaacctgggaggtggaggttgcagtgagcagagatcacaacattgcacttcagcctggtgacatgagcaaaactgttgtctcaacaaaatgaaattatggaacctgtttgccatcctagtatttacttaattgttccttcttaacatcaaagatggtcttctaggcaattgtaaattttaaattagccagttattttgacaattaattttttactccacctgtatctttagtgcccagccaatgatctggcatagttaggggtgcaccaagaatgtctgtaaactacctgaaggtttgtagatatggagtacaccttacccattaatcaagctgtgcatagcaggaaccaatacgagccgtgatcctcctggttcatacagaacaatggaaaaacataaggctttgtctacctagttggccatcagactttcagcaacttttatcatccagatagtcaccaaatgaaataaaatagaaaaatcccttgagcaatgaaacaattgtgaatgaacacaaagtccatgaatttaatccttatccgtttgctgagccaagcatgtgcatctgcagtgggtggcccaggctggcagcacagataccaccatttcccttttctttgctcagggcatggcctgtttatctcgttgcaccagatgagggttggaaggatgatggtggtggttgtttcagatctactgacagcaatgagaaatcaatgacagttgacaggaagagaggacgcatacaacaggcaaaagaggaatgcccagcagtcttggtccttgcggtgcaatactggccttgaggccaagtcagcaggggattcgtagtcactaacttctaactgaggcagggaagtaacatgttctggaaaaggtccaaagaaacaggaatagaggcagtgtagcaagaggcagatttttggtgccaaatagatttgaatcctggttctgcttcttcctttgtagagtatgatattggttctttcctcccaaagctattataaagactaaatatgtacacaaatctttgggatgtctgacatataaatgcttaacaataggtatttgctggtattattacaaatgaatttgcttatttttgagccacttctatgtctgtccattaaaccaaaatgtgttctgca

SEQ ID NO: 771 - DNA, 2962 bp, Homo sapiens
  source 1..2962: mol_type = genomic DNA
aaagggttgtagacatggcggccatcaggatgggaaaactgacaaccatgcctgcaggtctgatatatgcatctgtaagtgtacatgcagccaaacaagaggaatccaaaaagcagctagtgaaaccagagcagctccccatatatactgcaccaccgctccagtctaaatatgttgaagagcagcctggtcatttacaaatgggctttgcttccatccgcactgcaactggttgttacattggctggtgcaagggtgtttatgtctttgtgaaaaatgggataatggatacagtacaatttggaaaagatgcttatgtctatctgaagaatcctcctcgagattttcttccgaaaatgggagttattacagtttcaggattggcgggcttggtttcagcgagaaaaggttccaagtttaagaaaattacttatcctctgggactggccactttaggagcaactgtttgctacccagttcagtccgtaataattgctaaggtaacagcaaaaaggtatatgctacaagccagcaaatttttggagcagttaaatcattgtggacaaaaagcagcaaagaagagtcactccctaaacctaaagaaaactaagctaggatcctcttccgaaatagaagtacctgcaaaaacaactcacgtcttgaaacactcagtgcccttgccaacagaactcagctctgaagcaaagaccaaatcagaatccacttcaggtgcaacccagtttatgcctgaccccaagctcatggatcacgggcagtcccacccagaagatatagatatgtacagcactagaagctgaagtagactgcatgcagagactacacagaaaactacaagatgtgtggcgttgcaaataatgatgaaaataaatcatgtaatgggtaactgatacatagagtattacctaaaccaagtttctcccttacatttccaaatatgccatttgataaattacataagtggttaacacacaaactgtgaatgcagtgtaaacaatattaaatgattgatgaggagacttaggtagaagtattagcttgcatttgatgacctttaagggcacttaaaaaaaaatgaagacatgaattctagtgagattaaaatctaaaaatacatatatatatatgtatgtataaatacatacatatttatacatgtataaatacgtatttatacatatatgtatacatacatatttatacatatatgtataaatacatacatatttatacatatatgtatacatacatatttatacatataaacatatatttctgctctagctttcccagattaatgctagttaaattagaatggtgtatggaaaggtgtgtttccctctgtttttttttttttttttttttttttttttcccatttcctagagctggaataaaatatccatgttttatgggacttgagcttggctttgtcccttggttttgttaatgttaattcctcttaaatatctaaaaacatctctacctatttgagagggccatatgctacacaggcttcctaatactgcttagcaatccttctactggttcctaagtggtttactattgtgttccctggaagaggtattacaaacgttttattcttctcaagcctcttagaactgtcaaagttgactgtgcctcctatttcatagagaaaaaactaaattattagatatgaccattcccaaaacttcttcccatctaccttcaagacttacctcttttcagccatgcatcccccttttctaagacatgcttctctttgtgttcttgacctcattccttcccatctaagaccatattccaccctgtttaatttctagtcttcggtttctctttttacagtttctttcctccacctctacatagctgcaggtcttctctgtcttaaatcaacaataacaaaacaagacaaaaacctttccttaacttggcctcttcccttgaactattttttctctctccttcctataattgttatacttctttaaaaagtaattgttactttttgacaaaagtaaatattgtcccttttttccctactttcaagtcctctctgtcttgtgacattctggcctccatacctgcttaattttttttgagatggggtcttgctctgttgcccaggctggagtgcagtggcacaaacacagctcactgcaacctccacctcccaggatcaagcaatcctcccatctcaccctcccaagtagctgggactataggcacccgccaccatgcctaattttttgtatttttggtagtgacagggtttcaccatgttgtccaggctggtctcgaactcctgagctcaagcatctgtccgactcagcctaccacagtgttgggattacaggcgtgagccaccgcacccagcccctacttgaatttttatgtcattattgactcttcaccactctctccttgagactcacttatccctttgctctctatttttcctgcttttgttattcttcatttttcttctcttgctctgaatcccttaaatgctgaggctgctcaagtttcatccctagtcctattttctcattctatatgcacactcatttttcatttaacagacttcactggcttcaggcaccatttgttttattattcatattttcaacccccatatctctctagtgctgtagacctttatttctacttactagttatattcacctaacatcccatagatatgccaatgtcaatgtgcctaaaacaaaattgtctctacctcccgctccttcaaatctattctgtcttctctaatcctataattactctccctcaagtcatcatcatcacttttctgggttactgtaatagccttcaggctaatttgctcactgtcaatcttgctgtctctcatttcagaatatgttctgcttgcaggtgacagtaaactagttaaacaaatatttaatattagcttaagc

SEQ ID NO: 772 - DNA, 1279 bp, Homo sapiens
  source 1..1279: mol_type = genomic DNA
gtggggctgtcctaagggaagcctagtcgaactgatttgtccctctctgctctccgtctgaaaaccttggccgaaagggttgtagacatggcggccatcaggatgggaaaactgacaaccatgcctgcaggtctgatatatgcatctgtaagtgtacatgcagccaaacaagaggaatccaaaaagcagctagtgaaaccagagcagctccccatatatactgcaccaccgctccagtctaaatatgttgaagagcagcctggtcatttacaaatgggctttgcttccatccgcactgcaactggttgttacattggctggtgcaagggtgtttatgtctttgtgaaaaatgggataatggatacagtacaatttggaaaagatgcttatgtctatctgaagaatcctcctcgagattttcttccgaaaatgggagttattacagtttcaggattggcgggcttggtttcagcgagaaaaggttccaagtttaagaaaattacttatcctctgggactggccactttaggagcaactgtttgctacccagttcagtccgtaataattgctaaggtaacagcaaaaaaggtatatgctacaagccagcaaatttttggagcagttaaatcattgtggacaaaaagcagcaaagaagagtcactccctaaacctaaagaaaaaactaagctaggatcctcttccgaaatagaagtacctgcaaaaacaactcacgtcttgaaacactcagtgcccttgccaacagaactcagctctgaagcaaagaccaaatcagaatccacttcaggtgcaacccagtttatgcctgaccccaagctcatggatcacgggcagtcccacccagaagatatagatatgtacagcactagaagctgaagtagactgcatgcagagactacacagaaaactacaagatgtgtggcgttgcaaataatgatgaaaataaatcatgtaatgggtaactgatacatagagtattacctaaaccaagtttctcccttacatttccaaatatgccatttgataaattacataagtggttaacacacaaactgtgaatgcagtgtaaacaatattaaatgattgatgaggagacttaggtagaagtattagcttgcatttgatgacctttaagggcacttaaaaaaaaatgaagacatgaattctagtgagattaaaatctaaaaatacatatatatatatgtatgtataaatacatacatatttatacatgtataaatacgtatttatacatatatgt

SEQ ID NO: 773 - DNA, 5260 bp, Homo sapiens
  source 1..5260: mol_type = genomic DNA
atggctccactccgcgcgctgctgtcctacctgctgcctttgcactgtgcgctctgcgccgccgcgggcagccggaccccagagctgcacctctctggaaagctcagtgactatggtgtgacagtgccctgcagcacagactttcggggacgcttcctctcccacgtggtgtctggcccagcagcagcctctgcagggagcatggtagtggacacgccacccacactaccacgacactccagtcacctccgggtggctcgcagccctctgcacccaggagggaccctgtggcctggcagggtggggcgccactccctctacttcaatgtcactgttttcgggaaggaactgcacttgcgcctgcggcccaatcggaggttggtagtgccaggatcctcagtggagtggcaggaggattttcgggagctgttccggcagcccttacggcaggagtgtgtgtacactggaggtgtcactggaatgcctggggcagctgttgccatcagcaactgtgacggattggcgggcctcatccgcacagacagcaccgacttcttcattgagcctctggagcggggccagcaggagaaggaggccagcgggaggacacatgtggtgtaccgccgggaggccgtccagcaggagtgggcagaacctgacggggacctgcacaatgaagcctttggcctgggagaccttcccaacctgctgggcctggtgggggaccagctgggcgacacagagcggaagcggcggcatgccaagccaggcagctacagcatcgaggtgctgctggtggtggacgactcggtggttcgcttccatggcaaggagcatgtgcagaactatgtcctcaccctcatgaatatcgtagatgagatttaccacgatgagtccctgggggttcatataaatattgccctcgtccgcttgatcatggttggctaccgacagtccctgagcctgatcgagcgcgggaacccctcacgcagcctggagcaggtgtgtcgctgggcacactcccagcagcgccaggaccccagccacgctgagcaccatgaccacgttgtgttcctcacccggcaggactttgggccctcagggtatgcacccgtcactggcatgtgtcaccccctgaggagctgtgccctcaaccatgaggatggcttctcctcagccttcgtgatagctcatgagaccggccacgtgctcggcatggagcatgacggtcaggggaatggctgtgcagatgagaccagcctgggcagcgtcatggcgcccctggtgcaggctgccttccaccgcttccattggtcccgctgcagcaagctggagctcagccgctacctcccctcctacgactgcctcctcgatgacccctttgatcctgcctggccccagcccccagagctgcctgggatcaactactcaatggatgagcagtgccgctttgactttggcagtggctaccagacctgcttggcattcaggacctttgagccctgcaagcagctgtggtgcagccatcctgacaacccgtacttctgcaagaccaagaaggggcccccgctggatgggactgagtgtgcacccggcaagtggtgcttcaaaggtcactgcatctggaagtcgccggagcagacatatggccaggatggaggctggagctcctggaccaagtttgggtcatgttcgcggtcatgtgggggcggggtgcgatcccgcagccggagctgcaacaacccctccccagcctatggaggccgcctgtgcttagggcccatgttcgagtaccaggtctgcaacagcgaggagtgccctgggacctacgaggacttccgggcccagcagtgtgccaagcgcaactcctactatgtgcaccagaatgccaagcacagctgggtgccctacgagcctgacgatgacgcccagaagtgtgagctgatctgccagtcggcggacacgggggacgtggtgttcatgaaccaggtggttcacgatgggacacgctgcagctaccgggacccatacagcgtctgtgcgcgtggcgagtgtgtgcctgtcggctgtgacaaggaggtggggtccatgaaggcggatgacaagtgtggagtctgcgggggtgacaactcccactgcaggactgtgaaggggacgctgggcaaggcctccaagcaggcaggagctctcaagctggtgcagatcccagcaggtgccaggcacatccagattgaggcactggagaagtccccccaccgcattgtggtgaagaaccaggtcaccggcagcttcatcctcaaccccaagggcaaggaagccacaagccggaccttcaccgccatgggcctggagtgggaggatgcggtggaggatgccaaggaaagcctcaagaccagcgggcccctgcctgaagccattgccatcctggctctccccccaactgagggtggcccccgcagcagcctggcctacaagtacgtcatccatgaggacctgctgccccttatcgggagcaacaatgtgctcctggaggagatggacacctatgagtgggcgctcaagagctgggccccctgcagcaaggcctgtggaggagggatccagttcaccaaatacggctgccggcgcagacgagaccaccacatggtgcagcgacacctgtgtgaccacaagaagaggcccaagcccatccgccggcgctgcaaccagcacccgtgctctcagcctgtgtgggtgacggaggagtggggtgcctgcagccggagctgtgggaagctgggggtgcagacacgggggatacagtgcctgctgcccctctccaatggaacccacaaggtcatgccggccaaagcctgcgccggggaccggcctgaggcccgacggccctgtctccgagtgccctgcccagcccagtggaggctgggagcctggtcccagtgctctgccacctgtggagagggcatccagcagcggcaggtggtgtgcaggaccaacgccaacagcctcgggcattgcgagggggataggccagacactgtccaggtctgcagcctgcccgcctgtggaggaaatcaccagaactccacggtgagggccgatgtctgggaacttgggacgccagaggggcagtgggtgccacaatctgaacccctacatcccattaacaagatatcatcaacggagccctgcacgggagacaggtctgtcttctgccagatggaagtgctcgatcgctactgctccattcccggctaccaccggctctgctgtgtgtcctgcatcaagaaggcctcgggccccaaccctggcccagaccctggcccaacctcactgccccccttctccactcctggaagccccttaccaggaccccaggaccctgcagatgctgcagagcctcctggaaagccaacgggatcagaggaccatcagcatggccgagccacacagctcccaggagctctggatacaagctccccagggacccagcatccctttgcccctgagacaccaatccctggagcatcctggagcatctcccctaccacccccggggggctgccttggggctggactcagacacctacgccagtccctgaggacaaagggcaacctggagaagacctgagacatcccggcaccagcctccctgctgcctccccggtgacatgagctgtgccctgccatcccactggcacgtttacactctgtgtactgccccgtgactcccagctcagaggacacacatagcagggcaggcgcaagcacagacttcattttaaatcattcgccttcttctcgtttggggctgtgatgctctttaccccacaaagcggggtgggaggaagacaaagatcagggaaagccctaatcggagatacctcagcaagctgcccccggcgggactgaccctctcagggcccctgttggtctcccctgccaagaccagggtcaactattgctccctcctcacagaccctgggcctgggcaggtctgaatcccggctggtctgtagctagaagctgtcagggctgcctgccttcccggaactgtgaggacccctgtggaggccctgcatatttggcccctctccccagaaaggcaaagcagggccagggtaggtgggggactgttcacagccaggccgagaggaggggggcctgggaatgtggcatgaggcttcccagctgcagggctggagggggtggaacacaaggtgatcgcaggcccagctcctggaagccaagagctccatgcagttccaccagctgaggccaggcagcagaggccagtttgtctttgctggccagaagatggtgctcatggccatactctggccttgcagatgtcactagtgttacttctagtgactccagattacagactggccccccaatctcaccccagcccaccagagaagggggctcaggacaccctggaccccaagtcctcagcatccagggatttccaaactggcgctcactccctgactccaccaggatggcaacttcaattatcactctcagcctggaaggggactctgtgggacacagagggaacacgatttctcaggctgtcccttcaatcattgcccttctccgaagatcgctcctgctggagtcggacatcttcatcttctacctggctcaagctgggccagagtgtgtggttctcccaggggtggttggaccccaggactgaggaccagagtccactcatagcctggccctggagatgacaagggccacccaggccaagtgccccagggcagggtgccagcccctggcctggtgctggagtggggaagacacactcacccacggtgctgtaagggcctgagctgtgctcagctgccggccatgctacctccaagggacaggtaacagtcttagatcctctggctctcaggaagtggcagggggtcccaggacacctccggggtcttggaggatgtctcctaaactcctgccaggtgatagaggtgcttctcacttcttccttccccaaggcaaaggggctgttctgagccagcctggaggaacatgagtagtgggcccctggcctgcaacccctttggagagtggaggtcctggggggctccccgccctccccctgttgccctcccctccctgggatgctggggcacacgcggagtcattcctgtgagaaccagcctggcctgtgttaaactcttgtgccttggaaatccagatctttaaaattttatgtatttattaacatcgccattggaccccaaaa

SEQ ID NO: 774 - DNA, 5269 bp, Homo sapiens
  source 1..5269: mol_type = genomic DNA
atggctccactccgcgcgctgctgtcctacctgctgcctttgcactgtgcgctctgcgccgccgcgggcagccggaccccagagctgcacctctctggaaagctcagtgactatggtgtgacagtgccctgcagcacagactttcggggacgcttcctctcccacgtggtgtctggcccagcagcagcctctgcagggagcatggtagtggacacgccacccacactaccacgacactccagtcacctccgggtggctcgcagccctctgcacccaggagggaccctgtggcctggcagggtggggcgccactccctctacttcaatgtcactgttttcgggaaggaactgcacttgcgcctgcggcccaatcggaggttggtagtgccaggatcctcagtggagtggcaggaggattttcgggagctgttccggcagcccttacggcaggagtgtgtgtacactggaggtgtcactggaatgcctggggcagctgttgccatcagcaactgtgacggattggcgggcctcatccgcacagacagcaccgacttcttcattgagcctctggagcggggccagcaggagaaggaggccagcgggaggacacatgtggtgtaccgccgggaggccgtccagcaggagtgggcagaacctgacggggacctgcacaatgaagcctttggcctgggagaccttcccaacctgctgggcctggtgggggaccagctgggcgacacagagcggaagcggcggcatgccaagccaggcagctacagcatcgaggtgctgctggtggtggacgactcggtggttcgcttccatggcaaggagcatgtgcagaactatgtcctcaccctcatgaatatcgtagatgagatttaccacgatgagtccctgggggttcatataaatattgccctcgtccgcttgatcatggttggctaccgacagtccctgagcctgatcgagcgcgggaacccctcacgcagcctggagcaggtgtgtcgctgggcacactcccagcagcgccaggaccccagccacgctgagcaccatgaccacgttgtgttcctcacccggcaggactttgggccctcaggtatgcaagggtatgcacccgtcactggcatgtgtcaccccctgaggagctgtgccctcaaccatgaggatggcttctcctcagccttcgtgatagctcatgagaccggccacgtgctcggcatggagcatgacggtcaggggaatggctgtgcagatgagaccagcctgggcagcgtcatggcgcccctggtgcaggctgccttccaccgcttccattggtcccgctgcagcaagctggagctcagccgctacctcccctcctacgactgcctcctcgatgacccctttgatcctgcctggccccagcccccagagctgcctgggatcaactactcaatggatgagcagtgccgctttgactttggcagtggctaccagacctgcttggcattcaggacctttgagccctgcaagcagctgtggtgcagccatcctgacaacccgtacttctgcaagaccaagaaggggcccccgctggatgggactgagtgtgcacccggcaagtggtgcttcaaaggtcactgcatctggaagtcgccggagcagacatatggccaggatggaggctggagctcctggaccaagtttgggtcatgttcgcggtcatgtgggggcggggtgcgatcccgcagccggagctgcaacaacccctccccagcctatggaggccgcctgtgcttagggcccatgttcgagtaccaggtctgcaacagcgaggagtgccctgggacctacgaggacttccgggcccagcagtgtgccaagcgcaactcctactatgtgcaccagaatgccaagcacagctgggtgccctacgagcctgacgatgacgcccagaagtgtgagctgatctgccagtcggcggacacgggggacgtggtgttcatgaaccaggtggttcacgatgggacacgctgcagctaccgggacccatacagcgtctgtgcgcgtggcgagtgtgtgcctgtcggctgtgacaaggaggtggggtccatgaaggcggatgacaagtgtggagtctgcgggggtgacaactcccactgcaggactgtgaaggggacgctgggcaaggcctccaagcaggcaggagctctcaagctggtgcagatcccagcaggtgccaggcacatccagattgaggcactggagaagtccccccaccgcattgtggtgaagaaccaggtcaccggcagcttcatcctcaaccccaagggcaaggaagccacaagccggaccttcaccgccatgggcctggagtgggaggatgcggtggaggatgccaaggaaagcctcaagaccagcgggcccctgcctgaagccattgccatcctggctctccccccaactgagggtggcccccgcagcagcctggcctacaagtacgtcatccatgaggacctgctgccccttatcgggagcaacaatgtgctcctggaggagatggacacctatgagtgggcgctcaagagctgggccccctgcagcaaggcctgtggaggagggatccagttcaccaaatacggctgccggcgcagacgagaccaccacatggtgcagcgacacctgtgtgaccacaagaagaggcccaagcccatccgccggcgctgcaaccagcacccgtgctctcagcctgtgtgggtgacggaggagtggggtgcctgcagccggagctgtgggaagctgggggtgcagacacgggggatacagtgcctgctgcccctctccaatggaacccacaaggtcatgccggccaaagcctgcgccggggaccggcctgaggcccgacggccctgtctccgagtgccctgcccagcccagtggaggctgggagcctggtcccagtgctctgccacctgtggagagggcatccagcagcggcaggtggtgtgcaggaccaacgccaacagcctcgggcattgcgagggggataggccagacactgtccaggtctgcagcctgcccgcctgtggaggaaatcaccagaactccacggtgagggccgatgtctgggaacttgggacgccagaggggcagtgggtgccacaatctgaacccctacatcccattaacaagatatcatcaacggagccctgcacgggagacaggtctgtcttctgccagatggaagtgctcgatcgctactgctccattcccggctaccaccggctctgctgtgtgtcctgcatcaagaaggcctcgggccccaaccctggcccagaccctggcccaacctcactgccccccttctccactcctggaagccccttaccaggaccccaggaccctgcagatgctgcagagcctcctggaaagccaacgggatcagaggaccatcagcatggccgagccacacagctcccaggagctctggatacaagctccccagggacccagcatccctttgcccctgagacaccaatccctggagcatcctggagcatctcccctaccacccccggggggctgccttggggctggactcagacacctacgccagtccctgaggacaaagggcaacctggagaagacctgagacatcccggcaccagcctccctgctgcctccccggtgacatgagctgtgccctgccatcccactggcacgtttacactctgtgtactgccccgtgactcccagctcagaggacacacatagcagggcaggcgcaagcacagacttcattttaaatcattcgccttcttctcgtttggggctgtgatgctctttaccccacaaagcggggtgggaggaagacaaagatcagggaaagccctaatcggagatacctcagcaagctgcccccggcgggactgaccctctcagggcccctgttggtctcccctgccaagaccagggtcaactattgctccctcctcacagaccctgggcctgggcaggtctgaatcccggctggtctgtagctagaagctgtcagggctgcctgccttcccggaactgtgaggacccctgtggaggccctgcatatttggcccctctccccagaaaggcaaagcagggccagggtaggtgggggactgttcacagccaggccgagaggaggggggcctgggaatgtggcatgaggcttcccagctgcagggctggagggggtggaacacaaggtgatcgcaggcccagctcctggaagccaagagctccatgcagttccaccagctgaggccaggcagcagaggccagtttgtctttgctggccagaagatggtgctcatggccatactctggccttgcagatgtcactagtgttacttctagtgactccagattacagactggccccccaatctcaccccagcccaccagagaagggggctcaggacaccctggaccccaagtcctcagcatccagggatttccaaactggcgctcactccctgactccaccaggatggcaacttcaattatcactctcagcctggaaggggactctgtgggacacagagggaacacgatttctcaggctgtcccttcaatcattgcccttctccgaagatcgctcctgctggagtcggacatcttcatcttctacctggctcaagctgggccagagtgtgtggttctcccaggggtggttggaccccaggactgaggaccagagtccactcatagcctggccctggagatgacaagggccacccaggccaagtgccccagggcagggtgccagcccctggcctggtgctggagtggggaagacacactcacccacggtgctgtaagggcctgagctgtgctcagctgccggccatgctacctccaagggacaggtaacagtcttagatcctctggctctcaggaagtggcagggggtcccaggacacctccggggtcttggaggatgtctcctaaactcctgccaggtgatagaggtgcttctcacttcttccttccccaaggcaaaggggctgttctgagccagcctggaggaacatgagtagtgggcccctggcctgcaacccctttggagagtggaggtcctggggggctccccgccctccccctgttgccctcccctccctgggatgctggggcacacgcggagtcattcctgtgagaaccagcctggcctgtgttaaactcttgtgccttggaaatccagatctttaaaattttatgtatttattaacatcgccattggaccccaaaa

SEQ ID NO: 775 - DNA, 2477 bp, Homo sapiens
  source 1..2477: mol_type = genomic DNA
acaacgagctcgggcctcacccggatggcggctgcgacgcgcggctgccggccctggggctcgctcctcgggctgctcgggctggtctcggccgcggccgccgcctgggacctggcttccctgcgctgcaccttgggcgccttttgcgaatgcgacttccggcccgacttgccgggtctggagtgtgacctggctcagcacctggccggccagcatctggccaaggcgctggtggtgaaggcgctgaaggcctttgtgcgggacccagcccccaccaagccgctggtcctctccctgcacggctggaccggcaccggcaaatcctatgtcagctccctgctggcgcactacctcttccagggcggcctccgcagcccccgcgtgcaccacttttctcccgtcctccacttcccccaccccagccacatcgagcgctacaagaaggatctgaagagctgggtccaagggaacctcactgcctgtggccgctccctcttcctcttcgatgagatggacaagatgcccccaggcctgatggaagtcctgcggcctttcctgggctcctcctgggtggtatacgggaccaattaccgcaaagccatcttcatcttcatcaggtggggcccggctttgcagtgggcacagtgggggggccacttctcagaggttcagctctacagccttagcctgtgctcccagcagaatccagttccccatgggcttagctgggctttcccagtgccctccgccactctcagagatgacattgtcattccgcctggttgatttccctttggacattctcagcaaattctgggctcagtctttttgatcgccacttctttgtggaagccctgccaggtcaagaagttttccctcttttgtggtgaggaggacacaggcctgggaaaaataggaacagagttcttgtcctttagtcccagctctcagaatcctcgctgtgtttcctcaggcagcatggctccgcctctctgagcctctgtctctgcttctgaacagcggggccaataatgatgccccgatgccttcctggaagttcagtgagggaaagtcagttgagggacacaaaagtgttttgtaaactataaagtacgtggcatgtgtaggtgaattacaggggccatggatgtggacaccatggagggggaagtggagcgttttcagtggagttggctcctccccgcactgagccatgttcctatgtcaggtggcagcggggaagcgagggtccaatcctgccctgcgctagtcctcatctgagtctcagcctgggtcccccatggttttagcaacacgggtggcaagcagatcaaccaggtggcattggaggcgtggcgcagccggcgggaccgcgaggagatcctcctgcaggagctggagccggtcatctcccgcgcggtgctggacaacccgcaccgtgagtctggctcagcagccccctcccgggcagcttcaccccacacccaggggccaggctctcccggggtctcatgctttgcccactgacccggcagttctgagcctggctttggcactcccagctttgtgactttgggtgagccttacagcccctgagtcctacacccagaaggcggctgagggaactgaggccagcatttttcctcctgcccctgggggtttggggccggcttctcccctcttgtgaagcacaaagtcccctccccacctacccttcctgcagatggcttctcaaactcgggcatcatggaagagcgcctcctagacgcagtggtgcccttcctcccgctccagcggcaccacgtccggcactgcgtgctcaacgagctggcccagctgggcctggagccaagggatgaggttgtccaggctgtgctggacagcaccaccttcttccctgaagacgagcagctcttctcctccaacggctgcaagaccgtggcctcccgaatcgccttcttcctctgactctctgagtggtgtcctcggcccccctgatggccaggccatgcaggaaaggccaggggcctctgtcacaggaacccagagcaccaagtgagatgaacggagtgtcggctaggccacgggacagatggccaggaagggccctggcctctaaactggctcgagagcatcttggccccggccaccttccccagggaaacccctggtcaccccagaacctcactgagccttgacctccccctgcagcctgagccttcttactgtgaattataactcagggactgtggctcgtggcggtgctccctcctcagtctgccacccttgccccttgcctccttggtcgggcaccatacctcctcccctccaccccacaccctgtgtccatatcaagccaggtggagccttctcagtttccagaaatggagggactcaagctgccacttgggcctggttttagatgtttttaattttgtaaaagaaaacaagtataataaactcagctgtgggaccag

SEQ ID NO: 776 - DNA, 1523 bp, Homo sapiens
  source 1..1523: mol_type = genomic DNA
cgggcgaggcagttgactgccccacaacgagctcgggcctcacccggatggcggctgcgacgcgcggctgccggccctggggctcgctcctcgggctgctcgggctggtctcggccgcggccgccgcctgggacctggcttccctgcgctgcaccttgggcgccttttgcgaatgcgacttccggcccgacttgccgggtctggagtgtgacctggctcagcacctggccggccagcatctggccaaggcgctggtggtgaaggcgctgaaggcctttgtgcgggacccagcccccaccaagccgctggtcctctccctgcacggctggaccggcaccggcaaatcctatgtcagctccctgctggcgcactacctcttccagggcggcctccgcagcccccgcgtgcaccacttttctcccgtcctccacttcccccaccccagccacatcgagcgctacaagaaggatctgaagagctgggtccaagggaacctcactgcctgtggccgctccctcttcctcttcgatgagatggacaagatgcccccaggcctgatggaagtcctgcggcctttcctgggctcctcctgggtggtatacgggaccaattaccgcaaagccatcttcatcttcatcagcaacacgggtggcaagcagatcaaccaggtggcattggaggcgtggcgcagccggcgggaccgcgaggagatcctcctgcaggagctggagccggtcatctcccgcgcggtgctggacaacccgcaccatggcttctcaaactcgggcatcatggaagagcgcctcctagacgcagtggtgcccttcctcccgctccagcggcaccacgtccggcactgcgtgctcaacgagctggcccagctgggcctggagccaagggatgaggttgtccaggctgtgctggacagcaccaccttcttccctgaagacgagcagctcttctcctccaacggctgcaagaccgtggcctcccgaatcgccttcttcctctgactctctgagtggtgtcctcggcccccctgatggccaggccatgcaggaaaggccaggggcctctgtcacaggaacccagagcaccaagtgagatgaacggagtgtcggctaggccacgggacagatggccaggaagggccctggcctctaaactggctcgagagcatcttggccccggccaccttccccagggaaacccctggtcaccccagaacctcactgagccttgacctccccctgcagcctgagccttcttactgtgaattataactcagggactgtggctcgtggcggtgctccctcctcagtctgccacccttgccccttgcctccttggtcgggcaccatacctcctcccctccaccccacaccctgtgtccatatcaagccaggtggagccttctcagtttccagaaatggagggactcaagctgccacttgggcctggttttagatgtttttaattttgtaaaagaaaacaagtataataaactcagctgtgggaccaga

SEQ ID NO: 777 - DNA, 2575 bp, Homo sapiens
  source 1..2575: mol_type = genomic DNA
aaatgaggctgctgcggacggcctgaggatggaccccaagccctggacctgccgagcgtggcactgaggcagcggctgacgctactgtgagggaaagaaggttgtgagcagccccgcaggacccctggccagccctggccccagcctctgccggagccctctgtggaggcagagccagtggagcccagtgaggcagggctgcttggcagccaccggcctgcaactcaggaacccctccagaggccatggacaggctgccccgctgacggccagggtgaagcatgtgaggagccgccccggagccaagcaggagggaagaggcccatggagagactgcctgcaggccctggaggatggccacgacaccagctccatctacctggtgaagccggagaacaccaaccgcctcatgcaggtgtggtgcgaccagagacacgaccccgggggctggaccgtcatccagagacgcctggatggctctgttaacttcttcaggaactgggagacgtacaagcaagggtttgggaacattgacggcgaatactggctgggcctggagaacatttactggctgacgaaccaaggcaactacaaactcctggtgaccatggaggactggtccggccgcaaagtctttgcagaatacgccagtttccgcctggaacctgagagcgagtattataagctgcggctggggcgctaccatggcaatgcgggtgactcctttacatggcacaacggcaagcagttcaccaccctggacagagatcatgatgtctacacaggaaactgtgcccactaccagaagggaggctggtggtataacgcctgtgcccactccaacctcaacggggtctggtaccgcgggggccattaccggagccgctaccaggacggagtctactgggctgagttccgaggaggctcttactcactcaagaaagtggtgatgatgatccgaccgaaccccaacaccttccactaagccagctccccctcctgacctctcgtggccattgccaggagcccaccctggtcacgctggccacagcacaaagaacaactcctcaccagttcatcctgaggctgggaggaccgggatgctggattctgttttccgaagtcactgcagcggatgatggaactgaatcgatacggtgttttctgtccctcctactttccttcacaccagacagcccctcatgtctccaggacaggacaggactacagacaactctttctttaaataaattaagtctctacaataaaaacacaactgcaaagtaccttcataatatacatgtgtatgagcctcccttgtgcacgtatgtgtataccacatatatatgcatttagatatacatcacatgtgatatatctagatccatatataggtttgccttagatacctaaatacacatatattcagttctcagatgttgaagctgtcaccagcagctttgctcttaggagaaaagcatttcattagtgttgtattacttgagtctaagggtagatcacagactgtgtggtctcaactgaaaggatcacccttggcatctgtgtgcctggattcttccagaatgtctacaatgctaatctctcacatagaggttcccagcttcttaagaaccccttttggcacctaatcaaatttcaaaatccctccccccacattttcatacttttccccattctcaggacttttcaccatccatcacccacttatcccttcatttgacaccattcattaagtgccttctgtgtgtcagtccctggccactcactgcagttcaaggccccctttccgctctgctgtactcctcgcctacctactccttgccttttctgtcgcacagccccttctttccaggcgagattcctcagcttctgagtaggaaacactccgggctccaggtttctggttgggaagggaaggccaggccaaaagctccaccggccgtatagataatgtactcgcagttttgtatcttccattcatactttaacctacaggtcatttgagtcttcacacaaataataacctatctggccaggagaattatctcagaacagaagtcatcagatcatcagagcccccagatggctacagaccagagattccacgctctcaggctgactagagtccgcatctcatctccaaactacacttccctggagaacaagtgccacaaaaatgaaaacaggccacttctcaggagttgaataatcaggggtcaccggaccccttggttgatgcactgcagcatggtggctttctgagtcctgttggccaccaagtgtcagcctcagcactcccgggactattgccaagaaggggcaagggatgagtcaagaaggtgagacccttcccggtgggcacgtgggccaggctgtgtgagatgttggatgtttggtactgtccatgtctgggtgtgtgcctattacctcagcatttctcacaaagtgtaccatgtagcatgttttgtgtatataaaagggagggtttttttaaaaatatattcccagattatccttgtaatgacacgaatctgcaataaaagccatcagtgct

SEQ ID NO: 778 - DNA, 3707 bp, Homo sapiens
  source 1..3707: mol_type = genomic DNA
ggggcctgccgaggccgccaaagcgggctgggcgggaggggccaggccagctggggccggagctcgtgtgacatcaccgggcggcccgcctctgtctggggctgaggggaggcccggagcctttctggggcctgggggatcctcttgcactggtgggtggagagaagcgcctgcagccaaccagggtcaggctgtgctcacagtttcctctggcggcatgtaaaggctccacaaaggagttgggagttcaaatgaggctgctgcggacggcctgaggatggaccccaagccctggacctgccgagcgtggcactgaggcagcggctgacgctactgtgagggaaagaaggttgtgagcagccccgcaggacccctggccagccctggccccagcctctgccggagccctctgtggaggcagagccagtggagcccagtgaggcagggctgcttggcagccaccggcctgcaactcaggaacccctccagaggccatggacaggctgccccgctgacggccagggtgaagcatgtgaggagccgccccggagccaagcaggagggaagaggctttcatagattctattcacaaagaataaccaccattttgcaaggaccatgaggccactgtgcgtgacatgctggtggctcggactgctggctgccatgggagctgttgcaggccaggaggacggttttgagggcactgaggagggctcgccaagagagttcatttacctaaacaggtacaagcgggcgggcgagtcccaggacaagtgcacctacaccttcattgtgccccagcagcgggtcacgggtgccatctgcgtcaactccaaggagcctgaggtgcttctggagaaccgagtgcataagcaggagctagagctgctcaacaatgagctgctcaagcagaagcggcagatcgagacgctgcagcagctggtggaggtggacggcggcattgtgagcgaggtgaagctgctgcgcaaggagagccgcaacatgaactcgcgggtcacgcagctctacatgcagctcctgcacgagatcatccgcaagcgggacaacgcgttggagctctcccagctggagaacaggatcctgaaccagacagccgacatgctgcagctggccagcaagtacaaggacctggagcacaagtaccagcacctggccacactggcccacaaccaatcagagatcatcgcgcagcttgaggagcactgccagagggtgccctcggccaggcccgtcccccagccaccccccgctgccccgccccgggtctaccaaccacccacctacaaccgcatcatcaaccagatctctaccaacgagatccagagtgaccagaacctgaaggtgctgccaccccctctgcccactatgcccactctcaccagcctcccatcttccaccgacaagccgtcgggcccatggagagactgcctgcaggccctggaggatggccacgacaccagctccatctacctggtgaagccggagaacaccaaccgcctcatgcaggtgtggtgcgaccagagacacgaccccgggggctggaccgtcatccagagacgcctggatggctctgttaacttcttcaggaactgggagacgtacaagcaagggtttgggaacattgacggcgaatactggctgggcctggagaacatttactggctgacgaaccaaggcaactacaaactcctggtgaccatggaggactggtccggccgcaaagtctttgcagaatacgccagtttccgcctggaacctgagagcgagtattataagctgcggctggggcgctaccatggcaatgcgggtgactcctttacatggcacaacggcaagcagttcaccaccctggacagagatcatgatgtctacacaggaaactgtgcccactaccagaagggaggctggtggtataacgcctgtgcccactccaacctcaacggggtctggtaccgcgggggccattaccggagccgctaccaggacggagtctactgggctgagttccgaggaggctcttactcactcaagaaagtggtgatgatgatccgaccgaaccccaacaccttccactaagccagctccccctcctgacctctcgtggccattgccaggagcccaccctggtcacgctggccacagcacaaagaacaactcctcaccagttcatcctgaggctgggaggaccgggatgctggattctgttttccgaagtcactgcagcggatgatggaactgaatcgatacggtgttttctgtccctcctactttccttcacaccagacagcccctcatgtctccaggacaggacaggactacagacaactctttctttaaataaattaagtctctacaataaaaacacaactgcaaagtaccttcataatatacatgtgtatgagcctcccttgtgcacgtatgtgtataccacatatatatgcatttagatatacatcacatgtgatatatctagatccatatataggtttgccttagatacctaaatacacatatattcagttctcagatgttgaagctgtcaccagcagctttgctcttaggagaaaagcatttcattagtgttgtattacttgagtctaagggtagatcacagactgtgtggtctcaactgaaaggatcacccttggcatctgtgtgcctggattcttccagaatgtctacaatgctaatctctcacatagaggttcccagcttcttaagaaccccttttggcacctaatcaaatttcaaaatccctccccccacattttcatacttttccccattctcaggacttttcaccatccatcacccacttatcccttcatttgacaccattcattaagtgccttctgtgtgtcagtccctggccactcactgcagttcaaggccccctttccgctctgctgtactcctcgcctacctactccttgccttttctgtcgcacagccccttctttccaggcgagattcctcagcttctgagtaggaaacactccgggctccaggtttctggttgggaagggaaggccaggccaaaagctccaccggccgtatagataatgtactcgcagttttgtatcttccattcatactttaacctacaggtcatttgagtcttcacacaaataataacctatctggccaggagaattatctcagaacagaagtcatcagatcatcagagcccccagatggctacagaccagagattccacgctctcaggctgactagagtccgcatctcatctccaaactacacttccctggagaacaagtgccacaaaaatgaaaacaggccacttctcaggagttgaataatcaggggtcaccggaccccttggttgatgcactgcagcatggtggctttctgagtcctgttggccaccaagtgtcagcctcagcactcccgggactattgccaagaaggggcaagggatgagtcaagaaggtgagacccttcccggtgggcacgtgggccaggctgtgtgagatgttggatgtttggtactgtccatgtctgggtgtgtgcctattacctcagcatttctcacaaagtgtaccatgtagcatgttttgtgtatataaaagggagggtttttttaaaaatatattcccagattatccttgtaatgacacgaatctgcaataaaagccatcagtgctatttggatgtatctaca

SEQ ID NO: 779 - DNA, 6425 bp, Homo sapiens
  source 1..6425: mol_type = genomic DNA
atggccgctgccgccctcccgccccggccgctgctccttctgccgctagtgctgctgctgagcggccgccccacgcgcgccgacagtaaggtgtttggggacctggaccaggtgaggatgacctcggagggctccgactgccgttgcaagtgcatcatgcggcccctgagcaaggacgcgtgtagccgagtgcgcagtgggcgggcacgcgtggaggacttctacacggtggagactgtgagctcgggcactgactgccgctgctcctgtaccgcacctccctcctctctcaacccctgtgagaacgagtggaagatggagaaactcaaaaagcaggcgcccgagctcctcaagctgcagtccatggtggatctcctggagggcaccctgtacagcatggacttgatgaaggtgcacgcctacgtccacaaggtggcctcccagatgaacacactggaagagagcatcaaggccaacctgagccgggagaatgaggtggtgaaggacagcgtgcgccacctcagtgagcagttgaggcactatgagaatcactctgccatcatgctgggcatcaagaaggagctgtcccgcctgggcctccagctgctgcagaaggatgccgccgccgcccctgccacccctgccacgggcactggtagcaaggcccaggacacagctagaggaaaaggcaaggacatcagcaagtatggcagtgtgcagaaaagctttgcagacagaggcctcccaaaacctcccaaggagaagctgcttcaggtggagaagctgagaaaggagagcggcaagggcagtttcctccagcccacagccaagccccgcgccctggcccagcagcaggctgtgatccggggcttcacctactacaaggcaggcaagcaggaggtgaccgaggcggtggcagacaacaccctccagggcacttcctggctggagcaactgccgcccaaggtggagggcaggtccaactccgcagagcccaactccgcagagcaggatgaggctgagcccaggtcctccgagcgagtggacctggcttctggcacccccacttcaatccctgccaccaccaccaccgccaccaccaccccaacccccaccaccagtctcctgcccaccgagccaccttcaggtccagaagtctccagccaaggcagagaggcgagctgtgagggcaccctccgggctgtggacccccctgtgaggcaccacagctatgggcgccacgagggagcctggatgaaggaccctgcagctcgagacgacaggatctatgtcaccaactactactatggaaacagcctggtggagttccgcaacctggaaaacttcaagcaaggccgctggagtaacatgtacaagctaccctacaactggatcggcacaggccacgtggtgtaccagggcgccttctactacaaccgcgccttcaccaagaacatcatcaagtacgacctacggcagcgcttcgtggcctcctgggcgctgctgcccgacgtggtatatgaggacaccacaccttggaagtggcgcggacactcggacattgactttgccgtggacgagagcggcctgtgggtcatctaccccgccgtggacgaccgcgatgaggcccagcccgaggtgatcgtcctgagtcgcttggaccccggcgatctctccgtgcaccgggagaccacgtggaagacacggctgcggcggaactcctacgggaactgcttcctggtgtgcggcatcctgtatgccgtggacacgtacaaccagcaggaaggccaggtcgcctacgctttcgacacgcacacgggcaccgacgcacgcccccagctgccgttcctcaacgagcacgcctacaccacccagatcgactacaaccccaaggagcgggtgctgtacgcctgggacaatggccaccagctcacctacaccctccacttcgtggtctgagtggagacctgtgctccccggagaggggcagcagtgcgggaggggctttgcacagcagctcctgcaactgacccagtccgcaaatatttattgggggccagcccagggctgggactgggcatgaggtggtcaccaggattgagcttcctcagcacccagtgggtaatacttgcttccacttgcagagcaccgtgccaagcacttcccacacacttacccgtttgattctcctagcacctcccttggaggtagagatcatgaacccatttaacagacgaggagacaggctcagagaggcaccgtcccttgcctaacacctcagttgtgatcaggcaggctgtgctctcaggacagccccattttagggatgaggagacttcaccacgccctcccctccctgccctcccccatctccccggtctcccttgttctctcaacccagtctcccttcccagggccactcagaaccagaggtctttagggccagtgtactggtgtggggtggaggccctggctctgcctgccatcctagggccctgttctggctgagctgttggtggccctgggctttgggccccttagccaatgtccttgtctcttgtctttggccagccccctcagcccagcccaccccacccgctgtccggccacattccaaacctctaccgtcacctagctgctgagcagaaaccgcaccccgagagaaaatcccatcctctgttccaaggcccctgtctgctctatgctcatttttattttctcttattcttcatcagtgccgtcatttgtttctgcagcagcagctgagaaggcagccggcagctctgccagggtggggagctgagctgaggctccctctccacccagaagcactggcgttgttcacatagtcaggccttgggtcccctccctggttcatcccagagcctttgggcctggagtccgccttgtcctttttctctgggctttcaaacccacaacctttacacactcagggatacctccgggtctgccatgaataagaccctaggcccaagtctggtgtggtgccaggatggcacagtttccctcttccttgccagccctgacctggtcactgggcaggctggcccagcagcctgggggctgcagaagacatggtgtgagtagttgggtccaggggaggcatcaggccttcttctggttgcaggagagaaccagagggtgggaacggggagggaagaactgagggtctgcagactggacttttcctggctcgacccaggacttgggttgaggatgcacgggggccaccttgcccggggccactggtggctccccagagcctcagacccacacagcccagaggacgaggccttcaagcctgcccctcttctgcttttttagacagtatttttagagctggaaagaaattttctagcccaactccctgtttcatgaaagagaaaagaggctcagaaaagtttagagagcagctcagtgtcacactgggagctgggcacagccgatctccttccagaagggttctgtctgtatcctttattctccgcacatggaggctgccctacctgggaaggcaccccagcacctgtgaaggacatttactgctcatcctcacctgccccctggcccttgctgccttcattctgtcccaatgccagctccctggatgtctgtatgtttgaataccagttgccatgttaggaaggtcagctgcacagccaagagtgtaagagtgtaaagaaatgcctttttttttttttttgagttggagttttgctcttgtcgcccaggctggagtgcagtggcgcgatctcggctcactgcaacctctgccccctgggttcaagcgattctcctgcctcagcctccctagtagctgggactacagcacccaccaccacacccagctaatttttgtatttttagtagagacaggggtttcaccacgttggccaggctggtctcgaactcctgaccttaggtgatccgcccgcctcagcctcccaaagtgttgggattacaggcatgagccactgcgcctggccagcaaatgctttttgtgcagaatacacttctttcaggcattgtcaggtgctgttttgtttaagctctaactcacccctggaatacaggggaatgatgacaaccagcccagccaggcctgactcatcatggtcacatccagcccccacccccggccaactaaccactgcaggctcctcttccagactcaccagggggcctcgaggccccggcatctcccttggccctgggtgtgggttttacaagactgtgtctttcatgacatcatagcccaaccatgtgagaagaaggagaaggcccccctttcttcattaatctgaaaaaaaggaaagtgagaataggctgatttttaaaagttaaggggcaagcagcattgcattctgggggaacgatcctggccacagccgccaaacaaacattcactaggcctcttctgttttcatacccttgtaagtgggttatgtggtgggtatggtcagttttttcttttttcttttcttttcttttttttgagacagagtttcgcttttgttgcccgggctggaatgcaatggcgcgattcagctcactgcaatctccgcctcccgggttcaagtgattctcctgccttagcctcctgaaaagctgggattacagggccctgccaccaagcccagctaattgtatttttagtagagacaggatttcaccatgttggccaggccagtctcaaactcctgacctcaggtgatccacctgcctcagcctcccagactgttgggattacaggcatgagccaccacgcctggccagtttcttcattttacatatggtcacattggcgcctagaacagttaggtcgctcgtcacataggcagttaagtggagaaccaggtttcaaaatcaggtaagaaaaccatcatcattaactgagcaccagctgtgctaagcctgccacgggcgtatccttgcagcctcacaacagtgggaggtctgtatcctgaatgtcctcattttacagatgaggacattgaggagaagagacttacccaggctcacacagcagctcagcctgttccaggcgctggtcagtgcgtgttctttgccaccagcctgtcactccagtggcagctccagaaacggaggctgttgcttttatccctaaactgcatccacagagaagccccaagaaggaggttggggccagctcataaaaagcctgaatgccaagccaaggagtggatgcctccagtcatatttagaacaaagtcaagtataaatttacagagaaaaaattctaagacagttggatgttgtcctgttggtgaggaagggaaaggtttttcttgtagggaactggaaccagcccacaactgcacacttgtgagctgtcatggaaacctgatccccaacagcttttgaggttgtttgtttgtttgtttgtttacctgtcttgggctttgttgcttttggcaaaaggtacttcaaacaagggagggcctggactgagggggaccaggtcttcttgctgacctcgtctacaaaggcaaaggaaggcaaaggaagctgtctcgggtgtttctgaacaacgtgactcatgaggggctttggctacctcttgcgttccccctagagatgtccaggccttacatttaatcggctttctctgcggtggggtagagaatggagctcccgccttgcgggcagtgctaaaggtggagctgggggattttcctgggaatgatttgagggctcttgaaagcccatgtgttccaaagcgtctttaactctgggatagcattggaagccgctgtcatgacaggacatggcactggatggctggcagagagccctggctgggagttagggagccctgggttggaatccagccccacctcttttatgccacaggtttggtcaagttctctcccgctcagggtagggctgtgaactccctcttacagctaagaacatgcagcttagtgaggacaagacccttctagagctttacccctaatccccccccaggagccccgaggccggcattattcctccccattacaggtgatgagcctcaaattcagagagcttaagcaacctgctcagggtcacgtctccaacaggcagtagagtcaaggtataaaccaggtctgtttttgtaccagagtcccagactaactgttggtaggaatcttgtaaccagtcatgttttcttccttgttttggccgctgggaagctcaaagtcaaattcgagacccttttttttccaattgtgctgagtctcctactagactcgcttcattctagctttctgcttttacctttaccctaatctttttatttttatgctattgtactttatttttgtaagttgctgagatatctgttttgcaacaagatgggctatatctaaataaagacatgatcaaaggtttgattt

SEQ ID NO: 780 - DNA, 5012 bp, Homo sapiens
  source 1..5012: mol_type = genomic DNA
gtgccgggaagtggctccagggagaagaggcctcttccctcacccgctgtgggagctgcgccccgaaagcctgccccggcacgtcgggctctcctgacccgccaagaccagagagccgttggcgccctccgcccgggcctgccggtccgtttattttaagaagctttgtgcgcctgctgtggggatttctgatccaggctgcgaagaatttcgaagtctggaaaatagcaactgtgtttgtttctaaaggatcttctcctgacccagcatcgctcatcacaatgaagaaccaagacaaaaagaacggggctgccaaacaatccaatccaaaaagcagcccaggacaaccggaagcaggacccgagggagcccaggagcggcccagccaggcggctcctgcagtagaagcagaaggtcccggcagcagccaggctcctcggaagccggagggggctcaagccagaacggctcagtctggggcccttcgtgatgtctctgaggagctgagccgccaactggaagacatactgagcacatactgtgtggacaataaccaggggggccccggcgaggatggggcacagggtgagccggctgaacccgaagatgcagagaagtcccggacctatgtggcaaggaatggggagcctgaaccaactccagtagtcaatggagagaaggaaccctccaagggggatccaaacacagaagagatccggcagagtgacgaggtcggagaccgagaccatcgaaggccacaggagaagaaaaaagccaagggtttggggaaggagatcacgttgctgatgcagacattgaatactctgagtaccccagaggagaagctggctgctctgtgcaagaagtatgctgaactgctggaggagcaccggaattcacagaagcagatgaagctcctacagaaaaagcagagccagctggtgcaagagaaggaccacctgcgcggtgagcacagcaaggccgtcctggcccgcagcaagcttgagagcctatgccgtgagctgcagcggcacaaccgctccctcaaggaagaaggtgtgcagcgggcccgggaggaggaggagaagcgcaaggaggtgacctcgcacttccaggtgacactgaatgacattcagctgcagatggaacagcacaatgagcgcaactccaagctgcgccaagagaacatggagctggctgagaggctcaagaagctgattgagcagtatgagctgcgcgaggagcatatcgacaaagtcttcaaacacaaggacctacaacagcagctggtggatgccaagctccagcaggcccaggagatgctaaaggaggcagaagagcggcaccagcgggagaaggattttctcctgaaagaggcagtagagtcccagaggatgtgtgagctgatgaagcagcaagagacccacctgaagcaacagcttgccctatacacagagaagtttgaggagttccagaacacactttccaaaagcagcgaggtattcaccacattcaagcaggagatggaaaagatgactaagaagatcaagaagctggagaaagaaaccaccatgtaccggtcccggtgggagagcagcaacaaggccctgcttgagatggctgaggagaaaacagtccgggataaagaactggagggcctgcaggtaaaaatccaacggctggagaagctgtgccgggcactgcagacagagcgcaatgacctgaacaagagggtacaggacctgagtgctggtggccagggctccctcactgacagtggccctgagaggaggccagaggggcctggggctcaagcacccagctcccccagggtcacagaagcgccttgctacccaggagcaccgagcacagaagcatcaggccagactgggcctcaagagcccacctccgccagggcctagagagcctggtgttgggtcatgctgggaagggagcggcagcccagccaggcctggcccataaaaggctcccatgctgagcagcccattgctgaagccaggatgttctgacctggctggcatctggcacttgcaattttggattttgtgggtcagttttacgtacatagggcattttgcaaggccttgcaaatgcatttatacctgtaagtgtacagtgggcttgcattggggatgggggtgtgtacagatgaagtcagtggcttgtctgtgagctgaagagtcttgagaggggctgtcatctgtagctgccatcacagtgagttggcagaagtgacttgagcatttctctgtctgatttgaggctcagacccctccctgcccttcagagctcaagacaagtaatacacccaggtcttgactgcatttgtcttgtgagcagggcttgcttggtcagctcaggccctcctagctgctctggaggctcctttgattctctagacctggaaaaggtgtccctaggcagagccctggcagggcgctcagagctggggatttcctgcctggaacaagggacctggagaatgtttttgcgtgggatgatgtgctggtcaggagccccttgggcatcgcttcccctgccctttggtagtgccaggaccaggccaatgatgcttctcagtagccttatcattcacaggtgcctctctagcctgcacaaatgattgacaagagatcacccaaaggattatttctgaaggtgtttttttctttatttctttttctttttttttttttttctttttcttttttttttgcacatgacagtgtttgtattgaggaccttccaaggaagagggatgctgtagcagtggtgcctgggtgcctggcctccagtgtcccacctccttcaccaccccacttggctcctttgccatcttgatgctgaggtttcctgtttggtgagatcaggttgtttgtggtaaaagaaaggaaagggcttctgatggctttgccacaagcttacctgtgggtttcagtcctgagaggccaccaccagttcccatcagcactgtctccatgcagcagttgctgggtcccatgtccagctgcctctttggcttcatgggtttttctgcttcctgcccccacccccacatgtgcaatcctcaagatttgtcctgattctatttcctggcacctccctgcctgtccttggggattctacttcttcctgtgtgggagcccatagctgttgtctaacaggtaagaaatgaaattgaactattgactgggccccagaaatccataaaatggctgcagacagttgtttctgtgtcctgttctacccccactccagtacataactactatgtactgtgtagagccattctatatgctgaatgttctgctgttgcaaacttgccagggtattagccagtgtttgtgccaagcagttttctgggacaacagaatgactcagaccaagatggataggatggttagggctttgcttcttgctgtttttctttgaagctagttcattgtcctgcaggtcccttcatcttccatacctagcccactcttttagcccttaccttaaatctctcagataagttggttcacaaagaatgttaagtactgaatcatgtgtgactgagaccagagatggcaaatgaatggcacaccatttctccttctcctgccccagggcaggtaccactgatctgcatcagagttgcctgctattctctggtgtatccttcacatctaggtgccctcaagcagctgtgtgagtgttgagatctctgccatctctggctgagatactgctgtcctgtgaagtgtttcccatgacctttttcttcccctttgaatccctctgtctggagtagtccttgcctcttcctgctccagtagggccttttccctaccccagcccctgtgccaggctaagctggtacaagagctgccaacctcacagagtgtttgctaggcgagagaggtgcagggaagaggcagaggtatgcaccttcccccttgaagagaggggaaaggcctacagtggcccacataattgcctgactcacacttcagctacctcttaatgcctgtggagggactggagctgctggatcccagtgtggtggtgtaggaggccacagtgagcaggtggccccagctgggtttcccaggtcaggaatgtgggccccaggcaaggtgcagcctttgctcacagctccatccatgtctagaccttcaggccagtctgcagatgaggttccctacctttttcttctcttcattgaccaaatcaaccaatcactacagctgctctgcttctgctttccaaagtagcccaggtcctgggccagatgcaggggaggtgcctatccatgagtgaaggccagtgtcttcctcacctgggtgggtcccacacttgtgacctcagttttaggaccaagatctgtgttggtttcttagattgctagcttttcctccaggggaccacagcaggtgaagctcaagagcgcatggctctgctaatagtaaattgttttcagggccttgtccagctgagagcttcatgtccaccagattctgagaggtgtcagcagcactttttttttttatttgttgtttgttttccatgaggttatcggaccatgggctgagctcaggcactttctgtaggagactgttatttctgtaaagatggttatttaaccctcctccaccccatcacggtggccctgagggctgacccggaggccagtggagctgcctggtgtccacgggggagggccaaggcctgctgagctgattctccagctgctgccccagcctttccgccttgcacagcacagaggtggtcaccccagggacagccaggcacctgctcctcttgcccttcctgggggaagggagctgccttctgtccctgtaactgctttccttatggcccagcccggccactcagacttgtttgaagctgcactggcagcttttttgtctcctttgggtattcacaacagccagggacttgattttgatgtattttaaaccacattaaataaagagtctgttgcctta

SEQ ID NO: 781 - DNA, 4854 bp, Homo sapiens
  source 1..4854: mol_type = genomic DNA
gaggcgggagcaggcggctggccggcagcagttactcggggtttccggtgcgaggccagaggtggggaagccatcggacgtcggcggtgaggatcttctcctgacccagcatcgctcatcacaatgaagaaccaagacaaaaagaacggggctgccaaacaatccaatccaaaaagcagcccaggacaaccggaagcaggacccgagggagcccaggagcggcccagccaggcggctcctgcagtagaagcagaaggtcccggcagcagccaggctcctcggaagccggagggggctcaagccagaacggctcagtctggggcccttcgtgatgtctctgaggagctgagccgccaactggaagacatactgagcacatactgtgtggacaataaccaggggggccccggcgaggatggggcacagggtgagccggctgaacccgaagatgcagagaagtcccggacctatgtggcaaggaatggggagcctgaaccaactccagtagtcaatggagagaaggaaccctccaagggggatccaaacacagaagagatccggcagagtgacgaggtcggagaccgagaccatcgaaggccacaggagaagaaaaaagccaagggtttggggaaggagatcacgttgctgatgcagacattgaatactctgagtaccccagaggagaagctggctgctctgtgcaagaagtatgctgaactgctggaggagcaccggaattcacagaagcagatgaagctcctacagaaaaagcagagccagctggtgcaagagaaggaccacctgcgcggtgagcacagcaaggccgtcctggcccgcagcaagcttgagagcctatgccgtgagctgcagcggcacaaccgctccctcaaggaagaaggtgtgcagcgggcccgggaggaggaggagaagcgcaaggaggtgacctcgcacttccaggtgacactgaatgacattcagctgcagatggaacagcacaatgagcgcaactccaagctgcgccaagagaacatggagctggctgagaggctcaagaagctgattgagcagtatgagctgcgcgaggagcatatcgacaaagtcttcaaacacaaggacctacaacagcagctggtggatgccaagctccagcaggcccaggagatgctaaaggaggcagaagagcggcaccagcgggagaaggattttctcctgaaagaggcagtagagtcccagaggatgtgtgagctgatgaagcagcaagagacccacctgaagcaacagcttgccctatacacagagaagtttgaggagttccagaacacactttccaaaagcagcgaggtattcaccacattcaagcaggagatggaaaagatgactaagaagatcaagaagctggagaaagaaaccaccatgtaccggtcccggtgggagagcagcaacaaggccctgcttgagatggctgaggagaaaacagtccgggataaagaactggagggcctgcaggtaaaaatccaacggctggagaagctgtgccgggcactgcagacagagcgcaatgacctgaacaagagggtacaggacctgagtgctggtggccagggctccctcactgacagtggccctgagaggaggccagaggggcctggggctcaagcacccagctcccccagggtcacagaagcgccttgctacccaggagcaccgagcacagaagcatcaggccagactgggcctcaagagcccacctccgccagggcctagagagcctggtgttgggtcatgctgggaagggagcggcagcccagccaggcctggcccataaaaggctcccatgctgagcagcccattgctgaagccaggatgttctgacctggctggcatctggcacttgcaattttggattttgtgggtcagttttacgtacatagggcattttgcaaggccttgcaaatgcatttatacctgtaagtgtacagtgggcttgcattggggatgggggtgtgtacagatgaagtcagtggcttgtctgtgagctgaagagtcttgagaggggctgtcatctgtagctgccatcacagtgagttggcagaagtgacttgagcatttctctgtctgatttgaggctcagacccctccctgcccttcagagctcaagacaagtaatacacccaggtcttgactgcatttgtcttgtgagcagggcttgcttggtcagctcaggccctcctagctgctctggaggctcctttgattctctagacctggaaaaggtgtccctaggcagagccctggcagggcgctcagagctggggatttcctgcctggaacaagggacctggagaatgtttttgcgtgggatgatgtgctggtcaggagccccttgggcatcgcttcccctgccctttggtagtgccaggaccaggccaatgatgcttctcagtagccttatcattcacaggtgcctctctagcctgcacaaatgattgacaagagatcacccaaaggattatttctgaaggtgtttttttctttatttctttttctttttttttttttttctttttcttttttttttgcacatgacagtgtttgtattgaggaccttccaaggaagagggatgctgtagcagtggtgcctgggtgcctggcctccagtgtcccacctccttcaccaccccacttggctcctttgccatcttgatgctgaggtttcctgtttggtgagatcaggttgtttgtggtaaaagaaaggaaagggcttctgatggctttgccacaagcttacctgtgggtttcagtcctgagaggccaccaccagttcccatcagcactgtctccatgcagcagttgctgggtcccatgtccagctgcctctttggcttcatgggtttttctgcttcctgcccccacccccacatgtgcaatcctcaagatttgtcctgattctatttcctggcacctccctgcctgtccttggggattctacttcttcctgtgtgggagcccatagctgttgtctaacaggtaagaaatgaaattgaactattgactgggccccagaaatccataaaatggctgcagacagttgtttctgtgtcctgttctacccccactccagtacataactactatgtactgtgtagagccattctatatgctgaatgttctgctgttgcaaacttgccagggtattagccagtgtttgtgccaagcagttttctgggacaacagaatgactcagaccaagatggataggatggttagggctttgcttcttgctgtttttctttgaagctagttcattgtcctgcaggtcccttcatcttccatacctagcccactcttttagcccttaccttaaatctctcagataagttggttcacaaagaatgttaagtactgaatcatgtgtgactgagaccagagatggcaaatgaatggcacaccatttctccttctcctgccccagggcaggtaccactgatctgcatcagagttgcctgctattctctggtgtatccttcacatctaggtgccctcaagcagctgtgtgagtgttgagatctctgccatctctggctgagatactgctgtcctgtgaagtgtttcccatgacctttttcttcccctttgaatccctctgtctggagtagtccttgcctcttcctgctccagtagggccttttccctaccccagcccctgtgccaggctaagctggtacaagagctgccaacctcacagagtgtttgctaggcgagagaggtgcagggaagaggcagaggtatgcaccttcccccttgaagagaggggaaaggcctacagtggcccacataattgcctgactcacacttcagctacctcttaatgcctgtggagggactggagctgctggatcccagtgtggtggtgtaggaggccacagtgagcaggtggccccagctgggtttcccaggtcaggaatgtgggccccaggcaaggtgcagcctttgctcacagctccatccatgtctagaccttcaggccagtctgcagatgaggttccctacctttttcttctcttcattgaccaaatcaaccaatcactacagctgctctgcttctgctttccaaagtagcccaggtcctgggccagatgcaggggaggtgcctatccatgagtgaaggccagtgtcttcctcacctgggtgggtcccacacttgtgacctcagttttaggaccaagatctgtgttggtttcttagattgctagcttttcctccaggggaccacagcaggtgaagctcaagagcgcatggctctgctaatagtaaattgttttcagggccttgtccagctgagagcttcatgtccaccagattctgagaggtgtcagcagcactttttttttttatttgttgtttgttttccatgaggttatcggaccatgggctgagctcaggcactttctgtaggagactgttatttctgtaaagatggttatttaaccctcctccaccccatcacggtggccctgagggctgacccggaggccagtggagctgcctggtgtccacgggggagggccaaggcctgctgagctgattctccagctgctgccccagcctttccgccttgcacagcacagaggtggtcaccccagggacagccaggcacctgctcctcttgcccttcctgggggaagggagctgccttctgtccctgtaactgctttccttatggcccagcccggccactcagacttgtttgaagctgcactggcagcttttttgtctcctttgggtattcacaacagccagggacttgattttgatgtattttaaaccacattaaataaagagtctgttgcctta

SEQ ID NO: 782 - DNA, 2190 bp, Homo sapiens
  source 1..2190: mol_type = genomic DNA
cctgggtgcaaccagtcacagctctgcagaggttactgtgattttgcccctgaaggatctgtccacaacttaggaactcacacagcttttggcctgagcccccgttaccaagagaaaggaggtttttgccaaggactccaaggggagtgcacttgatgctggtcgggacccaaagcgcccagccctccctgagacattgtgtgagtcgggctgggcctcaaacacggcccccactgccccaccccagccagggtggtgcttgtgtgggaaggactttaaatccagctgccagacccctggacgggagaaggagagacggctggccaccatgcacggctcctgcagtttcctgatgcttctgctgccgctactgctactgctggtggccaccacaggccccgttggagccctcacagatgaggagaaacgtttgatggtggagctgcacaacctctaccgggcccaggtatccccgacggcctcagacatgctgcacatgagatgggacgaggagctggccgccttcgccaaggcctacgcacggcagtgcgtgtggggccacaacaaggagcgcgggcgccgcggcgagaatctgttcgccatcacagacgagggcatggacgtgccgctggccatggaggagtggcaccacgagcgtgagcactacaacctcagcgccgccacctgcagcccaggccagatgtgcggccactacacgcaggtggtatgggccaagacagagaggatcggctgtggttcccacttctgtgagaagctccagggtgttgaggagaccaacatcgaattactggtgtgcaactatgagcctccggggaacgtgaaggggaaacggccctaccaggaggggactccgtgctcccaatgtccctctggctaccactgcaagaactccctctgtgaacccatcggaagcccggaagatgctcaggatttgccttacctggtaactgaggccccatccttccgggcgactgaagcatcagactctaggaaaatgggtactccttcttccctagcaacggggattccggctttcttggtaacagaggtctcaggctccctggcaaccaaggctctgcctgctgtggaaacccaggccccaacttccttagcaacgaaagacccgccctccatggcaacagaggctccaccttgcgtaacaactgaggtcccttccattttggcagctcacagcctgccctccttggatgaggagccagttaccttccccaaatcgacccatgttcctatcccaaaatcagcagacaaagtgacagacaaaacaaaagtgccctctaggagcccagagaactctctggaccccaagatgtccctgacaggggcaagggaactcctaccccatgcccaggaggaggctgaggctgaggctgagttgcctccttccagtgaggtcttggcctcagtttttccagcccaggacaagccaggtgagctgcaggccacactggaccacacggggcacacctcctccaagtccctgcccaatttccccaatacctctgccaccgctaatgccacgggtgggcgtgccctggctctgcagtcgtccttgccaggtgcagagggccctgacaagcctagcgtcgtgtcagggctgaactcgggccctggtcatgtgtggggccctctcctgggactactgctcctgcctcctctggtgttggctggaatcttctgaaggggataccactcaaagggtgaagaggtcagctgtcctcctgtcatcttccccaccctgtccccagcccctaaacaagatacttcttggttaaggccctccggaagggaaaggctacggggcatgtgcctcatcacaccatccatcctggaggcacaaggcctggctggctgcgagctcaggaggccgcctgaggactgcacaccgggcccacacctctcctgcccctccctcctgagtcctgggggtgggaggatttgagggagctcactgcctacctggcctggggctgtctgcccacacagcatgtgcgctctccctgagtgcctgtgtagctggggatggggattcctaggggcagatgaaggacaagccccactggagtggggttctttgagtgggggaggcagggacgagggaaggaaagtaactcctgactctccaataaaaacctgtccaacctgtggcaa

SEQ ID NO: 783 - DNA, 573 bp, Homo sapiens
  source 1..573: mol_type = genomic DNA
acacccacatggtcggcgtgcaggatatttcgctggaccctagaaaagccaccacgacctgtgggccatgatgctaccccaatggctgctgctgctgttccttctcttcttctttctcttcctcctcaccaggggctcactttctccaacaaaatacaaccttttggagctcaaggagtcttgcatccggaaccaggactgcgagactggctgctgccaacgtgctccagacaattgcgagtcgcactgcgcggagaaggggtccgagggcagtctgtgtcaaacgcaggtgttctttggccaatatagagcgtgtccctgcctgcggaacctgacttgtatatattcaaagaatgagaaatggcttagcatcgcctatggccgttgtcagaaaattggaaggcagaagttggctaagaaaatgttcctagtgctccctccttcttgctgcctcctcctcctccacctgctctcctccctacccagagctctgtgttcaccctgttccccagagcctccaccatgagtggagggaagtggggagtgattgaaataaagagctttttcaatgtt

SEQ ID NO: 784 - DNA, 602 bp, Homo sapiens
  source 1..602: mol_type = genomic DNA
ttacatggtgttcccacagctgggaggacacccacatggtcggcgtgcaggatatttcgctggaccctagaaaagccaccacgacctgtgggccatgatgctaccccaatggctgctgctgctgttccttctcttcttctttctcttcctcctcaccaggggctcactttctccaacaaaatacaaccttttggagctcaaggagtcttgcatccggaaccaggactgcgagactggctgctgccaacgtgctccagacaattgcgagtcgcactgcgcggagaaggggtccgagggcagtctgtgtcaaacgcaggtgttctttggccaatatagagcgtgtccctgcctgcggaacctgacttgtatatattcaaagaatgagaaatggcttagcatcgcctatggccgttgtcagaaaattggaaggcagaagttggctaagaaaatgttcttctagtgctccctccttcttgctgcctcctcctcctccacctgctctcctccctacccagagctctgtgttcaccctgttccccagagcctccaccatgagtggagggaagtggggagtgattgaaataaagagctttttcaatgtt

SEQ ID NO: 785 - DNA, 1548 bp, Homo sapiens
  source 1..1548: mol_type = genomic DNA
gacgccttggaggacttggaacacctgtaacaggacaaggagttctgctcaggcacgtggccacagaaaactacttaggaagcctgtggtgagaacaacaacagtgcctgagaatcccacggctctggggaagtgagccccgaggatgaggctgctcgcctggctgattttcctggctaactggggaggtgccagggctgaaccagggaagttctggcacatcgctgacctgcaccttgaccctgactacaaggtatccaaagaccccttccaggtgtgcccatcagctggatcccagccagtgcccgacgcaggcccctggggtgactacctctgtgattctccctgggccctcatcaactcctccatctatgccatgaaggagattgagccagagccagacttcattctctggactggtgatgacacgcctcatgtgcccgatgagaaactgggagaggcagctgtactggaaattgtggaacgcctgaccaagctcatcagagaggtctttccagatactaaagtctatgctgctttgggaaatcatgattttcaccccaaaaaccagttcccagctggaagtaacaacatctacaatcagatagcagaactatggaaaccctggcttagtaatgagtccatcgctctcttcaaaaaaggtgccttctactgtgagaagctgccgggtcccagcggggctgggcgaattgtggtcctcaacaccaatctgtactataccagcaatgcgctgacagcagacatggcggaccctggccagcagttccagtggctggaagatgtgctgaccgatgcatccaaagctggggacatggtgtacattgtcggccacgtgcccccggggttctttgagaagacgcaaaacaaggcatggttccgggagggcttcaatgaaaaatacctgaaggtggtccggaagcatcatcgcgtcatagcagggcagttcttcgggcaccaccacaccgacagctttcggatgctctatgatgatgcaggtgtccccataagcgccatgttcatcacacctggagtcaccccatggaaaaccacattacctggagtggtcaatggggccaacaatccagccatccgggtgttcgaatatgaccgagccacactgagcctgaaggtcaggagtcctgcggaggccagaggaggagggtgggaggggcttaaatgcatcaccaccttccctcactctcagcttatccaccttcccctgaccactgagcctcaggaaggttgagctccttccacccttctccagctcaggatcagaaccctggaggcacctgccaccgagtcagggcagtgcctcaccaagtcaccttttcccctggatgactgtcacagcttcatacctggtctccctgcctctggccctgccctgctatggcccatccgctacacaagagagaagaaactaatctcctatagcaccactttcatcttgtctccgtcctgctcaaaaaccttcagtggctccccagtgccttcaagataaagttgtgtctccttgacctagta

SEQ ID NO: 786 - DNA, 1955 bp, Homo sapiens
  source 1..1955: mol_type = genomic DNA
ataccctgctgggcaaaggaggaagagccagaggatccagacgccttggaggacttggaacacctgtaacaggacaaggagttctgctcaggcacgtggccacagaaaactacttaggaagcctgtggtgagaacaacaacagtgcctgagaatcccacggctctggggaagtgagccccgaggatgaggctgctcgcctggctgattttcctggctaactggggaggtgccagggctgaaccagaggaagcgcaaggaccatgtgcccaagagaaaggcaaagggcctcccccaacatccatcctggccagcctggctccgggcttggaagcagggaagttctggcacatcgctgacctgcaccttgaccctgactacaaggtatccaaagaccccttccaggtgtgcccatcagctggatcccagccagtgcccgacgcaggcccctggggtgactacctctgtgattctccctgggccctcatcaactcctccatctatgccatgaaggagattgagccagagccagacttcattctctggactggtgatgacacgcctcatgtgcccgatgagaaactgggagaggcagctgtactggaaattgtggaacgcctgaccaagctcatcagagaggtctttccagatactaaagtctatgctgctttgggaaatcatgattttcaccccaaaaaccagttcccagctggaagtaacaacatctacaatcagatagcagaactatggaaaccctggcttagtaatgagtccatcgctctcttcaaaaaaggtgccttctactgtgagaagctgccgggtcccagcggggctgggcgaattgtggtcctcaacaccaatctgtactataccagcaatgcgctgacagcagacatggcggaccctggccagcagttccagtggctggaagatgtgctgaccgatgcatccaaagctggggacatggtgtacattgtcggccacgtgcccccggggttctttgagaagacgcaaaacaaggcatggttccgggagggcttcaatgaaaaatacctgaaggtggtccggaagcatcatcgcgtcatagcagggcagttcttcgggcaccaccacaccgacagctttcggatgctctatgatgatgcaggtgtccccataagcgccatgttcatcacacctggagtcaccccatggaaaaccacattacctggagtggtcaatggggccaacaatccagccatccgggtgttcgaatatgaccgagccacactgagcctgaaggacatggtgacctacttcatgaacctgagccaggcgaatgctcaggggacgccgcgctgggagctcgagtaccagctgaccgaggcctatggggtgccggacgccagcgcccactccatgcacacagtgctggaccgcatcgctggcgaccagagcacactgcagcgctactacgtctataactcagtcagctactctgctggggtctgcgacgaggcctgcagcatgcagcacgtgtgtgccatgcgccaggtggacattgacgcttacaccacctgtctgtatgcctctggcaccacgcccgtgccccagctcccgctgctgctgatggccctgctgggcctgtgcacgctcgtgctgtgacctgccaggctcaccttcttcctggtaacgggtaacgggggcagcgcccaggatcacccagagctgggccttccaccatttcctccgcgcctgaggagtgaactgaaataggacaaccgaatcaggaagcgaagccccaggagctgcagccatccgtgatcgcgccactgcactccagcctgggtgacaaagccagactctctccaaaaacaaaccagaaacagaaaagaaatgacgacccaagacccccctacaagcatacttcttttgcgtattatgtttaactcacaaaacaaagctcatcatgcgtttg

SEQ ID NO: 787 - DNA, 1878 bp, Homo sapiens
  source 1..1878: mol_type = genomic DNA
ccagatcataccctgctgggcaaaggaggaagagccagaggatccagacgccttggaggacttggaacacctgtaacaggacaaggagttctgctcaggcacgtggccacagaaaactacttaggaagcctgtggtgagaacaacaacagtgcctgagaatcccacggctctggggaagtgagccccgaggatgaggctgctcgcctggctgattttcctggctaactggggaggtgccagggctgaaccagggaagttctggcacatcgctgacctgcaccttgaccctgactacaaggtatccaaagaccccttccaggtgtgcccatcagctggatcccagccagtgcccgacgcaggcccctggggtgactacctctgtgattctccctgggccctcatcaactcctccatctatgccatgaaggagattgagccagagccagacttcattctctggactggtgatgacacgcctcatgtgcccgatgagaaactgggagaggcagctgtactggaaattgtggaacgcctgaccaagctcatcagagaggtctttccagatactaaagtctatgctgctttgggaaatcatgattttcaccccaaaaaccagttcccagctggaagtaacaacatctacaatcagatagcagaactatggaaaccctggcttagtaatgagtccatcgctctcttcaaaaaaggtgccttctactgtgagaagctgccgggtcccagcggggctgggcgaattgtggtcctcaacaccaatctgtactataccagcaatgcgctgacagcagacatggcggaccctggccagcagttccagtggctggaagatgtgctgaccgatgcatccaaagctggggacatggtgtacattgtcggccacgtgcccccggggttctttgagaagacgcaaaacaaggcatggttccgggagggcttcaatgaaaaatacctgaaggtggtccggaagcatcatcgcgtcatagcagggcagttcttcgggcaccaccacaccgacagctttcggatgctctatgatgatgcaggtgtccccataagcgccatgttcatcacacctggagtcaccccatggaaaaccacattacctggagtggtcaatggggccaacaatccagccatccgggtgttcgaatatgaccgagccacactgagcctgaaggacatggtgacctacttcatgaacctgagccaggcgaatgctcaggggacgccgcgctgggagctcgagtaccagctgaccgaggcctatggggtgccggacgccagcgcccactccatgcacacagtgctggaccgcatcgctggcgaccagagcacactgcagcgctactacgtctataactcagtcagctactctgctggggtctgcgacgaggcctgcagcatgcagcacgtgtgtgccatgcgccaggtggacattgacgcttacaccacctgtctgtatgcctctggcaccacgcccgtgccccagctcccgctgctgctgatggccctgctgggcctgtgcacgctcgtgctgtgacctgccaggctcaccttcttcctggtaacgggtaacgggggcagcgcccaggatcacccagagctgggccttccaccatttcctccgcgcctgaggagtgaactgaaataggacaaccgaatcaggaagcgaagccccaggagctgcagccatccgtgatcgcgccactgcactccagcctgggtgacaaagccagactctctccaaaaacaaaccagaaacagaaaagaaatgacgacccaagacccccctacaagcatacttcttttgcgtattatgtttaactcacaaaacaaagctcatcatgcgtttgattctg

SEQ ID NO: 788 - DNA, 2080 bp, Homo sapiens
  source 1..2080: mol_type = genomic DNA
gggccagggacgaccctgtcagctgcagccccagaggtccggggcgcgcagccgggtcccctcgagggcgcagccggccgccccgccccgcccctcgaagcagccgggccgggcgcgcagtgggctacaaactttcgcggcgcgagtccgccaaggcagcgcgccgactcgggctcggctcggctctgcgctgctccggacggctgtgaccgctggccgggggctcgggccgccggtacccacggaccgcgcgcccgggtgcctgctccgctaagcccctcgccccgcgcggacctcggtatccagcgccctgctgcccgggctctccccgcgcgccctactgccgcgaggtcagtccgcagcctccggtgcgccagcgctcgccttcctcctcctggacttcggccctttgccgccctcaccacgccatggccctggcgcccccaccgcgcggcctgtggcaggccaaggacatctcccccatcgtcaaggcggcccgccgggatggcgagctgctcctctccgcccagctggattctgaggagagggacccgggggtgccccggcccagcccctatgcgccctacatcctagtctatgccaacgatctggccatctcggagcccaacagcgtggcagtgacgctgcagagatacgaccccttccctgccggagaccccgagccccgcgcagcccccaacaactcagcggacccccgcgtgcgccgagccgcgcaggccactgggcccctccaggacaacgagctgccggggctggatgagaggccgccgcgcgcccacgcacagcacttccacaagcaccagctgtggcccagccccttccgggcgctgaaaccccggccagggcgcaaagaccgcaggaagaagggccaggaggtgttcatggccgcctcgcaggtgctggactttgacgagaagacgatgcagaaagcccggaggaagcagtgggatgagccgagggtgtgctcccggaggtacctgaaggtggacttcgcagacatcggctggaatgaatggataatctcaccgaaatcttttgatgcctactactgcgcgggagcatgtgagttccccatgcctaagatcgttcgtccatccaaccatgccaccatccagagcattgtcagggctgtgggcatcatccctggcatcccagagccctgctgtgttcccgataagatgaactcccttggggtcctcttcctggatgagaatcggaatgtggttctgaaggtgtaccccaacatgtccgtggacacctgtgcctgccggtgagaccactccagggtggaaagaagccacgcccagcagagctgccttctcggagccttctgcaaccaggacttgtggtgcagctgcagacacagagcacagctcatgggcaacatcactggggcccagagagagctgtccgccagtgcatcattagggggtctttcattgctagtgactagccccttaaatgccagcctgagtacctgaaggaatctgggaattagccctggcctgaaagtggcccatcattcatacccactgttctgaaggcttgaaaacaaaacatatccacaacattggcttgatgtgatcatcatctcataactgagcaagaagactatgcaaatcttagggcgctcgctccctgcacacggaaagaactctgtttaaatgctcagttcagaacactttgggccacatagtgattttggaaaacaggataatcgtggtgtaaatgagtgtttcctttcaaagtccactgcagagcttttatccatatggtatgcacatgtagccaatattggtttctttttcttaatatatatattttattttaaaacaacaaaaagggagggcgttgacaccattccccacagagatagtcatgctgagtgtgggttgtttaaacatgcatattgaaataacacatatagtaacgtgggaatactaaaaaataaccaagattttatatttttgtaaattatactttctatactgtagattgtgtatgttatgtgtttttatggaaagctaataaattaaaggtacagtggtatcttgaaaaa

SEQ ID NO: 789 - DNA, 1802 bp, Homo sapiens
  source 1..1802: mol_type = genomic DNA
gcagtggcgcggattcccggaagaacccgcagcagctcccaggatgaactggttgcagtggctgctgctgctgcgggggcgctgagaggacacgagctctatgcctttccggctgctcatcccgctcggcctcctgtgcgcgctgctgcctcagcaccatggtgcgccaggtcccgacggctccgcgccagatcccgcccactacagtttttctctgactctaattgatgcactggacaccttgctgattttggggaatgtctcagaattccaaagagtggttgaagtgctccaggacagcgtggactttgatattgatgtgaacgcctctgtgtttgaaacaaacattcgagtggtaggaggactcctgtctgctcatctgctctccaagaaggctggggtggaagtagaggctggatggccctgttccgggcctctcctgagaatggctgaggaggcggcccgaaaactcctcccagcctttcagacccccactggcatgccatatggaacagtgaacttacttcatggcgtgaacccaggagagacccctgtcacctgtacggcagggattgggaccttcattgttgaatttgccaccctgagcagcctcactggtgacccggtgttcgaagatgtggccagagtggctttgatgcgcctctgggagagccggtcagatatcgggctggtcggcaaccacattgatgtgctcactggcaagtgggtggcccaggacgcaggcatcggggctggcgtggactcctactttgagtacttggtgaaaggagccatcctgcttcaggataagaagctcatggccatgttcctagagtataacaaagccatccggaactacacccgcttcgatgactggtacctgtgggttcagatgtacaaggggactgtgtccatgccagtcttccagtccttggaggcctactggcctggtcttcagagcctcattggagacattgacaatgccatgaggaccttcctcaactactacactgtatggaagcagtttggggggctcccggaattctacaacattcctcagggatacacagtggagaagcgagagggctacccacttcggccagaacttattgaaagcgcaatgtacctctaccgtgccacgggggatcccaccctcctagaactcggaagagatgctgtggaatccattgaaaaaatcagcaaggtggagtgcggatttgcaacaatcaaagatctgcgagaccacaagctggacaaccgcatggagtcgttcttcctggccgagactgtgaaatacctctacctcctgtttgacccaaccaacttcatccacaacaatgggtccaccttcgacgcggtgatcaccccctatggggagtgcatcctgggggctggggggtacatcttcaacacagaagctcaccccatcgaccctgccgccctgcactgctgccagaggctgaaggaagagcagtgggaggtggaggacttgatgagggaattctactctctcaaacggagcaggtcgaaatttcagaaaaacactgttagttcggggccatgggaacctccagcaaggccaggaacactcttctcaccagaaaaccatgaccaggcaagggagaggaagcctgccaaacagaaggtcccacttctcagctgccccagtcagcccttcacctccaagttggcattactgggacaggttttcctagactcctcataaccactggataatttttttatttttatttttttgaggctaaactataataaattgcttttggctatcatattttggt

SEQ ID NO: 790 - DNA, 1912 bp, Homo sapiens
  source 1..1912: mol_type = genomic DNA
gcaggcgcagtggcgcggattcccggaagaacccgcagcagctcccaggatgaactggttgcagtggctgctgctgctgcgggggcgctgagaggacacgagctctatgcctttccggctgctcatcccgctcggcctcctgtgcgcgctgctgcctcagcaccatggtgcgccaggtcccgacggctccgcgccagatcccgcccactacagggagcgagtcaaggccatgttctaccacgcctacgacagctacctggagaatgcctttcccttcgatgagctgcgacctctcacctgtgacgggcacgacacctggggcagtttttctctgactctaattgatgcactggacaccttgctgattttggggaatgtctcagaattccaaagagtggttgaagtgctccaggacagcgtggactttgatattgatgtgaacgcctctgtgtttgaaacaaacattcgagtggtaggaggactcctgtctgctcatctgctctccaagaaggctggggtggaagtagaggctggatggccctgttccgggcctctcctgagaatggctgaggaggcggcccgaaaactcctcccagcctttcagacccccactggcatgccatatggaacagtgaacttacttcatggcgtgaacccaggagagacccctgtcacctgtacggcagggattgggaccttcattgttgaatttgccaccctgagcagcctcactggtgacccggtgttcgaagatgtggccagagtggctttgatgcgcctctgggagagccggtcagatatcgggctggtcggcaaccacattgatgtgctcactggcaagtgggtggcccaggacgcaggcatcggggctggcgtggactcctactttgagtacttggtgaaaggagccatcctgcttcaggataagaagctcatggccatgttcctagagtataacaaagccatccggaactacacccgcttcgatgactggtacctgtgggttcagatgtacaaggggactgtgtccatgccagtcttccagtccttggaggcctactggcctggtcttcagagcctcattggagacattgacaatgccatgaggaccttcctcaactactacactgtatggaagcagtttggggggctcccggaattctacaacattcctcagggatacacagtggagaagcgagagggctacccacttcggccagaacttattgaaagcgcaatgtacctctaccgtgccacgggggatcccaccctcctagaactcggaagagatgctgtggaatccattgaaaaaatcagcaaggtggagtgcggatttgcaacaatcaaagatctgcgagaccacaagctggacaaccgcatggagtcgttcttcctggccgagactgtgaaatacctctacctcctgtttgacccaaccaacttcatccacaacaatgggtccaccttcgacgcggtgatcaccccctatggggagtgcatcctgggggctggggggtacatcttcaacacagaagctcaccccatcgaccctgccgccctgcactgctgccagaggctgaaggaagagcagtgggaggtggaggacttgatgagggaattctactctctcaaacggagcaggtcgaaatttcagaaaaacactgttagttcggggccatgggaacctccagcaaggccaggaacactcttctcaccagaaaaccatgaccaggcaagggagaggaagcctgccaaacagaaggtcccacttctcagctgccccagtcagcccttcacctccaagttggcattactgggacaggttttcctagactcctcataaccactggataatttttttatttttatttttttgaggctaaactataataaattgcttttggctatcata

SEQ ID NO: 791 - DNA, 497 bp, Homo sapiens
  source 1..497: mol_type = genomic DNA
gagatgaggtcttgctatgttgcccaggctggtctcaaactcccgggctcaagcgatcctcccgcctcggcctctcaaagcactaggattacagcctcaggctatggcccaccttcctctcgcccttccagccgcgttgtcaatggtgaggatgcggtcccctacagctggccctggcaggtttccctgcagtatgagaaaagcggaagcttctaccacacctgtggcggtagcctcatcgcccccgactgggttgtgactgccggccactgcatctcgagctcccggacctaccaggtggtgttgggcgagtacgaccgtgctgtgaaggagggccccgagcaggtgatccccatcaactctggggacctctttgtgcatccactctggaaccgctcgtgtgtggcctgtggcaatgacatcgccctcatcaagctctcacgcagcgcccagctgggagacgccgtccagctcgcctcactccctccggctggtga

SEQ ID NO: 792 - DNA, 3663 bp, Homo sapiens
  source 1..3663: mol_type = genomic DNA
atgcccggcttgctgaattggatcacgggggcagccctgcccctcaccgcgtctgatgttacctcctgtgtcagcggttatgccctgggcctaactgcctccctcacctatggcaacctggaagcccagcccttccagggcctcttcgtgtaccccctggatgagtgcaccacggtgatcggctttgaggcagtcattgccgaccgtgtcgtgacagtacagatcaaggacaaagccaagctggagagcggccacttcgatgcctcccatgttcgatccccaacagtcacagggaacattctgcaagacggggtttccatagcccctcattcctgcacaccgggaaaggtgaccttggacgaggatttggagcggatcctgttcgtggccaacctggggaccattgcccccatggagaatgtcaccatcttcatcagcacctcctcggagctcccaacgctgcccagcggggctgtgagggtccttctgcctgctgtctgtgccccaaccgtgccccagttctgcaccaagagcactggcacctccaaccaacaggcccagggcaaagacaggcactgcttcggtgcctgggccccgggctcctggaataagttgtgcctggcgactctcctgaacaccgaagtgtccaaccccatggagtatgagttcaacttccagctggagatccgtgggccatgtctgctcgcaggggtggagagtcccactcatgagattcgtgccgacgccgccccatctgcccgctcggccaagagcatcatcatcaccttggccaacaagcacacctttgaccggcctgtggagatcctcatccaccccagcgagccccatatgccccatgtcctgatagagaaaggggacatgaccctgggagagtttgaccagcacttgaagggaagaacagatttcattaaagggatgaagaagaagagcagagcagagcggaagacagaaatcattcgaaaacgcctccacaaagacattccccaccactccgtcatcatgctcaacttctgtcccgacctccagtcagtccagccgtgcctgagaaaggcccacggggagttcatcttcctcattgacaggagcagcagcatgagcgggatcagcatgcaccgagtcaaggatgccatgttggtggcccttaagagcctcatgccagcctgcctcttcaatatcattgggtttggatccacatttaagagcctttttccttccagccagacctacagtgaggacagcttggccatggcttgtgatgacatccagagaatgaaggccgacatgggtgggaccaacatcctttcccctctcaagtgggtcatcaggcagccagtgcaccgaggccacccgcggctcctcttcgtgatcacagatggcgctgtcaacaacacagggaaggtgctggagctggtgcgaaatcacgccttctccaccaggtgctatagctttggaattggacccaacgtctgccacagactggtgaaaggactggcatctgtgtccgagggcagtgctgagctcctgatggagggggagcggctgcaacccaagatggtcaaatccttgaagaaggccatggccccagtcctgagcgatgtgactgtggagtggatcttccctgagaccactgaggtcctggtctcacccgtcagcgccagctccctcttccctggagaacggctggtggggtatggcattgtatgtgatgcttctttgcacatctccaatcccagatctgacaagaggcgccggtacagcatgctgcactctcaggagtctggcagctctgtcttctaccactctcaggatgacggacccgggctggaaggtggagactgtgccaagaactcgggggcacccttcatcctagggcaggccaaaaatgcccggctagccagcggagactctaccaccaagcacgatctgaacctctctcagcgacggagggcatacagcaccaaccagatcaccaatcacaagcccctcccaagagccaccatggcaagtgaccccatgccagctgccaagagatacccactgcggaaagccaggctgcaggacctcaccaaccagaccagcctggatgtccagcggtggcagattgatttgcagcccttgctgaacagtggtcaggacctgaaccagggccccaaactccgtggcccaggggcccgaaggccctctctgctgccccaaggctgccagcccttcctgccctggggccaggagacccaggcctggagccctgtgagagagcggacttctgacagccgaagccctggagatctggagccgtcccaccatccctctgccttcgagacagagacgtcctcggactgggaccccccagccgagtcccaggagcgagccagtcccagcaggcccgccaccccggccccggtgctgggcaaggccctggtcaaaggcctgcacgacagccaacgcctgcagtgggaggtgagcttcgagctggggacccctggaccggagcggggcggcgcgcaggatgccgacctatggagcgagaccttccaccacctggcggcccgcgccatcatccgcgacttcgagcagctggcggagcgcgagggcgagatcgagcaggggtccaaccgccgctaccaagtgagcgccttgcacaccagcaaggcctgcaacatcattagcaaatacacagccttcgtgcctgtggacgtgagcaagagccggtacctgcccaccgtggtggagtaccccaactctgctgccctgcgtatgcttggctctcgggccctggcccaacagtggaggggcacctcttctggctttggaaggccgcagacgatgcttggagaagattcggcaccaggaaatggtaaatttcaggccctaaacatggaggcaagtcccactgctctcttcagcgaggccaggtcccccggccgcgagaagcacggtgcttctgaaggtccccagcgcagcctggctacaaatactctttcttccatgaaggcctcagagaatctctttggatcctggctaaatctcaacaagtccaggctactgacgcgagcagccaagggcttcctgagcaagccactgatcaaagctgtggagtcgacctccgggaaccagagcttcgactacatacctctggtgtctctgcagctggcctccggagccttcctgctcaacgaagccttctgtgaggccacgcacatccccatggagaagctcaagtggacgtcccccttcacctgccatcgagtgtccctcaccacccgcccgtctgagtccaagaccccgagtccccagctgtgcaccagctccccgcctaggcacccgtcctgtgacagcttctccctggagcctctggccaagggcaagctgggcctggagccgagggcagtggtggagcacactgggaagctgtgggccacggtggtggggctggcatggctggagcacagttcggcctcctacttcactgagtgggagttggtggctgccaaggccaactcatggctggagcagcaggaagtacccgagggccgcacgcagggcacactcaaggccgctgcccgccagctgtttgtgcttctgcggcactgggatgagaatctcgagttcaatatgctctgctataacccgaattatgtgtag

SEQ ID NO: 793 - DNA, 3247 bp, Homo sapiens
  source 1..3247: mol_type = genomic DNA
atcgcaatgtgggcattgatcaagccagctgccagggcagcgggcgcagggcttgggcactggagcccagccccggaccgcacctccagcagtgctgggtgcagaaggcagtcactgtggcagtggagagacagagtgtgtacccagacacgtgttgcttctggggtaaggttctgaaggctgagtagccagcgggatgcccggcttgctgaattggatcacgggggcagccctgcccctcaccgcgtctgatgttacctcctgtgtcagcggttatgccctgggcctaactgcctccctcacctatggcaacctggaagcccagcccttccagggcctcttcgtgtaccccctggatgagtgcaccacggtgatcggctttgaggcagtcattgccgaccgtgtcgtgacagtacagatcaaggacaaagccaagctggagagcggccacttcgatgcctcccatgttcgatccccaacagtcacagggaacattctgcaagacggggtttccatagcccctcattcctgcacaccgggaaaggtgaccttggacgaggatttggagcggatcctgttcgtggccaacctggggaccattgcccccatggagaatgtcaccatcttcatcagcacctcctcggagctcccaacgctgcccagcggggctgtgagggtccttctgcctgctgtctgtgccccaaccgtgccccagttctgcaccaagagcactggcacctccaaccaacaggcccagggcaaagacaggcactgcttcggtgcctgggccccgggctcctggaataagttgtgcctggcgactctcctgaacaccgaagtgtccaaccccatggagtatgagttcaacttccagctggagatccgtgggccatgtctgctcgcaggggtggagagtcccactcatgagattcgtgccgacgccgccccatctgcccgctcggccaagagcatcatcatcaccttggccaacaagcacacctttgaccggcctgtggagatcctcatccaccccagcgagccccatatgccccatgtcctgatagagaaaggggacatgaccctgggagagtttgaccagcacttgaagggaagaacagatttcattaaagggatgaagaagaagagcagagcagagcggaagacagaaatcattcgaaaacgcctccacaaagacattccccaccactccgtcatcatgctcaacttctgtcccgacctccagtcagtccagccgtgcctgagaaaggcccacggggagttcatcttcctcattgacaggagcagcagcatgagcgggatcagcatgcaccgagtcaaggatgccatgttggtggcccttaagagcctcatgccagcctgcctcttcaatatcattgggtttggatccacatttaagagcctttttccttccagccagacctacagtgaggacagcttggccatggcttgtgatgacatccagagaatgaaggccgacatgggtgggaccaacatcctttcccctctcaagtgggtcatcaggcagccagtgcaccgaggccacccgcggctcctcttcgtgatcacagatggcgctgtcaacaacacagggaaggtgctggagctggtgcgaaatcacgccttctccaccaggtgctatagctttggaattggacccaacgtctgccacagactggtgaaaggactggcatctgtgtccgagggcagtgctgagctcctgatggagggggagcggctgcaacccaagatggtcaaatccttgaagaaggccatggccccagtcctgagcgatgtgactgtggagtggatcttccctgagaccactgaggtcctggtctcacccgtcagcgccagctccctcttccctggagaacggctggtggggtatggcattgtatgtgatgcttctttgcacatctccaatcccagatctgacaagaggcgccggtacagcatgctgcactctcaggagtctggcagctctgtcttctaccactctcaggatgacggacccgggctggaaggtggagactgtgccaagaactcgggggcacccttcatcctagggcaggccaaaaatgcccggctagccagcggagactctaccaccaagcacgatctgaacctctctcagcgacggagggcatacagcaccaaccagatcaccaatcacaagcccctcccaagagccaccatggcaagtgaccccatgccagctgccaagagatacccactgcggaaagccaggctgcaggacctcaccaaccagaccagcctggatgtccagcggtggcagattgatttgcagcccttgctgaacagtggtcaggacctgaaccagggccccaaactccgtggcccaggggcccgaaggccctctctgctgccccaaggctgccagcccttcctgccctggggccaggagacccaggcctggagccctgtgagagagcggacttctgacagccgaagccctggagatctggagccgtcccaccatccctctgccttcgagacagagacgtcctcggactgggaccccccagccgagtcccaggagcgagccagtcccagcaggcccgccaccccggccccggtgctgggcaaggccctggtcaaaggcctgcacgacagccaacgcctgcagtgggaggtgagcttcgagctggggacccctggaccggagcggggcggcgcgcaggatgccgacctatggagcgagaccttccaccacctggcggcccgcgccatcatccgcgacttcgagcagctggcggagcgcgagggcgagatcgagcaggggtccaaccgccgctaccaagtgagcgccttgcacaccagcaaggcctgcaacatcattagcaaatacacagccttcgtgcctgtggacgtgagcaagagccggtacctgcccaccgtggtggagtaccccaactctgctgccctgcgtatgcttggctctcgggccctggcccaacagtggaggggcacctcttctggctttggaaggccgcagacgatgcttggagaagattcggcaccaggaaatggtcctagaaagtgctcacagacattgatgggttttaaaacaaaaacagaaacagaacacagtgtgagggggtggaaacccagaggagctcttcagaatcaaagtgttctctcaacttcttggtcccattggcctccaaaacccaggagaaccagctccacccctgagccaagctga

SEQ ID NO: 794 - DNA, 4490 bp, Homo sapiens
  source 1..4490: mol_type = genomic DNA
atcgcaatgtgggcattgatcaagccagctgccagggcagcgggcgcagggcttgggcactggagcccagccccggaccgcacctccagcagtgctgggtgcagaaggcagtcactgtggcagtggagagacagagtgtgtacccagacacgtgttgcttctggggtaaggttctgaaggctgagtagccagcgggatgcccggcttgctgaattggatcacgggggcagccctgcccctcaccgcgtctgatgttacctcctgtgtcagcggttatgccctgggcctaactgcctccctcacctatggcaacctggaagcccagcccttccagggcctcttcgtgtaccccctggatgagtgcaccacggtgatcggctttgaggcagtcattgccgaccgtgtcgtgacagtacagatcaaggacaaagccaagctggagagcggccacttcgatgcctcccatgttcgatccccaacagtcacagggaacattctgcaagacggggtttccatagcccctcattcctgcacaccgggaaaggtgaccttggacgaggatttggagcggatcctgttcgtggccaacctggggaccattgcccccatggagaatgtcaccatcttcatcagcacctcctcggagctcccaacgctgcccagcggggctgtgagggtccttctgcctgctgtctgtgccccaaccgtgccccagttctgcaccaagagcactggcacctccaaccaacaggcccagggcaaagacaggcactgcttcggtgcctgggccccgggctcctggaataagttgtgcctggcgactctcctgaacaccgaagtgtccaaccccatggagtatgagttcaacttccagctggagatccgtgggccatgtctgctcgcaggggtggagagtcccactcatgagattcgtgccgacgccgccccatctgcccgctcggccaagagcatcatcatcaccttggccaacaagcacacctttgaccggcctgtggagatcctcatccaccccagcgagccccatatgccccatgtcctgatagagaaaggggacatgaccctgggagagtttgaccagcacttgaagggaagaacagatttcattaaagggatgaagaagaagagcagagcagagcggaagacagaaatcattcgaaaacgcctccacaaagacattccccaccactccgtcatcatgctcaacttctgtcccgacctccagtcagtccagccgtgcctgagaaaggcccacggggagttcatcttcctcattgacaggagcagcagcatgagcgggatcagcatgcaccgagtcaaggatgccatgttggtggcccttaagagcctcatgccagcctgcctcttcaatatcattgggtttggatccacatttaagagcctttttccttccagccagacctacagtgaggacagcttggccatggcttgtgatgacatccagagaatgaaggccgacatgggtgggaccaacatcctttcccctctcaagtgggtcatcaggcagccagtgcaccgaggccacccgcggctcctcttcgtgatcacagatggcgctgtcaacaacacagggaaggtgctggagctggtgcgaaatcacgccttctccaccaggtgctatagctttggaattggacccaacgtctgccacagactggtgaaaggactggcatctgtgtccgagggcagtgctgagctcctgatggagggggagcggctgcaacccaagatggtcaaatccttgaagaaggccatggccccagtcctgagcgatgtgactgtggagtggatcttccctgagaccactgaggtcctggtctcacccgtcagcgccagctccctcttccctggagaacggctggtggggtatggcattgtatgtgatgcttctttgcacatctccaatcccagatctgacaagaggcgccggtacagcatgctgcactctcaggagtctggcagctctgtcttctaccactctcaggatgacggacccgggctggaaggtggagactgtgccaagaactcgggggcacccttcatcctagggcaggccaaaaatgcccggctagccagcggagactctaccaccaagcacgatctgaacctctctcagcgacggagggcatacagcaccaaccagatcaccaatcacaagcccctcccaagagccaccatggcaagtgaccccatgccagctgccaagagatacccactgcggaaagccaggctgcaggacctcaccaaccagaccagcctggatgtccagcggtggcagattgatttgcagcccttgctgaacagtggtcaggacctgaaccagggccccaaactccgtggcccaggggcccgaaggccctctctgctgccccaaggctgccagcccttcctgccctggggccaggagacccaggcctggagccctgtgagagagcggacttctgacagccgaagccctggagatctggagccgtcccaccatccctctgccttcgagacagagacgtcctcggactgggaccccccagccgagtcccaggagcgagccagtcccagcaggcccgccaccccggccccggtgctgggcaaggccctggtcaaaggcctgcacgacagccaacgcctgcagtgggaggtgagcttcgagctggggacccctggaccggagcggggcggcgcgcaggatgccgacctatggagcgagaccttccaccacctggcggcccgcgccatcatccgcgacttcgagcagctggcggagcgcgagggcgagatcgagcaggggtccaaccgccgctaccaagtgagcgccttgcacaccagcaaggcctgcaacatcattagcaaatacacagccttcgtgcctgtggacgtgagcaagagccggtacctgcccaccgtggtggagtaccccaactctgctgccctgcgtatgcttggctctcgggccctggcccaacagtggaggggcacctcttctggctttggaaggccgcagacgatgcttggagaagattcggcaccaggaaatggtaaatttcaggccctaaacatggaggcaagtcccactgctctcttcagcgaggccaggtcccccggccgcgagaagcacggtgcttctgaaggtccccagcgcagcctggctacaaatactctttcttccatgaaggcctcagagaatctctttggatcctggctaaatctcaacaagtccaggctactgacgcgagcagccaagggcttcctgagcaagccactgatcaaagctgtggagtcgacctccgggaaccagagcttcgactacatacctctggtgtctctgcagctggcctccggagccttcctgctcaacgaagccttctgtgaggccacgcacatccccatggagaagctcaagtggacgtcccccttcacctgccatcgagtgtccctcaccacccgcccgtctgagtccaagaccccgagtccccagctgtgcaccagctccccgcctaggcacccgtcctgtgacagcttctccctggagcctctggccaagggcaagctgggcctggagccgagggcagtggtggagcacactgggaagctgtgggccacggtggtggggctggcatggctggagcacagttcggcctcctacttcactgagtgggagttggtggctgccaaggccaactcatggctggagcagcaggaagtacccgagggccgcacgcagggcacactcaaggccgctgcccgccagctgtttgtgcttctgcggcactgggatgagaatctcgagttcaatatgctctgctataacccgaattatgtgtagttgagtgacggggaggctgggtggagggaagggtggggaggagagggatgggcagggccatgtcggcctggtttcggggagcttttggagctgtaactaatatttcagttactagaaagagccctggactggcagccaggaggcctgagttcaatcccaactttgctaccatccagccatgcaactttaggccagtgcctgcccccgtctgggcctcagtttcctcatctataaaataagagggcgagatgaaggaggtggagtggatctcaaatggttcagtggttcctttctgcccattcaggcagtcccgggctgactgctgctggggctggcgagggaagatgcagtggaagcctgagccctgtctggaggtagaccacgtgggcacggagtggacacagcaatgcccactcaaataaaagggcagatgagagaacccagtgacctcaagtaaccaggcctacaggcttgcataggcacatagagactagcaagtctggtgcctgtaggacaggctcttgtctccatggtaacagccaaggaccccccctaaatcccacttaaaagccaattggagaagcatccttctcaacgctttacaaaagagtagtttgggggccttttgttt

SEQ ID NO: 795 - DNA, 5460 bp, Homo sapiens
  source 1..5460: mol_type = genomic DNA
agagtcaactctgccccgaggcctagcttggccagaaggtagcagacagacagacggatctaacctctcttggatcctccagccatgaggctgctctgggggctgatctgggcatccagcttcttcaccttatctctgcagaagcccaggttgctcttgttctctccttctgtggttcatctgggggtccccctatcggtgggggtgcagctccaggatgtgccccgaggacaggtagtcaaaggatcagtgttcctgagaaacccatctcgtaataatgtcccctgctccccaaaggtggacttcacccttagctcagaaagagacttcgcactcctcagtctccaggtgcccttgaaagatgcgaagagctgtggcctccatcaactcctcagaggccctgaggtccagctggtggcccattcgccatggctaaaggactctctgtccagaacgacaaacatccagggtatcaacctgctcttctcctctcgccgggggcacctctttttgcagacggaccagcccatttacaaccctggccagcgggttcggtaccgggtctttgctctggatcagaagatgcgcccgagcactgacaccatcacagtcatggtggagaactctcacggcctccgcgtgcggaagaaggaggtgtacatgccctcgtccatcttccaggatgactttgtgatcccagacatctcagagccagggacctggaagatctcagcccgattctcagatggcctggaatccaacagcagcacccagtttgaggtgaagaaatatgtccttcccaactttgaggtgaagatcacccctggaaagccctacatcctgacggtgccaggccatcttgatgaaatgcagttagacatccaggccaggtacatctatgggaagccagtgcagggggtggcatatgtgcgctttgggctcctagatgaggatggtaagaagactttctttcgggggctggagagtcagaccaagctggtgaatggacagagccacatttccctctcaaaggcagagttccaggacgccctggagaagctgaatatgggcattactgacctccaggggctgcgcctctacgttgctgcagccatcattgagtatccaggtggggagatggaggaggcagagctcacatcctggtattttgtgtcatctcccttctccttggatcttagcaagaccaagcgacaccttgtgcctggggcccccttcctgctgcaggccttggtccgtgagatgtcaggctccccagcttctggcattcctgtcaaagtttctgccacggtgtcttctcctgggtctgttcctgaagtccaggacattcagcaaaacacagacgggagcggccaagtcagcattccaataattatccctcagaccatctcagagctgcagctctcagtatctgcaggctccccacatccagcgatagccaggctcactgtggcagccccaccttcaggaggccccgggtttctgtctattgagcggccggattctcgacctcctcgtgttggggacactctgaacctgaacttgcgagccgtgggcagtggggccaccttttctcattactactacatgatcctatcccgagggcagatcgtgttcatgaatcgagagcccaagaggaccctgacctcggtctcggtgtttgtggaccatcacctggcaccctccttctactttgtggccttctactaccatggagaccacccagtggccaactccctgcgagtggatgtccaggctggggcctgcgagggcaagctggagctcagcgtggacggtgccaagcagtaccggaacggggagtccgtgaagctccacttagaaaccgactccctagccctggtggcgctgggagccttggacacagctctgtatgctgcaggcagcaagtcccacaagcccctcaacatgggcaaggtctttgaagctatgaacagctatgacctcggctgtggtcctgggggtggggacagtgcccttcaggtgttccaggcagcgggcctggccttttctgatggagaccagtggaccttatccagaaagagactaagctgtcccaaggagaagacaacccggaaaaagagaaacgtgaacttccaaaaggcgattaatgagaaattgggtcagtatgcttccccgacagccaagcgctgctgccaggatggggtgacacgtctgcccatgatgcgttcctgcgagcagcgggcagcccgcgtgcagcagccggactgccgggagcccttcctgtcctgctgccaatttgctgagagtctgcgcaagaagagcagggacaagggccaggcgggcctccaacgagccctggagatcctgcaggaggaggacctgattgatgaggatgacattcccgtgcgcagcttcttcccagagaactggctctggagagtggaaacagtggaccgctttcaaatattgacactgtggctccccgactctctgaccacgtgggagatccatggcctgagcctgtccaaaaccaaaggcctatgtgtggccaccccagtccagctccgggtgttccgcgagttccacctgcacctccgcctgcccatgtctgtccgccgctttgagcagctggagctgcggcctgtcctctataactacctggataaaaacctgactgtgagcgtccacgtgtccccagtggaggggctgtgcctggctgggggcggagggctggcccagcaggtgctggtgcctgcgggctctgcccggcctgttgccttctctgtggtgcccacggcagccgccgctgtgtctctgaaggtggtggctcgagggtccttcgaattccctgtgggagatgcggtgtccaaggttctgcagattgagaaggaaggggccatccatagagaggagctggtctatgaactcaaccccttggaccaccgaggccggaccttggaaatacctggcaactctgatcccaatatgatccctgatggggactttaacagctacgtcagggttacagcctcagatccattggacactttaggctctgagggggccttgtcaccaggaggcgtggcctccctcttgaggcttcctcgaggctgtggggagcaaaccatgatctacttggctccgacactggctgcttcccgctacctggacaagacagagcagtggagcacactgcctcccgagaccaaggaccacgccgtggatctgatccagaaaggctacatgcggatccagcagtttcggaaggcggatggttcctatgcggcttggttgtcacggggcagcagcacctggctcacagcctttgtgttgaaggtcctgagtttggcccaggagcaggtaggaggctcgcctgagaaactgcaggagacatctaactggcttctgtcccagcagcaggctgacggctcgttccaggacctctctccagtgatacataggagcatgcaggggggtttggtgggcaatgatgagactgtggcactcacagcctttgtgaccatcgcccttcatcatgggctggccgtcttccaggatgagggtgcagagccattgaagcagagagtggaagcctccatctcaaaggcaagctcatttttgggggagaaagcaagtgctgggctcctgggtgcccacgcagctgccatcacggcctatgccctgacactgaccaaggcccctgcggacctgcggggtgttgcccacaacaacctcatggcaatggcccaggagactggagataacctgtactggggctcagtcactggttctcagagcaatgccgtgtcgcccaccccagctcctcgcaacccatccgaccccatgccccaggccccagccctgtggattgaaaccacagcctacgccctgctgcacctcctgcttcacgagggcaaagcagagatggcagaccaggctgcggcctggctcacccgtcagggcagcttccaagggggattccgcagtacccaagacacggtgattgccctggatgccctgtctgcctactggattgcctcccacaccactgaggagaggggtctcaatgtgactctcagctccacaggccggaatgggttcaagtcccacgcgctgcagctgaacaaccgccagattcgcggcctggaggaggagctgcagttttccttgggcagcaagatcaatgtgaaggtgggaggaaacagcaaaggaaccctgaaggtccttcgtacctacaatgtcctggacatgaagaacacgacctgccaggacctacagatagaagtgacagtcaaaggccacgtcgagtacacgatggaagcaaacgaggactatgaggactatgagtacgatgagcttccagccaaggatgacccagatgcccctctgcagcccgtgacacccctgcagctgtttgagggtcggaggaaccgccgcaggagggaggcgcccaaggtggtggaggagcaggagtccagggtgcactacaccgtgtgcatctggcggaacggcaaggtggggctgtctggcatggccatcgcggacgtcaccctcctgagtggattccacgccctgcgtgctgacctggagaagctgacctccctctctgaccgttacgtgagtcactttgagaccgaggggccccacgtcctgctgtattttgactcggtccccacctcccgggagtgcgtgggctttgaggctgtgcaggaagtgccggtggggctggtgcagccggccagcgcaaccctgtacgactactacaaccccgagcgcagatgttctgtgttttacggggcaccaagtaagagcagactcttggccaccttgtgttctgctgaagtctgccagtgtgctgaggggaagtgccctcgccagcgtcgcgccctggagcggggtctgcaggacgaggatggctacaggatgaagtttgcctgctactacccccgtgtggagtacggcttccaggttaaggttctccgagaagacagcagagctgctttccgcctctttgagaccaagatcacccaagtcctgcacttcaccaaggatgtcaaggccgctgctaatcagatgcgcaacttcctggttcgagcctcctgccgccttcgcttggaacctgggaaagaatatttgatcatgggtctagatggggccacctatgacctcgagggacacccccagtacctgctggactcgaatagctggatcgaggagatgccctctgaacgcctgtgccggagcacccgccagcgggcagcctgtgcccagctcaacgacttcctccaggagtatggcactcaggggtgccaggtgtgagggctgccctcccacctccgctgggaggaacctgaacctgggaaccatgaagctggaagcactgctgtgtccgctttcatgaacacagcctgggaccagggcatattaaaggcttttggcagcaaagtgtcagtgttggca

SEQ ID NO: 796 - DNA, 2615 bp, Homo sapiens
  source 1..2615: mol_type = genomic DNA
tgggtcctggccgccggcttcgctgagacgcgctcgcgtgggctgccctcccgggcccgcagtggtcgcggcggcatgaagggcgctctggggagtcccgtggctgccgctggcgccgcgatgcaggagagtttcggctgcgtggtggccaaccgcttccatcagctgctggacgacgagtcggacccgttcgacatcctgcgcgaggccgagcgccggcgccagcagcagctgcagcgcaagaggcgcgacgaggcggcggcggcggccggggccggtccccgcggcggcaggagcccagccggggcctcgggccacagagccggcgcgggcggccggagggagtcgcagaaggagcgcaagagcctcccggcgcccgtcgctcagcggcccgatagccccgggggcggcctgcaggcgccgggccagaagcggactcctagaagaggggagcagcaaggatggaatgacagccgtgggccggaggggatgctcgaaagagctgagcggagatcctacagggaataccgaccctatgagacagagaggcaggcagacttcacagctgagaagtttccagatgaaaaaccaggtgataggtttgatcgagacagaccgttgagaggacgtggaggcccgagagggggtatgcgcggcagaggcagaggtggccctgggaacagagtttttgacgcttttgaccagagaggaaagcgagaatttgaaagatatggtgggaatgacaaaatagcagtcagaactgaagacaacatgggtggatgtggagttcgaacctggggatcgggtaaagataccagtgatgtggagccaactgcaccgatggaggaacccacagtggtggaggagtcccagggcaccccggaagaggagtctccagccaaagttcctgagttggaggtagaagaagaaacccaagttcaagagatgactttagatgagtggaaaaatcttcaagaacagaccagaccaaagcctgagtttaacatccggaaaccagaatccactgttccttccaaagccgtggtgattcacaagtcaaaatacagagatgatatggtaaaagatgactatgaggacgattcccatgttttccggaaacccgccaatgacatcacatcccagctggagattaattttggtaacctccctcgtcctgggcgtggagccagaggaggcacccggggaggccggggaaggatcaggagggcagagaactatggacccagagcagaagtggtgatgcaagatgttgcccccaacccagatgacccggaagatttccctgcgctgtcttgaaagagccctgtttcccagcaccgcggagctgcactgcacacctgtggggagacttttccagctgggccaagggagtcagactctaagaacaatagatgttgcttttcccgtgtcatgtaaatttgttgcacttttttgggctgagctgttagaggggcttctccagaggctcgagagcaggccatttcccaagaagatgaagaatggtgactgtgtttttattgaaggaatttcaaatgaagaataatgtttaaaatgtgtatatagagatagtatagactcctccgcggaagcatggagggaaaggaggttgtaaaatagactccatggagactcttaggaagcagtagattcccgggggctgtgcctttagcgttagaggaaacacatagagctggaactgttaatggaaagcagtcacagctgagttttcggagaccaagaaattaaaatacaattgcacttactgtttacttgtaaatgttatcttctctcctggaatattttgagttctggttttcacttaaccaatcatttaaaaatcgctattgtgtagccactggccaccactctgtgacacagaatcagagaaagcgttgatttttaatggtgatttaaactacctcgtggtttctgtgtgtgtgcacacacacatctagtgtttgggtggtttttaggaagaatattaagtatgtgacttcaaaaaccatgttatttaacctgccaatcaaatggaaagggatcatggcaaaagcaaataccgcatccttttcttccgcagaactagagtcagagttcggcagctgcgtacaaaggcctctgccctcggcttgagcaaaagttgtaaataactagtatttattaagcacttataagcagtttttctcacttagtcctggctccagttctagagttcctctttattgcttttggtgaaagtttggggttgggggtacacctcagaggttcagtaattcacctggagtcccaccctgaacagagctggacccagagccacacacgcccgggaacacacactgtgctggggaggaagtgggcctaggagggcctgcaggtccaggcagctgtagagctgctagaagctggggtgttgctctccccgctttctcatagacacagaggtactgtctgcctgttgtcacacagttcatatgctcgcttgagatggaatctgaaccttggtcccaggatctgtgctttttcccactttgccacactgtctaaggtggctttgaactggaacccaagtgcaaataaaggttggtattcgctcctga

SEQ ID NO: 797 - DNA, 2304 bp, Homo sapiens
  source 1..2304: mol_type = genomic DNA
ggcatgggtcctggccgccggcttcgctgagacgcgctcgcgtgggctgccctcccgggcccgcagtggtcgcggcggcatgaagggcgctctggggagtcccgtggctgccgctggcgccgcgatgcaggagagtttcggctgcgtggtggccaaccgcttccatcagctgctggacgacgagtcggacccgttcgacatcctgcgcgaggccgagcgccggcgccagcagcagctgcagcgcaagaggcgcgacgaggcggcggcggcggccggggccggtccccgcggcggcaggagcccagccggggcctcgggccacagagccggcgcgggcggccggagggagtcgcagaaggagcgcaagagcctcccggcgcccgtcgctcagcggcccgatagccccgggggcggcctgcaggcgccgggccagaagcggactcctagaagaggggagcagcaaggatggaatgacagccgtgggccggaggggatgctcgaaagagctgagcggagatcctacagggaataccgaccctatgagacagagaggcaggcagacttcacagctgagaagtttccagatgaaaaagttcctgagttggaggtagaagaagaaacccaagttcaagagatgactttagatgagtggaaaaatcttcaagaacagaccagaccaaagcctgagtttaacatccggaaaccagaatccactgttccttccaaagccgtggtgattcacaagtcaaaatacagagatgatatggtaaaagatgactatgaggacgattcccatgttttccggaaacccgccaatgacatcacatcccagctggagattaattttggtaacctccctcgtcctgggcgtggagccagaggaggcacccggggaggccggggaaggatcaggagggcagagaactatggacccagagcagaagtggtgatgcaagatgttgcccccaacccagatgacccggaagatttccctgcgctgtcttgaaagagccctgtttcccagcaccgcggagctgcactgcacacctgtggggagacttttccagctgggccaagggagtcagactctaagaacaatagatgttgcttttcccgtgtcatgtaaatttgttgcacttttttgggctgagctgttagaggggcttctccagaggctcgagagcaggccatttcccaagaagatgaagaatggtgactgtgtttttattgaaggaatttcaaatgaagaataatgtttaaaatgtgtatatagagatagtatagactcctccgcggaagcatggagggaaaggaggttgtaaaatagactccatggagactcttaggaagcagtagattcccgggggctgtgcctttagcgttagaggaaacacatagagctggaactgttaatggaaagcagtcacagctgagttttcggagaccaagaaattaaaatacaattgcacttactgtttacttgtaaatgttatcttctctcctggaatattttgagttctggttttcacttaaccaatcatttaaaaatcgctattgtgtagccactggccaccactctgtgacacagaatcagagaaagcgttgatttttaatggtgatttaaactacctcgtggtttctgtgtgtgtgcacacacacatctagtgtttgggtggtttttaggaagaatattaagtatgtgacttcaaaaaccatgttatttaacctgccaatcaaatggaaagggatcatggcaaaagcaaataccgcatccttttcttccgcagaactagagtcagagttcggcagctgcgtacaaaggcctctgccctcggcttgagcaaaagttgtaaataactagtatttattaagcacttataagcagtttttctcacttagtcctggctccagttctagagttcctctttattgcttttggtgaaagtttggggttgggggtacacctcagaggttcagtaattcacctggagtcccaccctgaacagagctggacccagagccacacacgcccgggaacacacactgtgctggggaggaagtgggcctaggagggcctgcaggtccaggcagctgtagagctgctagaagctggggtgttgctctccccgctttctcatagacacagaggtactgtctgcctgttgtcacacagttcatatgctcgcttgagatggaatctgaaccttggtcccaggatctgtgctttttcccactttgccacactgtctaaggtggctttgaactggaacccaagtgcaaataaaggttggtattcgctcctga

SEQ ID NO: 798 - DNA, 1678 bp, Homo sapiens
  source 1..1678: mol_type = genomic DNA
atgcctaggagaggctactccaagcctgggtcctggggcagcttctgggccatgctgaccttggtgggcctggtcacccatgcagcacagagagccgatgttggcggggaggcagctggcacctccatcaaccactcccaggcggtgctccagcgcttgcaggagctgctgcggcagggcaacgccagcgatgtggttctgcgggtgcaggctgcgggcaccgatgaggtccgggtattccacgcccaccgcctgctgctgggactgcacagtgagctgttcctggagctgctaagtaaccagagcgaggcggtgctgcaggagccacaggactgcgccgctgtcttcgacaagttcatcaggtacctgtactgcggggagctgaccgtgctgctgacccaggccatccccctgcacagactggccaccaagtacggcgtgtcctccctgcagcgcggcgtggccgactacatgcgcgcgcacctggcgggaggcgcgggcccggcggtgggctggtaccactacgcggtgggcaccggggacgaggccctgcgcgagagctgcctgcagttcctggcctggaacctgtcggccgtggcggccagcaccgagtggggcgccgtgagccccgagctgctctggcagctcctgcaacgctcggacctggtgctgcaggatgaactggagctgttccacgcgctggaggcctggctgggtcgcgcgcggccgccccctgccgtggccgagcgggcgctgcgcgccatacgctaccccatgatcccaccggcacagctgttccagctgcaggcgcgctcggcagccctggcgcgccacggccccgcggtggccgacctcctgctgcaggcctaccagttccacgccgcgtcgccgctgcactacgccaagttcttcgacgtcaacggcagcgccttcctgccccgcaactacctcgcgcccgcctggggcgccccgtgggtcatcaacaacccggcccgcgacgaccgcagcaccagcttccagacgcagctgggcccgagtggccacgacgcgggccgccgggtcacctggaacgtgctcttctcgccgcgctggctgcccgtcagcctgcggcccgtttacgcggacgccgcgggcactgctctgcccgccgcgcgcccggaggacggccgaccgcggctggtggtgacgccggccagcagcggcggcgacgcggcgggcgtgagcttccagaagacggtgctggtgggggcgcgccagcagggccgcctgctggtccgccacgcctacagcttccaccagagcagcgaggaggccggcgacttcctggcgcacgccgacctgcagcggcgcaactccgagtacctggttgagaacgccctgcacctgcacctcatcgtcaagcccgtataccacacccttatccggacccccaagtagcctcggggtctgggaataaaggcctggcctaggtggtccctgtgggtctgggaagggcaaggcgagcctggaggtggcaacaagcctggtcccctggatggccaggcgccggccaccctagggctggggtggagtccaggtgaggcgtggtagacaagatgcctggtttcaagagctgatttcacagctgacttgaaggaacgttcttggtcctgaataaaccgatgctcagagtggtaaa

SEQ ID NO: 799 - DNA, 1059 bp, Homo sapiens
  source 1..1059: mol_type = genomic DNA
atgtgctgccctggcgggcactataccctcattttaagacgaggaaacagattcagacgcgagaagagaccagccaaggtcactggggctcaaaccgaagtccagctggctcctccgctgccccgaggacgggcccggaggtctccctggagcgtgcccatttccctcagcattgaccgtctggagtttgaccttctgtatcctgccatcaagggtgacaccattcagctctacctgggggccaagttgttggactcacagggaaaggtgaccaagtggttcaataactctgcagcttccctgacaatgcccaccctggacaacatcccgttcagcctcatcgtgagtcaggacgtggtgaaagctgcagtggctgctgtgctctctccagaagaattcatggtcctgttggactctgtgcttcctgagagtgcccatcggctgaagtcaagcatcgggctgatcaatgaaaaggctgcagataagctgggatctacccagatcgtgaagatcctaactcaggacactcccgagttttttatagaccaaggccatgccaaggtggcccaactgatcgtgctggaagtgtttccctccagtgaagccctccgccctttgttcaccctgggcatcgaagccagctcggaagctcagttttacaccaaaggtgaccaacttatactcaacttgaataacatcagctctgatcggatccagctgatgaactctgggattggctggttccaacctgatgttctgaaaaacatcatcactgagatcatccactccatcctgctgccgaaccagaatggcaaattaagatctggggtcccagtgtcattggtgaaggccttgggattcgaggcagctgagtcctcactgaccaaggatgcccttgtgcttactccagcctccttgtggaaacccagctctcctgtctcccagtgaagacttggatggcagccatcagggaaggctgggtcccagctgggagtatgggtgtgagctctatagaccatccctctctgcaatcaataaacacttgcctgtgatgcctgc

SEQ ID NO: 800 - DNA, 1024 bp, Homo sapiens
  source 1..1024: mol_type = genomic DNA
tgagtgggggagagagaggagaccaggacagctgctgagacctctaagaagtccagatactaagagcaaagatgtttcaaactgggggcctcattgtcttctacgggctgttagcccagaccatggcccagtttggaggcctgcccgtgcccctggaccagaccctgcccttgaatgtgaatccagccctgcccttgagtcccacaggtcttgcaggaagcttgacaaatgccctcagcaatggcctgctgtctgggggcctgttgggcattctggaaaaccttccgctcctggacatcctgaagcctggaggaggtacttctggtggcctccttgggggactgcttggaaaagtgacgtcagtgattcctggcctgaacaacatcattgacataaaggtcactgacccccagctgctggaacttggccttgtgcagagccctgatggccaccgtctctatgtcaccatccctctcggcataaagctccaagtgaatacgcccctggtcggtgcaagtctgttgaggctggctgtgaagctggacatcactgcagaaatcttagctgtgagagataagcaggagaggatccacctggtccttggtgactgcacccattcccctggaagcctgcaaatttctctgcttgatggacttggccccctccccattcaaggtcttctggacagcctcacagggatcttgaataaagtcctgcctgagttggttcagggcaacgtgtgccctctggtcaatgaggttctcagaggcttggacatcaccctggtgcatgacattgttaacatgctgatccacggactacagtttgtcatcaaggtctaagccttccaggaaggggctggcctctgctgagctgcttcccagtgctcacagatggctggcccatgtgctggaagatgacacagttgccttctctccgaggaacctgccccctctcctttcccaccaggcgtgtgtaacatcccatgtgcctcacctaataaaatggctcttcttctgcatca

SEQ ID NO: 801 - DNA, 1063 bp, Homo sapiens
  source 1..1063: mol_type = genomic DNA
tgagtgggggagagagaggagaccaggacagctgctgagacctctaagaagtccagatactaagagcaaagatgtttcaaactgggggcctcattgtcttctacgggctgttagcccagaccatggcccagtttggaggcctgcccgtgcccctggaccagaccctgcccttgaatgtgaatccagccctgcccttgagtcccacaggtcttgcaggaagcttgacaaatgccctcagcaatggcctgctgtctgggggcctgttgggcattctggaaaaccttccgctcctggacatcctgaagcctggaggaggtacttctggtggcctccttgggggactgcttggaaaagtgacgtcagtgattcctggcctgaacaacatcattgacataaaggtcactgacccccagctgctggaacttggccttgtgcagagccctgatggccaccgtctctatgtcaccatccctctcggcataaagctccaagtgaatacgcccctggtcggtgcaagtctgttgaggctggctgtgaagctggacatcactgcagaaatcttagctgtgagagataagcaggagaggatccacctggtccttggtgactgcacccattcccctggaagcctgcaaatttctctgcttgatggacttggccccctccccattcaaggtcttctggacagcctcacagggatcttgaataaagtcctgcctgagttggttcagggcaacgtgtgccctctggtcaatgaggttctcagaggcttggacatcaccctggtgcatgacattgttaacatgctgatccacggactacagtttgtcatcaaggtctaagccttccaggaaggggctggcctctgctgagctgaactatttcttgctgctcaatccatttcctctggcccagcttcccagtgctcacagatggctggcccatgtgctggaagatgacacagttgccttctctccgaggaacctgccccctctcctttcccaccaggcgtgtgtaacatcccatgtgcctcacctaataaaatggctcttcttctgcatca

SEQ ID NO: 802 - DNA, 983 bp, Homo sapiens
  source 1..983: mol_type = genomic DNA
aatgtgagcaagccctggtggcagcgccagggtccagtgcagcccctccccacagcatgctgggggctaattctgatgtcatctttctgcagaaaaccattagaccatccctccagactgccaccctcaaagccgtctgcccaggccccatctgacactcttgacatctgcaggtcccagaccctatgatgtgtccactctggaggctcctcatcttcctcgggttgctggccttgcccttggcaccacacaagcagccttggcctggcctggcccaagcccacagagacaacaaatccaccctggcaagaattattgctcagggcctcataaagcacaacgcagaaagccgaattcagaacatccactttggggacagactgaatgcctcagcacaagtggccccagggctggtgggctggctaatcagcggcaggaaacaccagcagcagcaagagagcaggtccttcgataacaacatcgtaaagatgtgtgcacatatgagcatcgttgtggagttctggctggagaaagacgagtttggccggagggatctggtgataggcaaatgcgatgcagagcccagcagtgtccatgtggccatcctcactgaggctatcccaccaaagatgaatcagtttctctacaacctcaaagagaatctgcaaaaagttctcccacacatggtagaaagtcaggtatgtcctctgatcggtgaaatcctcgggcagctggatgtgaaactgttgaaaagcctcatagaacaggaggctgctcatgaaccaacccaccatgaaaccagccaaccctctgcatgccaggctggagagtcccccagctgacttctgctgatcagaaggaaagtccacatcttgcaaccttaagtctcccttagagtggggcttctgctaccctaaaaactttaccccaggctctgtggacataccatcctctcctacaataaactctagctctgaagggtg

SEQ ID NO: 803 - DNA, 1116 bp, Homo sapiens
  source 1..1116: mol_type = genomic DNA
ccagggttccacatgttgctctcccaatgtgagcaagccctggtggcagcgccagggtccagtgcagcccctccccacagcatgctgggggctaattctgatgtcatctttctgcagaaaaccattagaccatccctccagactgccaccctcaaagccgtctgcccaggccccatctgacactcttgacatctgcaggtcccagaccctatgatgtgtccactctggaggctcctcatcttcctcgggttgctggccttgcccttggcaccacacaagcagccttggcctggcctggcccaagcccacagagacaacaaatccaccctggcaagaattattgctcagggcctcataaagcacaacgcagaaagccgaattcagaacatccactttggggacagactgaatgcctcagcacaagtggccccagggctggtgggctggctaatcagcggcaggaaacaccagcagcagcaagagagcagcatcaacatcaccaacattcagctggactgtggtgggatccagatatcattccataaggagtggttctcggcaaatatctcacttgaatttgaccttgaattgagaccgtccttcgataacaacatcgtaaagatgtgtgcacatatgagcatcgttgtggagttctggctggagaaagacgagtttggccggagggatctggtgataggcaaatgcgatgcagagcccagcagtgtccatgtggccatcctcactgaggctatcccaccaaagatgaatcagtttctctacaacctcaaagagaatctgcaaaaagttctcccacacatggtagaaagtcaggtatgtcctctgatcggtgaaatcctcgggcagctggatgtgaaactgttgaaaagcctcatagaacaggaggctgctcatgaaccaacccaccatgaaaccagccaaccctctgcatgccaggctggagagtcccccagctgacttctgctgatcagaaggaaagtccacatcttgcaaccttaagtctcccttagagtggggcttctgctaccctaaaaactttaccccaggctctgtggacataccatcctctcctacaataaactctagctctgaagggtg

SEQ ID NO: 804 - DNA, 1822 bp, Homo sapiens
  source 1..1822: mol_type = genomic DNA
agaaggttgtgaatccatgctaaaggtaaacaaactgcaacttatatctgcaatttattttggtatagacaagaggtatgccagtagcacactggtggcttcagaagaaattctcaacacctagctcgccagagagtctatgtatgggattgaacaatctgtaaactaaaggatcctaatcatgaaaataagtatgataaattataagtcactattggcactgttgtttatattagcctcctggatcatttttacagttttccagaactccacaaaggtttggtctgctctaaacttatccatctccctccattactggaacaactccacaaagtccttattccctaaaacaccactgatatcattaaagccactaacagagactgaactcagaataaaggaaatcatagagaaactagatcagcagatcccacccagacctttcacccacgtgaacaccaccaccagcgccacacatagcacagccaccatcctcaaccctcgagatacgtactgcaggggagaccagctgcacatcctgctggaggtgagggaccacttgggacgcaggaagcaatatggcggggatttcctgagggccaggatgtcttccccagcgctgatggcaggtgcttcaggaaaggtgactgacttcaacaacggcacctacctggtcagcttcactctgttctgggagggccaggtctctctgtctctgctgctcatccaccccagtgaaggggtgtcagctctctggagtgcaaggaaccaaggctatgacagggtgatcttcactggccagtttgtcaatggcacttcccaagtccactctgaatgtggcctgatcctaaacacaaatgctgaattgtgccagtacctggacaacagagaccaagaaggcttctactgtgtgaggcctcaacacatgccctgtgctgcactcactcacatgtattctaagaacaagaaagtttcttatcttagcaaacaagaaaagagcctctttgaaaggtcaaatgtgggtgtagagattatggaaaaattcaatacaattagtgtctccaaatgcaacaaagaaacagttgcaatgaaagagaaatgcaagtttggaatgacatccacaatccccagtgggcatgtctggagaaacacatggaatcctgtctcctgtagtttggctacagtcaaaatgaaggaatgcctgagaggaaaactcatatacctaatgggagattccacgatccgccagtggatggaatacttcaaagccagtatcaacacactgaagtcagtggatctgcatgaatctggaaaattgcaacaccagcttgctgtggatttggataggaacatcaacatccagtggcaaaaatattgttatcccttgataggatcaatgacctattcagtcaaagagatggagtacctcacccgggccattgacagaactggaggagaaaaaaatactgtcattgttatttccctgggccagcatttcagaccctttcccattgatgtttttatccgaagggccctcaatgtccacaaagccattcagcatcttcttctgagaagcccagacactatggttatcatcaaaacagaaaacatcagggagatgtacaatgatgcagaaagatttagtgactttcatggttacattcaatatctcatcataaaggacattttccaggatctcagtgtgagtatcattgatgcctgggatataacaattgcatatggcacaaataatgtacacccacctcaacatgtagtcggaaatcagattaatatattattaaactatatttgttaaataaca

SEQ ID NO: 805 - DNA, 2159 bp, Homo sapiens
  source 1..2159: mol_type = genomic DNA
atgtggatggcctggtgtgtggctgcgctgtctgtggtggctgtgtgtggcaccagccacgagacaaacacggtcctcagggtgacgaaagatgtgttgagcaatgccatttcaggcatgctgcagcaaagtgatgctctccactcggccctgagagaggtgcccttgggtgttggtgatattccctacaatgacttccatgtccgaggaccccccccagtatataccaacggcaaaaaacttgatggtatttaccagtatggtcacattgagaccaacgacaacactgctcagctggggggcaaataccgatatggtgagatccttgagtccgagggaagcatcagggacctccgaaacagtggctatcgcagtgccgagaatgcatatggaggccacaggggcctcgggcgatacagggcagcacctgtgggcaggcttcaccggcgagagctgcagcctggagaaatcccacctggagttgccactggggcggtgggcccaggtggtttgctgggcactggaggcatgctggcagctgatggcatcctcgcaggccaaggtggcctgctcggcggaggtggtctccttggtgatggaggacttcttggaggagggggtgtcctgggcgtgctcggcgagggtggcatcctcagcactgtgcaaggcatcacggggctgcgtatcgtggagctgaccctccctcgggtgtccgtgcggctcctgcccggcgtgggtgtctacctgagcttgtacacccgtgtggccatcaacgggaagagtcttattggcttcctggacatcgcagtagaagtgaacatcacagccaaggtccggctgaccatggaccgcacgggttatcctcggctggtcattgagcgatgtgacaccctcctagggggcatcaaagtcaagctgctgcgagggcttctccccaatctcgtggacaatttagtgaaccgagtcctggccgacgtcctccctgacttgctctgccccatcgtggatgtggtgctgggtcttgtcaatgaccagctgggcctcgtggattctctgattcctctggggatattgggaagtgtccagtacaccttctccagcctcccgcttgtgaccggggaattcctggagctggacctcaacacgctggttggggaggctggaggaggactcatcgactacccattggggtggccagctgtgtctcccaagccgatgccagagctgcctcccatgggtgacaacaccaagtcccagctggccatgtctgccaacttcctgggctcagtgctgactctactgcagaagcagcatgctctagacctggatatcaccaatggcatgtttgaagagcttcctccacttaccacagccacactgggagccctgatccccaaggtgttccagcagtaccccgagtcctgcccacttatcatcaggatccaggtgctgaacccaccatctgtgatgctgcagaaggacaaagcgctggtgaaggtgttggccactgccgaggtcatggtctcccagcccaaagacctggagactaccatctgcctcattgacgtggacacagaattcttggcctcattttccacagaaggagataagctcatgattgatgccaagctggagaagaccagcctcaacctcagaacctcaaacgtgggcaactttgatattggcctcatggaggtgctggtggagaagatttttgacctggcattcatgcccgcaatgaacgctgtgctgggttctggcgtccctctccccaaaatcctcaacatcgactttagcaatgcagacattgacgtgttggaggaccttttggtgctgagcgcatgagtgacagaggcagagatgctgctgcaactggaagaagctggaaccagtcccagagaggctcggcctggaaacagtcccctgcccagagtcccctcagcctccatgacaggtccctccctggccccccaaccctcttcctcccttgccccaaccctgagaaagggtccagccactaccctgttggcaaacattcccttccatggtcagcctgccaggaggaggggagtcaccttggggctggaggcctctcagaccccatcctgacagcaggttgagtattcccactttcaataaaagactccactttcccggca

SEQ ID NO: 806 - DNA, 1454 bp, Homo sapiens
  source 1..1454: mol_type = genomic DNA
atgcagccagtcatgctggccctgtggtccctgcttctgctctggggcctggcgactccatgccaggagctgctagagacggtgggcacgctcgctcggattgacaaggatgaactcggcaaagccatccagaactcactggttggggagcccattctgcagaatgtgctgggatcggtcacagctgtgaaccggggcctcttgggctcaggagggctgcttggaggaggcggcttgctgggccacggaggggtttttggcgttgtcgaggagctctctggtctgaagattgaggagctcacgctgccaaaggtgttgctgaagctgctgccgggatttggggtgcagctgagcctgcacaccaaagtgggcatgcattgctctggcccccttggtggccttctgcagctggctgcggaggtgaacgtgacatcgcgggtggcgctggccgtgagctcaaggggcacacccatccttatcctcaagcgctgcagcacgctcctgggccacatcagcctgttctcagggctgctgcccacaccactctttggggtcgtggaacagatgctcttcaaggtgcttccgggactgctgtgccccgtggtggacagtgtgctgggtgtggtgaatgagctcctgggggctgtgctgggcctggtgtcccttggggctcttgggtccgtggaattctctctggccacattgcctctcatctccaaccagtacatagaactggacatcaaccctatcgtgaagagtgtagctggtgatatcattgacttccccaagtcccgtgccccagccaaggtgccccccaagaaggaccacacatcccaggtgatggtgccactgtacctcttcaacaccacgtttggactcctgcagaccaacggcgccctcgacatggacatcacccctgagctggttcccagcgatgtcccactgacaactacagacctggcagctttgctccctgaggccctggggaagctgcccctgcaccagcaactcctactgttcctgcgggtgagggaagctcccacggtcacactccacaacaagaaggccttggtctccctcccagccaacatccatgtgctgttctatgtccctaaggggacccctgaatccctctttgagctgaactccgtcatgactgtgcgtgcccagctggctccctcggctaccaagctgcacatctccctgtccctggaacggctcagtgtcaaggtggcctcctcctttacccatgcctttgacggatcgcgtttagaagaatggctcagccatgtggtcggggcagtgtatgcaccaaagcttaacgtggccctggatgttggaattcccctgcctaaggttcttaatatcaatttttccaattcagttctggagatcgtagagaatgctgttgtgctgaccgtggcatcctgaggctgagacatggccaccagcct

SEQ ID NO: 807 - DNA, 815 bp, Homo sapiens
  source 1..815: mol_type = genomic DNA
tcttgagctaggaaaggattactcgcgcctcgttagaatcagacatggcttcaggggatgcaggacgctcccctgagctgcctgtcaccgactaagtggagcagtgtttcttccgcagactcaactgagaagtcagcctctggggcaggcaccaggaatctgccttttcagttctgtctccggcaggctttgaggatgaaggctgcgggcattctgaccctcattggctgcctggtcacaggcgccgagtccaaaatctacactcgttgcaaactggcaaaaatattctcgagggctggcctggacaattactggggcttcagccttggaaactggatctgcatggcatattatgagagcggctacaacaccacagcccagacggtcctggatgacggcagcatcgactatggcatcttccagatcaacagcttcgcgtggtgcagacgcggaaagctgaaggagaacaaccactgccatgtcgcctgctcagccttgatcactgatgacctcacagatgcaattatctgtgccaggaaaattgttaaagagacacaaggaatgaactattggcaaggctggaagaaacattgtgagggcagagacctgtccgagtggaaaaaaggctgtgaggtttcctaaactggaactggacccaggatgctttgcagcaacgccctaggatttgcagtgaatgtccaaatgcctgtgtcatcttgtcccgtttcctcccaatattccttctcaaacttggagagggaaaattaagctatacttttaagaaaataaatatttccatttaaatgtcttcaccc

SEQ ID NO: 808 - DNA, 2449 bp, Homo sapiens
  source 1..2449: mol_type = genomic DNA
gaccaagaacacaagcatcttaatttgaatccacaaagtttcatgtaatgaaaagaaatacataattttaattcaacccgagtgttttccaagaagattgtatttgcttaaattgctacagtaattcaagagacagccctgtctggacacagagttactgtggatttttaagagactcagttaaagaatttaggaatttctgattcatttaaaggatttacaaattcatcaacccctgaaaactaaagcaaattgaacaggaaaaaaaaaaagaagatgggttttttaagtccaatatatgttattttcttcttttttggagtcaaagtacattgccaatatgaaacttatcagtgggatgaagactatgaccaagagccagatgatgattaccaaacaggattcccatttcgtcaaaatgtagactacggagttccttttcatcagtatactttaggctgtgtcagtgaatgcttctgtccaactaactttccatcatcaatgtactgtgataatcgcaaactcaagactatcccaaatattccgatgcacattcagcaactctaccttcagttcaatgaaattgaggctgtgactgcaaattcattcatcaatgcaactcatcttaaagaaattaacctcagccacaacaaaattaaatctcaaaagattgattatggtgtgtttgctaagcttccaaatctactacaacttcatctagagcataataatttagaagaatttccatttcctcttcctaaatctctggaaagactccttcttggttacaatgaaatctccaaactgcagacaaatgctatggatgggctagtaaacttgaccatgcttgatctctgttataattatcttcatgattctctgctaaaagacaaaatctttgccaaaatggaaaaactaatgcagctcaacctctgcagtaacagattagaatcaatgcctcctggtttgccttcttcacttatgtatctgtctttagaaaataattcaatttcttctatacccgaaaaatacttcgacaaacttccaaaacttcatactctaagaatgtcacacaacaaactacaagacatcccatataatatttttaatcttcccaacattgtagaactcagtgttggacacaacaaattgaagcaagcattctatattccaagaaatttggaacacctatacctacaaaataatgaaatagaaaagatgaatcttacagtgatgtgtccttctattgacccactacattaccaccatttaacatacattcgtgtggaccaaaataaactaaaagaaccaataagctcatacatcttcttctgcttccctcatatacacactatttattatggtgaacaacgaagcactaatggtcaaacaatacaactaaagacacaagttttcaggagatttccagatgatgatgatgaaagtgaagatcacgatgatcctgacaatgctcatgagagcccagaacaagaaggagcagaagggcactttgaccttcattattatgaaaatcaagaatagcaagaaactatataggtatacacttacgacttcacaaaacctatacttaatatagtaaatctaagtaaacatgtattactcaaagtaatatatttagaattatgtattagtataagatcagaattgaatttaagttgttggtgacatctgcatcatttcataggattagaacttactcaaaataatgtaaatctttaaaaatataaattagaatgacaagtgggaatcataaattaaacgttaatggtttcttatgctctttttaaatatagaaatatcatgttaaagaaagtgagtgtatcatttctattaacagtaatttttctaaaaatgaggaaggaagtagcattagcagtaaagacccacaggccatgacctttttgatcactctgaggacaatatttaaatgacaggaaggtatattaatgtaacaagcattcatttaaggaatagaccattttctctgacctcttcttcaggaaagctttcacactggtatttgtgatctcaccattatgacatccatccccctagctcaccacatagcacatagaatgatatttttgatttgtaagaggccatccaggtactaaggacccaaggcatacagattcacaaaattaactaatctttttgcctcagaataccaaaacaacaaaattataaagctgtatttggacaactaaaaaacaccaaactatctcattgcaatttgtattttagcagatttcagcaactatcctaaacaatgttattgtgttccattttaactgggataaatgtttttgtaaaaatacaaccatagaaaggcctctttgttacaaaatgatttgcaaagaaataactgctttgtttgcaagattaaattagtgttggcaaaataaagttctaaagataatactaaaca

SEQ ID NO: 809 - DNA, 506 bp, Homo sapiens
  source 1..506: mol_type = genomic DNA
gtgacccgtccagtcacacagggtctcaaactccaaggagccccacacctggtttaatgctctgctgttgccctcttgctgatgcccttcttatttttttagagacagggtcttgcttccagcctgggcaacagagtgagactctatctcaaaaacaaaacaaaacaaacaacaaaaaatgggctggaggagcgggttgtaggcccttccgcctctggtgggtggggagaagcaggggagctggtgttcagctatattctacaaagaaggggtggatcctgagaggcaagggtgggactgaggcctagttacaggtggtcgggaaggaggttgaaggggaactgtgtgaccttggatgttctttgtaattatcttatgcttagctgacacatctgtaaaatggagatagcagcacccacttctttgagttgtgagaagtaaatgcatgtgaaatgtttagcgtgtgccgggcaccaagttaagagcccagtaaatgttggctgtta

SEQ ID NO: 810 - DNA, 2942 bp, Homo sapiens
  source 1..2942: mol_type = genomic DNA
ctcactcacctccgcactgcagccaagggaggcccgccctggcgtgggctgctgcctgtggctttgggcaggcaggagcgaaagggccaggggttgcctgtcctcccccaccctgttgaggccttcctccccctctgctgagcctcggttaattataactctgacctaagtgccctgtgacgtcaagcccgggccagccctgcccaggagacccagcaaccaggtccatgtctcagccatgctccccacggaggtcccccaatcccacccgggcccctcagcgttgcttctgctgcagctgttgctgccccccacatctgccttcttccccaacatctggagcctgctggctgcccctggctccatcacccaccaagacctaactgaggaggcagcgctcaacgtcaccctgcagctcttcctggagcagccacccccaggccgcccccctcttcgtcttgaggacttcctgggtcgaacactccttgctgatgacctctttgccgcctactttggacctggttcttctcggcggttccgagcagccttaggtgaggtgtctcgtgccaatgcagcccaggacttcctgccaacttccaggaatgaccccgacctgcactttgatgctgagcgactgggtcagggacgcgcgcgcctggtaggggctctgcgggagaccgtggtggcagccagggcccttgaccacaccctggctcgccagcgcctcggggctgcacttcatgccctgcaggatttctacagtcatagcaactgggtggagctgggcgagcagcagccacaccctcacctcctctggccaaggcaggagctccagaacctggcacaagtggccgatcctacctgctccgattgcgaggagttgagctgccccaggaattggctgggcttcacactcctcacctctggctactttggaactcatcccccgaaacctccagggaaatgtagccacgggggccattttgaccggagcagctcccagccaccgaggggaggcatcaacaaggacagcacatccccaggcttctcccctcaccacatgctgcacctccaggctgcaaaactggcccttctagcctccatccaggccttcagccttctgcgaagccgcctgggagacagggatttctccaggctgctggacatcaccccagcctccagcctgagctttgtcctggacaccacgggcagcatgggtgaggagatcaacgctgccaaaatccaggctcgccaccttgtggagcagcggagaggcagccccatggagcctgtccactatgtcctggtgccttttcatgacccagggttcggccctgtctttacaaccagtgaccctgacagcttctggcaacagcttaatgagatccatgccttggggggtggagacgagcctgagatgtgcctgtcagccctgcagctggccctgctgcacacacctccactctcagatatctttgtcttcacggatgcctcccccaaggatgcctttctcaccaaccaggtggaatccctgactcaggagcggcgctgccgggtaacattcctggtgactgaagatacatcaagggttcagggtcgagctcggcgtgagatcttgtcccctctgcgttttgagccatacaaagcagtggccctggcctcaggaggagaggtgatcttcaccaaagaccagcacattcgagacgtggcagccattgttggggagagcatggctgccctggtgactcttcccctggaccctcctgttgtggtgcctgggcagccacttgtgttcagcgtggatgggctgctccagaagatcacagtccggatccacggagacatcagcagcttctggatcaagaaccctgcaggggtctcccagggccaggaggaaggcgggggtcctctaggtcacactcgccgctttgggcagttctggatggtgaccatggatgaccctccacagacaggaacctgggagatccaggtcacagctgaggacacccctggggtgagagtgcaagcccagacctccctggacttcctcttccactttgggatccccatggaggatggaccccaccctggcctctaccccctgactcagccagttgcaggtcttcagacccagctgctggtagaagtgacagggttgggttccagagccaatcctggggatcctcagccgcatttctcccacgtcatccttcgaggggtcccagagggtgccgaactaggccaggtgcccttggagcccgtgggacctccggagcgaggtctcctcgcagcctcgctgtcgcccacgctgctgtccacccctagacccttctccctggagctgattggccaggacgcagcggggcggcgcctgcacagggctgcccctcagcctagcactgtagtccctgtccttctggagcttagtggcccctcgggtttcttggccccgggcagcaaagtcccgctcagtctccgcatcgccagcttctcgggccctcaggatcttgaccttaggactttcgtcaaccccagcttctccctcacctccaacctctccagggctcacctggaactgaatgagtcggcctggggccgcctgtggctggaggtcccagattcagcggccccggattccgtggtgatggtgactgtgactgcagggggacgagaagccaacccagtacccccgactcatgctttcctccggctcctggtatcggccccagccccgcaggtgaggaaccactactttccatcacagggaccggcacaccacccctaccggctcatctgacccgatcctcaccacggccacccctgccttttcccccttcacattggtgactcaaggcagggctggggcagggctggctgcgggcagcccctggtggggcacagttggaggggtgctgcttctgctaggcctggcctcctggtga

SEQ ID NO: 811 - DNA, 2881 bp, Homo sapiens
  source 1..2881: mol_type = genomic DNA
cctggcgtgggctgctgcctgtggctttgggcaggcaggagcgaaagggccaggggttgcctgtcctcccccaccctgttgaggccttcctccccctctgctgagcctcggttaattataactctgacctaagtgccctgtgacgtcaagcccgggccagccctgcccaggagacccagcaaccaggtccatgtctcagccatgctccccacggaggtcccccaatcccacccgggcccctcagcgttgcttctgctgcagctgttgctgccccccacatctgccttcttccccaacatctggagcctgctggctgcccctggctccatcacccaccaagacctaactgaggaggcagcgctcaacgtcaccctgcagctcttcctggagcagccacccccaggccgcccccctcttcgtcttgaggacttcctgggtcgaacactccttgctgatgacctctttgccgcctactttggacctggttcttctcggcggttccgagcagccttaggtgaggtgtctcgtgccaatgcagcccaggacttcctgccaacttccaggaatgaccccgacctgcactttgatgctgagcgactgggtcagggacgcgcgcgcctggtaggggctctgcgggagaccgtggtggcagccagggcccttgaccacaccctggctcgccagcgcctcggggctgcacttcatgccctgcaggatttctacagtcatagcaactgggtggagctgggcgagcagcagccacaccctcacctcctctggccaaggcaggagctccagaacctggcacaagtggccgatcctacctgctccgattgcgaggagttgagctgccccaggaattggctgggcttcacactcctcacctctggctactttggaactcatcccccgaaacctccagggaaatgtagccacgggggccattttgaccggagcagctcccagccaccgaggggaggcatcaacaaggacagcacatccccaggcttctcccctcaccacatgctgcacctccaggctgcaaaactggcccttctagcctccatccaggccttcagccttctgcgaagccgcctgggagacagggatttctccaggctgctggacatcaccccagcctccagcctgagctttgtcctggacaccacgggcagcatgggtgaggagatcaacgctgccaaaatccaggctcgccaccttgtggagcagcggagaggcagccccatggagcctgtccactatgtcctggtgccttttcatgacccagggttcggccctgtctttacaaccagtgaccctgacagcttctggcaacagcttaatgagatccatgccttggggggtggagacgagcctgagatgtgcctgtcagccctgcagctggccctgctgcacacacctccactctcagatatctttgtcttcacggatgcctcccccaaggatgcctttctcaccaaccaggtggaatccctgactcaggagcggcgctgccgggtaacattcctggtgactgaagatacatcaagggttcagggtcgagctcggcgtgagatcttgtcccctctgcgttttgagccatacaaagcagtggccctggcctcaggaggagaggtgatcttcaccaaagaccagcacattcgagacgtggcagccattgttggggagagcatggctgccctggtgactcttcccctggaccctcctgttgtggtgcctgggcagccacttgtgttcagcgtggatgggctgctccagaagatcacagtccggatccacggagacatcagcagcttctggatcaagaaccctgcaggggtctcccagggccaggaggaaggcgggggtcctctaggtcacactcgccgctttgggcagttctggatggtgaccatggatgaccctccacagacaggaacctgggagatccaggtcacagctgaggacacccctggggtgagagtgcaagcccagacctccctggacttcctcttccactttgggatccccatggaggatggaccccaccctggcctctaccccctgactcagccagttgcaggtcttcagacccagctgctggtagaagtgacagggttgggttccagagccaatcctggggatcctcagccgcatttctcccacgtcatccttcgaggggtcccagagggtgccgaactaggccaggtgcccttggagcccgtgggacctccggagcgaggtctcctcgcagcctcgctgtcgcccacgctgctgtccacccctagacccttctccctggagctgattggccaggacgcagcggggcggcgcctgcacagggctgcccctcagcctagcactgtagtccctgtccttctggagcttagtggcccctcgggtttcttggccccgggcagcaaagtcccgctcagtctccgcatcgccagcttctcgggccctcaggatcttgaccttaggactttcgtcaaccccagcttctccctcacctccaacctctccagggctcacctggaactgaatgagtcggcctggggccgcctgtggctggaggtcccagattcagcggccccggattccgtggtgatggtgactgtgactgcagggggacgagaagccaacccagtacccccgactcatgctttcctccggctcctggtatcggccccagccccgcaggaccggcacaccacccctaccggctcatctgacccgatcctcaccacggccacccctgccttttcccccttcacattggtgactcaaggcagggctggggcagggctggctgcgggcagcccctggtggggcacagttggaggggtgctgcttctgctaggcctggcctcctggtgacaca

SEQ ID NO: 812 - DNA, 4837 bp, Homo sapiens
  source 1..4837: mol_type = genomic DNA
agagcgcggagagggaccaggcaggcgccggaggggacccgcgcggaaaaggaagaagcccaaacaaaaacgctgtccggcgccaggcgcccacctgcaagcccaagccggtgctcggccagttacaaaagaaatggtcaggatctggacaacgataatgatagtattaatcctcctattaagaatcggcccaaacaaaccctcgctgtcagggcgacaggcgcccgcccaagcccagacctcggacctggttccaagcctgttcccgctgggtctctgggcgcccggtttctgcacctggagctcgcccgatgaggacaagaggccgaggaagccggttccggggacgggcaacagggactcagggaccagaaggcggctgcaggacgcgaccgagcaggaccccaggcccgggaacgacgtcgcgagcgctgagactgccgggcctcccagcccatctggcattcgagcgcaggaccgggcgccccggcaccgccgcgcgccacccgctaggatgccggtggccccagcgccctcagccgacggagagccgctgcaggaacagggaggaggccttttccaccgcacccggagcgtttacaacgggctggagctgaatacctggatgaaagtggagaggctgttcgtggagaagttccatcagtcgttttccttggacaattaacaagttaggcttccacagtgccagggcctggggatgctggacgtgggagagggttgtggtcgttagcctgggaaaatcattcttttaaacaatattcgccggaaaattagttttttcctaacatttctcaaacaaggcaattagggccgtcagaatcggtgctggaagacgaagtccccacagtgcaataatgaggttcccacggaaaatcagtacgttgtgttcgtaactgagataacagctagagaaggggctttgggctttttgagtctcccaatagtcagtctctctctctctctctctctctctcttcctctgactttctggctttggacactcccaatggtatatttctttgtggtgtttttatatttggatataagagaggaacttcttgttggatttttaagggaacacacttcgttttgacccttccaataaggaaaggggagctacaggaacagagagctctttagaaggttacttttaaatggaggcccccccattcatggtacccactcccacttggacctctgagacctccagaattaggcatcattctaaaatctggacattagaagtcacagactttgtatataaccacatattcataatttatcttttcaatgttttttattcatagatgaaaatcttgcaggcatagttaagaaaaatataattcctagaaagtacaagggaaggattatgctctgcagatacatgactaacaaggatagctggccatgcccagggctggtgttggttgaggaggtggtgatggtgcggggcatgtgtgtgtgtgtgtgtgtgtgcgcttgaggagttgtggaagtgttcatatctgtaaagtattatttcatggatgcagaccttaatgctaggttgaataactttgttgccatagaagaagaaccgcacgtcaggcttttttcattagcaaaccagtaagcactcactttgggcctctgaaatcacttccatcacctaacaccagagatacaaactgaagctagcccttaagagcctccccctaagatttagagagaatgatttctcaaccagttttcatctttgaaagtgccatttctccctttatcattgtgatttttattcaaatgcatgagtctctgattttctaccatatacaaagggtagagactacagtttcctatagaagaaacttcacatagtggccgaaggatcttatttctcaaaattcaggaactggtttcctctttctggaaattatgacattaacttgatttcatggtatctctttcatcttcctcaatgcctgtgctgtatgtatatttttattatatactgtaggtatatttttattaccaaaaaaaggagaatttgagcatgccacaatcttgaaaaatctgaggttgccctgctgtagaaccctttaactgccaggactttgtactgtttcccaagtgttaccagagccaggccgccagccttatgcagtctgtttaccttagctggaaccagggtgctgtgctgtgggttctatgaaactttctgtttcttcatatttggctttgtaattcctttcttatcagttttggaggcatttcctattattcctctgccatatgttttctgccaaattaattgccttaagattttccttaagcttttggaaatgtataatgtttgagaaaaaagaaaaagaatagactgagtggaatcgtatctagtttcagttaataacatgtttcagttgatgttactgttatagctactgggcataaagtctccttcccttttttgaatcctatttttgaggcattgaagctgtgtctgtaagagacaataggccagttgggttaaatcagtgacgagattgtccagtgcagattggtgcccagtgagtggatcttcactgctcacaggccggactggggtcagctcacacagcgaggtgacggtccgctcctcaagcagtggatggtgctcttcggccttgcagatgccgctccattttcctggcttcaaaattttccagatatttcagtgcccccagaatgacatgctaacattctgctggcatgggagcatgaggcagtttgtctctaaaacatgccagagaatctcttgtcactacctaggcaaagaaccagtggcaaggtggcagcctcccaaagagctcatccctaatgtgacatcctggaatcagatggcacggacaccggcccagccccttcccagctctgtgactaaggacaagtgacaccccccctcccccagcctcggtctcctcctgtgtacattcagaaggcagatgctgccatgaggccatgtgtgctatgtccatggtgcaaggtggcacgcatgccgagtcaccaggtgagactgccgctttgggaagggataggaaggatctccggtagccttcgtgggcaggatgcctcttatttgaatgtgcctttagccacctcacagagcctatttccacatccctgtggattcatccctgtggaaatcttgagaatcatttatcctatgctgtcatgaagcagcagcagaatggagaaggtttaaaaagactcatggacaggcaaagcggtcaaacacctcctggctcagacgcacttgccttcccacacacaagtctggaagctcaggatggtgttcacggaggcagatgctcggggccggggcctgagtttcctggggcacagcctccatatctggggttccctggactatgcccagatagctcataatgtcccagccttatttgtgatggagaaggacttggggaaaagccaccgggaagcagtaagtctaaccagggaagtgcactgacttgcatgctttgaagaagagaagggagaaaagatacaaaaccctcacctggtttgtctgtaacagttgttatttctcaggggagctgcattaatgggccaagcctgtgcagctgggtgtgtgaagcatgcattttgcaatggactgtctccaaaagcagagcgaggtcacccaagaaatctagagcaagggaaaatactcattagcaaaggaattttgctggagccttgtaacggccgactcattatttcctttccaagttattttaaatgaaattttaaaaaacatcttgctttccaagaaattttgcttgttggcatatgtttggtgttttgattcagtttggaggatgaactagttaatttccctgggagtacatgcctattaaaaatatagcatcctgcatctgaccaagatgctatcttactatcttattgtgcctatcttttatgcggagagagaaaggggggtgttgggaaggagaccagactgtggaaacattttctttattttttctctttttcttccttttatagtttgtttatttttcaacttgacatgggtagagaaagcgaatcgctagtatagaaagcacatctggaatccatccggcctcctctctctggctcaccctcctcccagcaatgtttctccttggaagttgggggaaggtaggcacctctgaccttggcagggtctaacttggggtcatccactgcatactcatcttccagaaggcgtcttattcctcctcgacaaaaaaaaaatgtgttggtattaaaatgctttgaggtaggctggatgaacccagcttagtgaggatgacatgaaaacccttagctaatggggtctttattgagtagaactcaggtaagttcagatgtaagcagtgtctctcagtaaacatgaaaagactgaagatgcagacaatcaaatacttaagtctcttgaagagctgggtggtgggcgggggtcttcccaggtggtcagggagatgtgttagtgtagcacttggaagagagtggaacgaccaggcaaggatgtgccgtggaggtgggcagtgggagcagcccagtgtcagcatctgtattggttagaagaccaccgctaatgaggaggagcgtctctaccctgcagctgtctgtactcctgtgtcttccgtaatgtgccaagctctctgaatatatgcaaaactagtctgcaaaaagccatatgtctcagcatctggctttatttctaagtgttcaggtggaatttaagccgcgatcaaatttacaatgtcactgccagctctggacacttacttttggaataaagcaaagagtgaacact

SEQ ID NO: 813 - DNA, 726 bp, Homo sapiens
  source 1..726: mol_type = genomic DNA
atgcgttttatggcaggccctgcagggagccagagtctgggtcccctgtgcttccacagcagcccccaagccctctacacggtcctcttaatagtgctggtcatgatgagcttggtgtttggtaagtttgttcctgtcaattgggaaccccctcaaccacttccattccccaaatacctgcgctgctaccgatgcctcttggagaccaaggagttagggtgccttctgggatctgacatctgcctcaccccagctggcagcagctgcatcactctccacaaaaagaacagcagcggttctgacgtcatggtgagtgactgccgaagtaaggagcagatgagtgattgttcaaatacccgaacttctccggtgtctggcttctggatattctctcaatactgcttcctggatttctgcaatgaccctcaaaacagagggctctatactccttagtgtgactgcagcaaactttggtgtaaaattccaccagtttccagccaccttcctgacttctatctgggcttggccaggacttctagtccctcataccagccctccttgcctccctccagccactggaccccagccttggctcttcctcttggttgacgcccttcagcacacttactgctactctgtacccccagccctactgcccaccaggtttcctctcttgtcccctagtccctggatgtttctcccaaataaatttgtgtgtaaactgtt

SEQ ID NO: 814 - DNA, 720 bp, Homo sapiens
  source 1..720: mol_type = genomic DNA
atgcagaccttcccagttgctggggcgctggaccctgctatactggacacaagcagcccccaagccctctacacggtcctcttaatagtgctggtcatgatgagcttggtgtttggtaagtttgttcctgtcaattgggaaccccctcaaccacttccattccccaaatacctgcgctgctaccgatgcctcttggagaccaaggagttagggtgccttctgggatctgacatctgcctcaccccagctggcagcagctgcatcactctccacaaaaagaacagcagcggttctgacgtcatggtgagtgactgccgaagtaaggagcagatgagtgattgttcaaatacccgaacttctccggtgtctggcttctggatattctctcaatactgcttcctggatttctgcaatgaccctcaaaacagagggctctatactccttagtgtgactgcagcaaactttggtgtaaaattccaccagtttccagccaccttcctgacttctatctgggcttggccaggacttctagtccctcataccagccctccttgcctccctccagccactggaccccagccttggctcttcctcttggttgacgcccttcagcacacttactgctactctgtacccccagccctactgcccaccaggtttcctctcttgtcccctagtccctggatgtttctcccaaataaatttgtgtgtaaactgtt

SEQ ID NO: 815 - DNA, 2654 bp, Homo sapiens
  source 1..2654: mol_type = genomic DNA
accaggacagatttgtgctcagtggattgggtggtgtttttagtatggagcagaacagaattcctaggactgcgtgtgatgaaatgcaaggtcaaaaggaaaagacaaagcatatttcaaagatgagaaatatttgtttggatatctatgactgtctgtttatactgtaaggggcttaatcagcagctccatcttttagttttagttctaaaggaaaagtagcctaaagtcagtataactaaagggtggaacgaggtgggacaaggtccggaattgctgctcagtgatgtgtgtgtgcctgccgctggtggagctgagactgctcatctcagaaggatggggatgcttgatttcctggccaggttgtcccagcacagtggggattggccctgttgtatgacgaagacagcacatggtggcagagatagatactaacccatggactttccaagggagggaataggtctttggagggtatgcaagacaaaggtagacactggataaagaacccggtagtgcccaggtattaccccatctgggccattactcccacactcaggaaccagacgttgtgggtgaggacatgctgtccctcctgccaagtaataacttccttcccagccaggatcctgccccaagtaggaatatagctctgcatttacagcagctcctgctcagaccttgtcaaaaccaccctgcagcttaggattaaggagcatggtcacaggaaggtggggtttcagggcatcccctcaggaactgcccatctccccagaattccaaaatgaaggtccatatgcttgtaggtgtgctggtcatggtgggcttcacagtaggaaaggttcctgttcccgacatccggacgtgccacttctgcctcgtagaagacccttctgtaggatgcatttcaggctcagagaagtgtaccatcagcagctcatccctgtgcatggtgatcaccatctattatgatgtcaaggttcgcttcatcgttcgaggctgtggacagtacatttcctaccgctgccaagaaaaacgcaacacctactttgcagagtactggtatcaggcccagtgctgtcagtacgattattgcaactcctggtcaagcccccaactccagagctctctgccggagccccatgacaggcccctggccctgcctctgtctgactcccagattcagtggttctaccaggccctgaacctctccctgcccctccccaatttccatgctgggacggagcctgatggcctggaccccatggtcacactgtccctgaacctgggcttgtcttttgctgagctgcgccgcatgtacttgttcctcaatagttcaggacttttggttcttccccaggctggactcttgacacctcacccttcctgaattccacagtgcaaatatctttctgtaacaccctcagcatcctgcactgccctctctgaaaacacccacattctttggtcactgtgatttcttaggcctccgtctgttgtaccactagcatctatatgacttttgtgtaattttctctcttgaactctggtgctgtttttttgtttgtttgagacaaagtctcgctctgtcacccagggtggagtgcagtggcatgatctctgctcactacaacctccacctcccgggttccagcgattctcctgcctcagcctcccgagtagctgggactacaggcgtgcaccaccacgcctggctaattttttgtatttttagtagagacggggtttcaccatgttggtcaggctggtctcgaactcctgacctcgtaatctgccctcctcgacctcccaaagtgccgggattacaggtgtgagccactgtgcctgtctgagctctggtgctgttcttccccctagaaaagaatctctagtgtggattctgcccagacaggctgacctgagaaaggcacagtggttcctccattccttccccatcatctgagtgttccagtatcccccatccctctcaatccagtcacctgcctattgacatctagctctgtttcccctgtcttgtccatgtctctaagacccagtaccagactgaactagcagcaagaaggacgaggaggccgggcatggtggctcacgccggtaatcccagcactttgggaggccgaggtgggcggatcacttgagattgggagtttgagaccagcctggccaacatggtaaaacccgctctctattaaaaatagaaaaatcagctgggtgtggtggcacacctctgtaatcccagctactcaggaggctgagacaggagaatcacttgaacccgggaggcagaggttgcagtgagccgagatcgcgccactgcactccagcctgggtgacacagtgagactccgtctccaaaaaaaaggatgaggaatagaattctgtgcagatgtcctgacttggcaattttgtgtccctgcctcactgtctccaccaacccccgcctgtcctagtgttgttctgcctcctgtcctctcttgctctcttgtcagtctctggcttcctcggccccatttcacttcactgagtcctgacacccatctccctaggggcctgtgagaggagagggaagggtctgttctgctcagctccatgtcccccattttcctccacaataaactgggactgggctaaaa

SEQ ID NO: 816 - DNA, 1025 bp, Homo sapiens
  source 1..1025: mol_type = genomic DNA
cttacagaactcccacggacacaccatgattaggaccctgctgctgtccactttggtggctggagccctcagttgtggggtctccacttacgcgcctgatatgtctaggatgcttggaggtgaagaagcgaggcccaacagctggccctggcaggtctccctgcagtacagctccaatggccagtggtaccacacctgcggagggtccctgatagccaacagctgggtcctgacggctgcccactgcatcagacaaattataaaggcccacaaggttctgcaacgttgttcacttatcctcttctttgtccgtgacctctgctcatcacagctggaactcaccggagtttctgccggctcctccgggatctaccgcgtgatgctgggccagcataacctctacgttgcagagtccggctcgctggccgtcagtgtctctaagattgtggtgcacaaggactggaactccgaccaggtctccaaagggaacgacattgccctgctcaaactggctaaccccgtctccctcaccgacaagatccagctggcctgcctccctcctgccggcaccattctacccaacaactacccctgctacgtcacgggctggggaaggctgcagaccaacggggctctccctgatgacctgaagcagggccagttgctggttgtggactatgccacctgctccagctctggctggtggggcagcaccgtgaagacgaatatgatctgtgctgggggtgatggcgtgatatgcacctgcaacggagactccggtgggccgctgaactgtcaggcatctgacggccggtgggaggtgcatggcatcggcagcctcacgtcggtccttggttgcaactactactacaagccctccatcttcacgcgggtctccaactacaacgactggatcaattcggtgattgcaaataactaaccaaaagaagtccctgggactgtttcagacttggaaaggtcacagaaggaaaataatattatataaagtgacaactatgcaaatc

SEQ ID NO: 817 - DNA, 923 bp, Homo sapiens
  source 1..923: mol_type = genomic DNA
cttacagaactcccacggacacaccatgattaggaccctgctgctgtccactttggtggctggagccctcagttgtggggtctccacttacgcgcctgatatgtctaggatgcttggaggtgaagaagcgaggcccaacagctggccctggcaggtctccctgcagtacagctccaatggccagtggtaccacacctgcggagggtccctgatagccaacagctgggtcctgacggctgcccactgcatcagctcctccgggatctaccgcgtgatgctgggccagcataacctctacgttgcagagtccggctcgctggccgtcagtgtctctaagattgtggtgcacaaggactggaactccgaccaggtctccaaagggaacgacattgccctgctcaaactggctaaccccgtctccctcaccgacaagatccagctggcctgcctccctcctgccggcaccattctacccaacaactacccctgctacgtcacgggctggggaaggctgcagaccaacggggctctccctgatgacctgaagcagggccagttgctggttgtggactatgccacctgctccagctctggctggtggggcagcaccgtgaagacgaatatgatctgtgctgggggtgatggcgtgatatgcacctgcaacggagactccggtgggccgctgaactgtcaggcatctgacggccggtgggaggtgcatggcatcggcagcctcacgtcggtccttggttgcaactactactacaagccctccatcttcacgcgggtctccaactacaacgactggatcaattcggtgattgcaaataactaaccaaaagaagtccctgggactgtttcagacttggaaaggtcacagaaggaaaataatattatataaagtgacaactatgcaaatcaca

SEQ ID NO: 818 - DNA, 1184 bp, Homo sapiens
  source 1..1184: mol_type = genomic DNA
cacagctagttttccctctaacgacttcttcaagatcaggggctatgtcttattcgtttttttatgtccccggggattagctagttcttgggaaacaactgggacttgggattcaaaacagtttgctaagtgaatgaatgagaggcccagtcaagctacttcccttcagtgctgcacagtgcaacaaataaccagctcagatacaggttcaaagaccacaggcttctccctggacagctcagctctcctcataactcctgagaaaccctggacatgccagggtgtactatggagtggttgcatccggaagagggggaggaagtcccaaacactaagtaatccaggtttgggttggaaaacaaggttgaagttactcattagcaggtgaaagggtcaagggtcgaacgcaagggagctgaaagcagagtggactgagcagccagtaggggagagagcagttaaggcacacagagcaccagctccctcctgcctgaagatgttccaccaaatttgggcagctctgctctacttctatggtattatccttaactccatctaccagtgccctgagcacagtcaactgacaactctgggcgtggatgggaaggagttcccagaggtccacttgggccagtggtactttatcgcaggggcagctcccaccaaggaggagttggcaacttttgaccctgtggacaacattgtcttcaatatggctgctggctctgccccgatgcagctccaccttcgtgctaccatccgcatgaaagatgggctctgtgtgccccggaaatggatctaccacctgactgaagggagcacagatctcagaactgaaggccgccctgacatgaagactgagctcttttccagctcatgcccaggtggaatcatgctgaatgagacaggccagggttaccagcgctttctcctctacaatcgctcaccacatcctcccgaaaagtgtgtggaggaattcaagtccctgacttcctgcctggactccaaagccttcttattgactcctaggaatcaagaggcctgtgagctgtccaataactgacctgtaacttcatctaagtccccagatgggtacaatgggagctgagttgttggagggagaagctggagacttccagctccagctcccactcaagataataaagataatttttcaatcctca

SEQ ID NO: 819 - DNA, 922 bp, Homo sapiens
  source 1..922: mol_type = genomic DNA
ccccaaacctgccaccgacggccacttccgtttccccgatagtatttggggatctcgaagcgatacttccggctccccccaggtccccaagctttacttttgtggggcacgacgagaaagtccgcagccccaaacattcccagaggtccacttgggccagtggtactttatcgcaggggcagctcccaccaaggaggagttggcaacttttgaccctgtggacaacattgtcttcaatatggctgctggctctgccccgatgcagctccaccttcgtgctaccatccgcatgaaagatgggctctgtgtgccccggaaatggatctaccacctgactgaagggagcacagatctcagaactgaaggccgccctgacatgaagactgagctcttttccagctcatgcccaggtggaatcatgctgaatgagacaggccagggttaccagcgctttctcctctacaatcgctcaccacatcctcccgaaaagtgtgtggaggaattcaagtccctgacttcctgcctggactccaaagccttcttattgactcctaggaatcaaggtaaggggttaaaatctcataaaacaggattaggactcaccaagtcttctggtgttacagggtgaaagaggctcgtgtgatgtcaccagagggatgtggctaagagctgtgatgtcacctgagggaggcaggatgggttctgggctactcaaaagagaggtttctgagtttgcactggataaagggggcagagggtcatacgtggagggaaaagagccttagagactcccctttgacacagggaatgaaagaacacgttctcccccaccccattactatcaactttgcttttctccctggacttcccttctgtccttctttttccctccccccatcacagaggcctgtgagctgtccaa

SEQ ID NO: 820 - DNA, 709 bp, Homo sapiens
  source 1..709: mol_type = genomic DNA
cccaaacctgccaccgacggccacttccgtttccccgatagtatttggggatctcgaagcgatacttccggctccccccaggtccccaagctttacttttgtggggcacgacgagaaagtccgcagccccaaacattcccagaggtccacttgggccagtggtactttatcgcaggggcagctcccaccaaggaggagttggcaacttttgaccctgtggacaacattgtcttcaatatggctgctggctctgccccgatgcagctccaccttcgtgctaccatccgcatgaaagatgggctctgtgtgccccggaaatggatctaccacctgactgaagggagcacagatctcagaactgaaggccgccctgacatgaagactgagctcttttccagctcatgcccaggtggaatcatgctgaatgagacaggccagggttaccagcgctttctcctctacaatcgctcaccacatcctcccgaaaagtgtgtggaggaattcaagtccctgacttcctgcctggactccaaagccttcttattgactcctaggaatcaagaggcctgtgagctgtccaataactgacctgtaacttcatctaagtccccagatgggtacaatgggagctgagttgttggagggagaagctggagacttccagctccagctcccactcaagataataaagataatttttcaatcctca

SEQ ID NO: 821 - DNA, 1030 bp, Homo sapiens
  source 1..1030: mol_type = genomic DNA
gcttacagaactcccacggacacaccatgataaggacgctgctgctgtccactttggtggctggagccctcagttgtggggaccccacttacccaccttatgtgactagggtggttggcggtgaagaagcgaggcccaacagctggccctggcaggtctccctgcagtacagctccaatggcaagtggtaccacacctgcggagggtccctgatagccaacagctgggtcctgacggctgcccactgcatcagtcaatcaatggttcagtgtgcccacaaggttctgcaacgttgttcacttatcctcttctttgtccgtgacctctgctcatcacagctggaactcaccggagtttctgccggctcctccaggacctaccgcgtggggctgggccggcacaacctctacgttgcggagtccggctcgctggcagtcagtgtctctaagattgtggtgcacaaggactggaactccaaccaaatctccaaagggaacgacattgccctgctcaaactggctaaccccgtctccctcaccgacaagatccagctggcctgcctccctcctgccggcaccattctacccaacaactacccctgctacgtcacgggctggggaaggctgcagaccaacggggctgttcctgatgtcctgcagcagggccggttgctggttgtggactatgccacctgctccagctctgcctggtggggcagcagcgtgaaaaccagtatgatctgtgctgggggtgatggcgtgatctccagctgcaacggagactctggcgggccactgaactgtcaggcgtctgacggccggtggcaggtgcacggcatcgtcagcttcgggtctcgcctcggctgcaactactaccacaagccctccgtcttcacgcgggtctccaattacatcgactggatcaattcggtgattgcaaataactaaccaaaagaagtccctgggactgtttcagacttggaaaggtcacagaaggaaaataatataataaagtgacaactatgcaaatc

SEQ ID NO: 822 - DNA, 467 bp, Homo sapiens
  source 1..467: mol_type = genomic DNA
ccttgttggctgtcctctccctgctgacctaaatgacaaagggaggggtgtccagtcagagtgtgagggctgtacccgtgggcagctgagggagtgcgagccacaggccaggcactctccttctcccattagctcagccgtggcatcggacttgcagcttcattttgggctgccttagccatgaagctccttttgctgactttgactgtgctgctgctcttatcccagctgactccaggtggcacccaaagatgctggaatctttatggcaaatgccgttacagatgctccaagaaggaaagagtctatgtttactgcataaataataaaatgtgctgcgtgaagcccaagtaccagccaaaagaaaggtggtggccattttaactgctttgaagcctgaagccatgaaaatgcagatgaagctcccagtggattcccacactctatcaataaacacctctggctga

SEQ ID NO: 823 - DNA, 389 bp, Homo sapiens
  source 1..389: mol_type = genomic DNA
gctctgccatgctcctcaaggcaataaataccagtctggactgcccagaatggagtcctctgtctgttttaccagttgagaagcctcctatccctccctgatcattcatcattcatgaagctccttcttctgcttttgactgttactctgctcctggcccaggtcaccccagtcatgaaatgttggggcaagtcaggcaggtgcagaacaacatgtaaagaaagtgaagtatactatatattatgcaaaactgaggctaagtgctgtgtggatcccaagtatgtacctgtaaaaccaaaattaacagacacaaatacaagcctggaatcaacttctgcagtctgacacctctcttccaaccttgagtctcaacatcatgggatcctgca

SEQ ID NO: 824 - DNA, 324 bp, Homo sapiens
  source 1..324: mol_type = genomic DNA
atgaaacttctttacctgtttcttgccatccttctggccatagaagaaccagtgatatcagtagagtgttggatggatggacactgccggttgttgtgcaaagatggtgaagacagcatcatacgctgccgaaatcgtaaacggtgctgtgttcctagtcgttatttaacaatccaaccagtaacaattcatggaatccttggctggaccactcctcagatgtccacaacagctccaaaaatgaagacaaatataactaatagatagaaatgactttgtttcaggttgcttagggtccacatttcattaaaactcacaaatttg

SEQ ID NO: 825 - DNA, 457 bp, Homo sapiens
  source 1..457: mol_type = genomic DNA
gttctaattcactgcccacagccctgctgataaaagcaaagctcatctctgccgtgctgcagggaaccctatttccttcccctgcagctcagccacctcctcctctcaggtctgccagccatgaaacttctttacctgtttcttgccatccttctggccatagaagaaccagtgatatcaggcaaacgccacatccttcgatgcatgggtaacagtggaatttgtagggcctcttgcaaaaagaacgaacagccctacctctattgcagaaattgtcagtcctgctgcctccagtcctacatgaggataagcatttctggcaaagaggaaaataccgactggtcttatgagaagcagtggccaagactaccttgagtgctggtgattaccattctcaagctctctgggcacagagacctgctgtcaacccccctcattaaaattcatgtgcctgcta

SEQ ID NO: 826 - DNA, 3832 bp, Homo sapiens
  source 1..3832: mol_type = genomic DNA
ggctttaggaagttatttaactgatctctgccctagtttcttcatgtgttaaatatggatagtaatagtatctaccttatgaagtgactgtgaagataaaattatggattctgtttaagggtttaggccagtgtctggcacaggggaagcattctaaaaatatagctgatgctgttaaacaatgactgttgttgttgttttactgttattatccccaaagcggcccattctgtctgttgctgtcagctatgactcagtcccctgattaacttacgcaccacccattttatcccctgcagagatgctgcccccacccccttaggcccgagggatcaggagctatgggaccagaggccctgtcatctttactgctgctgctcttggtggcaagtggagatgctgacatgaagggacattttgatcctgccaagtgccgctatgccctgggcatgcaggaccggaccatcccagacagtgacatctctgcttccagctcctggtcagattccactgccgcccgccacagcaggttggagagcagtgacggggatggggcctggtgccccgcagggtcggtgtttcccaaggaggaggagtacttgcaggtggatctacaacgactgcacctggtggctctggtgggcacccagggacggcatgccgggggcctgggcaaggagttctcccggagctaccggctgcgttactcccgggatggtcgccgctggatgggctggaaggaccgctggggtcaggaggtgatctcaggcaatgaggaccctgagggagtggtgctgaaggaccttgggccccccatggttgcccgactggttcgcttctacccccgggctgaccgggtcatgagcgtctgtctgcgggtagagctctatggctgcctctggagggatggactcctgtcttacaccgcccctgtggggcagacaatgtatttatctgaggccgtgtacctcaacgactccacctatgacggacataccgtgggcggactgcagtatgggggtctgggccagctggcagatggtgtggtggggctggatgactttaggaagagtcaggagctgcgggtctggccaggctatgactatgtgggatggagcaaccacagcttctccagtggctatgtggagatggagtttgagtttgaccggctgagggccttccaggctatgcaggtccactgtaacaacatgcacacgctgggagcccgtctgcctggcggggtggaatgtcgcttccggcgtggccctgccatggcctgggagggggagcccatgcgccacaacctagggggcaacctgggggaccccagagcccgggctgtctcagtgccccttggcggccgtgtggctcgctttctgcagtgccgcttcctctttgcggggccctggttactcttcagcgaaatctccttcatctctgatgtggtgaacaattcctctccggcactgggaggcaccttcccgccagccccctggtggccgcctggcccacctcccaccaacttcagcagcttggagctggagcccagaggccagcagcccgtggccaaggccgaggggagcccgaccgccatcctcatcggctgcctggtggccatcatcctgctcctgctgctcatcattgccctcatgctctggcggctgcactggcgcaggctcctcagcaaggctgaacggagggtgttggaagaggagctgacggttcacctctctgtccctggggacactatcctcatcaacaaccgcccaggtcctagagagccacccccgtaccaggagccccggcctcgtgggaatccgccccactccgctccctgtgtccccaatggctctgcctacagtggggactatatggagcctgagaagccaggcgccccgcttctgcccccacctccccagaacagcgtcccccattatgccgaggctgacattgttaccctgcagggcgtcaccgggggcaacacctatgctgtgcctgcactgcccccaggggcagtcggggatgggccccccagagtggatttccctcgatctcgactccgcttcaaggagaagcttggcgagggccagtttggggaggtgcacctgtgtgaggtcgacagccctcaagatctggttagtcttgatttcccccttaatgtgcgtaagggacaccctttgctggtagctgtcaagatcttacggccagatgccaccaagaatgccaggaatgatttcctgaaagaggtgaagatcatgtcgaggctcaaggacccaaacatcattcggctgctgggcgtgtgtgtgcaggacgaccccctctgcatgattactgactacatggagaacggcgacctcaaccagttcctcagtgcccaccagctggaggacaaggcagccgagggggcccctggggacgggcaggctgcgcaggggcccaccatcagctacccaatgctgctgcatgtggcagcccagatcgcctccggcatgcgctatctggccacactcaactttgtacatcgggacctggccacgcggaactgcctagttggggaaaatttcaccatcaaaatcgcagactttggcatgagccggaacctctatgctggggactattaccgtgtgcagggccgggcagtgctgcccatccgctggatggcctgggagtgcatcctcatggggaagttcacgactgcgagtgacgtgtgggcctttggtgtgaccctgtgggaggtgctgatgctctgtagggcccagccctttgggcagctcaccgacgagcaggtcatcgagaacgcgggggagttcttccgggaccagggccggcaggtgtacctgtcccggccgcctgcctgcccgcagggcctatatgagctgatgcttcggtgctggagccgggagtctgagcagcgaccacccttttcccagctgcatcggttcctggcagaggatgcactcaacacggtgtgaatcacacatccagctgcccctccctcagggagcgatccaggggaagccagtgacactaaaacaagaggacacaatggcacctctgcccttcccctcccgacagcccatcacctctaatagaggcagtgagactgcaggtgggctgggcccacccagggagctgatgccccttctccccttcctggacacactctcatgtccccttcctgttcttccttcctagaagcccctgtcgcccacccagctggtcctgtggatgggatcctctccaccctcctctagccatcccttggggaagggtggggagaaatataggatagacactggacatggcccattggagcacctgggccccactggacaacactgattcctggagaggtggctgcgcccccagcttctctctccctgtcacacactggaccccactggctgagaatctgggggtgaggaggacaagaaggagaggaaaatgtttccttgtgcctgctcctgtacttgtcctcagcttgggcttcttcctcctccatcacctgaaacactggacctgggggtagccccgccccagccctcagtcacccccacttcccacttgcagtcttgtagctagaacttctctaagcctatacgtttctgtggagtaaatattgggattggggggaaagagggagcaacggcccatagccttggggttggacatctctagtgtagctgccacattgatttttctataatcacttggggtttgtacatttttggggggagagacacagatttttacactaatatatggacctagcttgaggcaattttaatcccctgcactaggcaggtaataataaaggttgagttttccacaa

SEQ ID NO: 827 - DNA, 3894 bp, Homo sapiens
  source 1..3894: mol_type = genomic DNA
ggaagggagggagccgaggcgagggggaggcggcgcctgggcccgagccgccccagccctggctcctctccccggaacaggcccccgacagctgctctcgggagccgcctcccgacacccgagccccgccggcgcctcccgctcccggctcccggctcctggctccctccgcctcccccgcccctcgccccgccgccgaagaggccccgctcccgggtcggacgcctgggtctgccgggaagagcgatgagagagatgctgcccccacccccttaggcccgagggatcaggagctatgggaccagaggccctgtcatctttactgctgctgctcttggtggcaagtggagatgctgacatgaagggacattttgatcctgccaagtgccgctatgccctgggcatgcaggaccggaccatcccagacagtgacatctctgcttccagctcctggtcagattccactgccgcccgccacagcaggttggagagcagtgacggggatggggcctggtgccccgcagggtcggtgtttcccaaggaggaggagtacttgcaggtggatctacaacgactgcacctggtggctctggtgggcacccagggacggcatgccgggggcctgggcaaggagttctcccggagctaccggctgcgttactcccgggatggtcgccgctggatgggctggaaggaccgctggggtcaggaggtgatctcaggcaatgaggaccctgagggagtggtgctgaaggaccttgggccccccatggttgcccgactggttcgcttctacccccgggctgaccgggtcatgagcgtctgtctgcgggtagagctctatggctgcctctggagggatggactcctgtcttacaccgcccctgtggggcagacaatgtatttatctgaggccgtgtacctcaacgactccacctatgacggacataccgtgggcggactgcagtatgggggtctgggccagctggcagatggtgtggtggggctggatgactttaggaagagtcaggagctgcgggtctggccaggctatgactatgtgggatggagcaaccacagcttctccagtggctatgtggagatggagtttgagtttgaccggctgagggccttccaggctatgcaggtccactgtaacaacatgcacacgctgggagcccgtctgcctggcggggtggaatgtcgcttccggcgtggccctgccatggcctgggagggggagcccatgcgccacaacctagggggcaacctgggggaccccagagcccgggctgtctcagtgccccttggcggccgtgtggctcgctttctgcagtgccgcttcctctttgcggggccctggttactcttcagcgaaatctccttcatctctgatgtggtgaacaattcctctccggcactgggaggcaccttcccgccagccccctggtggccgcctggcccacctcccaccaacttcagcagcttggagctggagcccagaggccagcagcccgtggccaaggccgaggggagcccgaccgccatcctcatcggctgcctggtggccatcatcctgctcctgctgctcatcattgccctcatgctctggcggctgcactggcgcaggctcctcagcaaggctgaacggagggtgttggaagaggagctgacggttcacctctctgtccctggggacactatcctcatcaacaaccgcccaggtcctagagagccacccccgtaccaggagccccggcctcgtgggaatccgccccactccgctccctgtgtccccaatggctctgcgttgctgctctccaatccagcctaccgcctccttctggccacttacgcccgtccccctcgaggcccgggcccccccacacccgcctgggccaaacccaccaacacccaggcctacagtggggactatatggagcctgagaagccaggcgccccgcttctgcccccacctccccagaacagcgtcccccattatgccgaggctgacattgttaccctgcagggcgtcaccgggggcaacacctatgctgtgcctgcactgcccccaggggcagtcggggatgggccccccagagtggatttccctcgatctcgactccgcttcaaggagaagcttggcgagggccagtttggggaggtgcacctgtgtgaggtcgacagccctcaagatctggttagtcttgatttcccccttaatgtgcgtaagggacaccctttgctggtagctgtcaagatcttacggccagatgccaccaagaatgccaggaatgatttcctgaaagaggtgaagatcatgtcgaggctcaaggacccaaacatcattcggctgctgggcgtgtgtgtgcaggacgaccccctctgcatgattactgactacatggagaacggcgacctcaaccagttcctcagtgcccaccagctggaggacaaggcagccgagggggcccctggggacgggcaggctgcgcaggggcccaccatcagctacccaatgctgctgcatgtggcagcccagatcgcctccggcatgcgctatctggccacactcaactttgtacatcgggacctggccacgcggaactgcctagttggggaaaatttcaccatcaaaatcgcagactttggcatgagccggaacctctatgctggggactattaccgtgtgcagggccgggcagtgctgcccatccgctggatggcctgggagtgcatcctcatggggaagttcacgactgcgagtgacgtgtgggcctttggtgtgaccctgtgggaggtgctgatgctctgtagggcccagccctttgggcagctcaccgacgagcaggtcatcgagaacgcgggggagttcttccgggaccagggccggcaggtgtacctgtcccggccgcctgcctgcccgcagggcctatatgagctgatgcttcggtgctggagccgggagtctgagcagcgaccacccttttcccagctgcatcggttcctggcagaggatgcactcaacacggtgtgaatcacacatccagctgcccctccctcagggagcgatccaggggaagccagtgacactaaaacaagaggacacaatggcacctctgcccttcccctcccgacagcccatcacctctaatagaggcagtgagactgcaggtgggctgggcccacccagggagctgatgccccttctccccttcctggacacactctcatgtccccttcctgttcttccttcctagaagcccctgtcgcccacccagctggtcctgtggatgggatcctctccaccctcctctagccatcccttggggaagggtggggagaaatataggatagacactggacatggcccattggagcacctgggccccactggacaacactgattcctggagaggtggctgcgcccccagcttctctctccctgtcacacactggaccccactggctgagaatctgggggtgaggaggacaagaaggagaggaaaatgtttccttgtgcctgctcctgtacttgtcctcagcttgggcttcttcctcctccatcacctgaaacactggacctgggggtagccccgccccagccctcagtcacccccacttcccacttgcagtcttgtagctagaacttctctaagcctatacgtttctgtggagtaaatattgggattggggggaaagagggagcaacggcccatagccttggggttggacatctctagtgtagctgccacattgatttttctataatcacttggggtttgtacatttttggggggagagacacagatttttacactaatatatggacctagcttgaggcaattttaatcccctgcactaggcaggtaataataaaggttgagttttcca

SEQ ID NO: 828 - DNA, 3783 bp, Homo sapiens
  source 1..3783: mol_type = genomic DNA
agaagtaggaggggcgtcttcccctcgtgggccctgagcgggactgcagccagccccctggggcgccagctttggaggcccccgacagctgctctcgggagccgcctcccgacacccgagccccgccggcgcctcccgctcccggctcccggctcctggctccctccgcctcccccgcccctcgccccgccgccgaagaggccccgctcccgggtcggacgcctgggtctgccgggaagagcgatgagagagatgctgcccccacccccttaggcccgagggatcaggagctatgggaccagaggccctgtcatctttactgctgctgctcttggtggcaagtggagatgctgacatgaagggacattttgatcctgccaagtgccgctatgccctgggcatgcaggaccggaccatcccagacagtgacatctctgcttccagctcctggtcagattccactgccgcccgccacagcaggttggagagcagtgacggggatggggcctggtgccccgcagggtcggtgtttcccaaggaggaggagtacttgcaggtggatctacaacgactgcacctggtggctctggtgggcacccagggacggcatgccgggggcctgggcaaggagttctcccggagctaccggctgcgttactcccgggatggtcgccgctggatgggctggaaggaccgctggggtcaggaggtgatctcaggcaatgaggaccctgagggagtggtgctgaaggaccttgggccccccatggttgcccgactggttcgcttctacccccgggctgaccgggtcatgagcgtctgtctgcgggtagagctctatggctgcctctggagggatggactcctgtcttacaccgcccctgtggggcagacaatgtatttatctgaggccgtgtacctcaacgactccacctatgacggacataccgtgggcggactgcagtatgggggtctgggccagctggcagatggtgtggtggggctggatgactttaggaagagtcaggagctgcgggtctggccaggctatgactatgtgggatggagcaaccacagcttctccagtggctatgtggagatggagtttgagtttgaccggctgagggccttccaggctatgcaggtccactgtaacaacatgcacacgctgggagcccgtctgcctggcggggtggaatgtcgcttccggcgtggccctgccatggcctgggagggggagcccatgcgccacaacctagggggcaacctgggggaccccagagcccgggctgtctcagtgccccttggcggccgtgtggctcgctttctgcagtgccgcttcctctttgcggggccctggttactcttcagcgaaatctccttcatctctgatgtggtgaacaattcctctccggcactgggaggcaccttcccgccagccccctggtggccgcctggcccacctcccaccaacttcagcagcttggagctggagcccagaggccagcagcccgtggccaaggccgaggggagcccgaccgccatcctcatcggctgcctggtggccatcatcctgctcctgctgctcatcattgccctcatgctctggcggctgcactggcgcaggctcctcagcaaggctgaacggagggtgttggaagaggagctgacggttcacctctctgtccctggggacactatcctcatcaacaaccgcccaggtcctagagagccacccccgtaccaggagccccggcctcgtgggaatccgccccactccgctccctgtgtccccaatggctctgcctacagtggggactatatggagcctgagaagccaggcgccccgcttctgcccccacctccccagaacagcgtcccccattatgccgaggctgacattgttaccctgcagggcgtcaccgggggcaacacctatgctgtgcctgcactgcccccaggggcagtcggggatgggccccccagagtggatttccctcgatctcgactccgcttcaaggagaagcttggcgagggccagtttggggaggtgcacctgtgtgaggtcgacagccctcaagatctggttagtcttgatttcccccttaatgtgcgtaagggacaccctttgctggtagctgtcaagatcttacggccagatgccaccaagaatgccaggaatgatttcctgaaagaggtgaagatcatgtcgaggctcaaggacccaaacatcattcggctgctgggcgtgtgtgtgcaggacgaccccctctgcatgattactgactacatggagaacggcgacctcaaccagttcctcagtgcccaccagctggaggacaaggcagccgagggggcccctggggacgggcaggctgcgcaggggcccaccatcagctacccaatgctgctgcatgtggcagcccagatcgcctccggcatgcgctatctggccacactcaactttgtacatcgggacctggccacgcggaactgcctagttggggaaaatttcaccatcaaaatcgcagactttggcatgagccggaacctctatgctggggactattaccgtgtgcagggccgggcagtgctgcccatccgctggatggcctgggagtgcatcctcatggggaagttcacgactgcgagtgacgtgtgggcctttggtgtgaccctgtgggaggtgctgatgctctgtagggcccagccctttgggcagctcaccgacgagcaggtcatcgagaacgcgggggagttcttccgggaccagggccggcaggtgtacctgtcccggccgcctgcctgcccgcagggcctatatgagctgatgcttcggtgctggagccgggagtctgagcagcgaccacccttttcccagctgcatcggttcctggcagaggatgcactcaacacggtgtgaatcacacatccagctgcccctccctcagggagcgatccaggggaagccagtgacactaaaacaagaggacacaatggcacctctgcccttcccctcccgacagcccatcacctctaatagaggcagtgagactgcaggtgggctgggcccacccagggagctgatgccccttctccccttcctggacacactctcatgtccccttcctgttcttccttcctagaagcccctgtcgcccacccagctggtcctgtggatgggatcctctccaccctcctctagccatcccttggggaagggtggggagaaatataggatagacactggacatggcccattggagcacctgggccccactggacaacactgattcctggagaggtggctgcgcccccagcttctctctccctgtcacacactggaccccactggctgagaatctgggggtgaggaggacaagaaggagaggaaaatgtttccttgtgcctgctcctgtacttgtcctcagcttgggcttcttcctcctccatcacctgaaacactggacctgggggtagccccgccccagccctcagtcacccccacttcccacttgcagtcttgtagctagaacttctctaagcctatacgtttctgtggagtaaatattgggattggggggaaagagggagcaacggcccatagccttggggttggacatctctagtgtagctgccacattgatttttctataatcacttggggtttgtacatttttggggggagagacacagatttttacactaatatatggacctagcttgaggcaattttaatcccctgcactaggcaggtaataataaaggttgagttttccacaa

SEQ ID NO: 829 - DNA, 3820 bp, Homo sapiens
  source 1..3820: mol_type = genomic DNA
gtcttcccctcgtgggccctgagcgggactgcagccagccccctggggcgccagctttggaggcccccgacagctgctctcgggagccgcctcccgacacccgagccccgccggcgcctcccgctcccggctcccggctcctggctccctccgcctcccccgcccctcgccccgccgccgaagaggccccgctcccgggtcggacgcctgggtctgccgggaagagcgatgagaggtgtctgaaggtggctattcactgagcgatggggttggacttgaaggaatgccaagagatgctgcccccacccccttaggcccgagggatcaggagctatgggaccagaggccctgtcatctttactgctgctgctcttggtggcaagtggagatgctgacatgaagggacattttgatcctgccaagtgccgctatgccctgggcatgcaggaccggaccatcccagacagtgacatctctgcttccagctcctggtcagattccactgccgcccgccacagcaggttggagagcagtgacggggatggggcctggtgccccgcagggtcggtgtttcccaaggaggaggagtacttgcaggtggatctacaacgactgcacctggtggctctggtgggcacccagggacggcatgccgggggcctgggcaaggagttctcccggagctaccggctgcgttactcccgggatggtcgccgctggatgggctggaaggaccgctggggtcaggaggtgatctcaggcaatgaggaccctgagggagtggtgctgaaggaccttgggccccccatggttgcccgactggttcgcttctacccccgggctgaccgggtcatgagcgtctgtctgcgggtagagctctatggctgcctctggagggatggactcctgtcttacaccgcccctgtggggcagacaatgtatttatctgaggccgtgtacctcaacgactccacctatgacggacataccgtgggcggactgcagtatgggggtctgggccagctggcagatggtgtggtggggctggatgactttaggaagagtcaggagctgcgggtctggccaggctatgactatgtgggatggagcaaccacagcttctccagtggctatgtggagatggagtttgagtttgaccggctgagggccttccaggctatgcaggtccactgtaacaacatgcacacgctgggagcccgtctgcctggcggggtggaatgtcgcttccggcgtggccctgccatggcctgggagggggagcccatgcgccacaacctagggggcaacctgggggaccccagagcccgggctgtctcagtgccccttggcggccgtgtggctcgctttctgcagtgccgcttcctctttgcggggccctggttactcttcagcgaaatctccttcatctctgatgtggtgaacaattcctctccggcactgggaggcaccttcccgccagccccctggtggccgcctggcccacctcccaccaacttcagcagcttggagctggagcccagaggccagcagcccgtggccaaggccgaggggagcccgaccgccatcctcatcggctgcctggtggccatcatcctgctcctgctgctcatcattgccctcatgctctggcggctgcactggcgcaggctcctcagcaaggctgaacggagggtgttggaagaggagctgacggttcacctctctgtccctggggacactatcctcatcaacaaccgcccaggtcctagagagccacccccgtaccaggagccccggcctcgtgggaatccgccccactccgctccctgtgtccccaatggctctgcctacagtggggactatatggagcctgagaagccaggcgccccgcttctgcccccacctccccagaacagcgtcccccattatgccgaggctgacattgttaccctgcagggcgtcaccgggggcaacacctatgctgtgcctgcactgcccccaggggcagtcggggatgggccccccagagtggatttccctcgatctcgactccgcttcaaggagaagcttggcgagggccagtttggggaggtgcacctgtgtgaggtcgacagccctcaagatctggttagtcttgatttcccccttaatgtgcgtaagggacaccctttgctggtagctgtcaagatcttacggccagatgccaccaagaatgccaggaatgatttcctgaaagaggtgaagatcatgtcgaggctcaaggacccaaacatcattcggctgctgggcgtgtgtgtgcaggacgaccccctctgcatgattactgactacatggagaacggcgacctcaaccagttcctcagtgcccaccagctggaggacaaggcagccgagggggcccctggggacgggcaggctgcgcaggggcccaccatcagctacccaatgctgctgcatgtggcagcccagatcgcctccggcatgcgctatctggccacactcaactttgtacatcgggacctggccacgcggaactgcctagttggggaaaatttcaccatcaaaatcgcagactttggcatgagccggaacctctatgctggggactattaccgtgtgcagggccgggcagtgctgcccatccgctggatggcctgggagtgcatcctcatggggaagttcacgactgcgagtgacgtgtgggcctttggtgtgaccctgtgggaggtgctgatgctctgtagggcccagccctttgggcagctcaccgacgagcaggtcatcgagaacgcgggggagttcttccgggaccagggccggcaggtgtacctgtcccggccgcctgcctgcccgcagggcctatatgagctgatgcttcggtgctggagccgggagtctgagcagcgaccacccttttcccagctgcatcggttcctggcagaggatgcactcaacacggtgtgaatcacacatccagctgcccctccctcagggagcgatccaggggaagccagtgacactaaaacaagaggacacaatggcacctctgcccttcccctcccgacagcccatcacctctaatagaggcagtgagactgcaggtgggctgggcccacccagggagctgatgccccttctccccttcctggacacactctcatgtccccttcctgttcttccttcctagaagcccctgtcgcccacccagctggtcctgtggatgggatcctctccaccctcctctagccatcccttggggaagggtggggagaaatataggatagacactggacatggcccattggagcacctgggccccactggacaacactgattcctggagaggtggctgcgcccccagcttctctctccctgtcacacactggaccccactggctgagaatctgggggtgaggaggacaagaaggagaggaaaatgtttccttgtgcctgctcctgtacttgtcctcagcttgggcttcttcctcctccatcacctgaaacactggacctgggggtagccccgccccagccctcagtcacccccacttcccacttgcagtcttgtagctagaacttctctaagcctatacgtttctgtggagtaaatattgggattggggggaaagagggagcaacggcccatagccttggggttggacatctctagtgtagctgccacattgatttttctataatcacttggggtttgtacatttttggggggagagacacagatttttacactaatatatggacctagcttgaggcaattttaatcccctgcactaggcaggtaataataaaggttgagttttcc

SEQ ID NO: 830 - DNA, 3949 bp, Homo sapiens
  source 1..3949: mol_type = genomic DNA
gtcttcccctcgtgggccctgagcgggactgcagccagccccctggggcgccagctttggaggcccccgacagctgctctcgggagccgcctcccgacacccgagccccgccggcgcctcccgctcccggctcccggctcctggctccctccgcctcccccgcccctcgccccgccgccgaagaggccccgctcccgggtcggacgcctgggtctgccgggaagagcgatgagaggtgtctgaaggtggctattcactgagcgatggggttggacttgaaggaatgccaagagatgctgcccccacccccttaggcccgagggatcaggagctatgggaccagaggccctgtcatctttactgctgctgctcttggtggcaagtggagatgctgacatgaagggacattttgatcctgccaagtgccgctatgccctgggcatgcaggaccggaccatcccagacagtgacatctctgcttccagctcctggtcagattccactgccgcccgccacagcaggttggagagcagtgacggggatggggcctggtgccccgcagggtcggtgtttcccaaggaggaggagtacttgcaggtggatctacaacgactgcacctggtggctctggtgggcacccagggacggcatgccgggggcctgggcaaggagttctcccggagctaccggctgcgttactcccgggatggtcgccgctggatgggctggaaggaccgctggggtcaggaggtgatctcaggcaatgaggaccctgagggagtggtgctgaaggaccttgggccccccatggttgcccgactggttcgcttctacccccgggctgaccgggtcatgagcgtctgtctgcgggtagagctctatggctgcctctggagggatggactcctgtcttacaccgcccctgtggggcagacaatgtatttatctgaggccgtgtacctcaacgactccacctatgacggacataccgtgggcggactgcagtatgggggtctgggccagctggcagatggtgtggtggggctggatgactttaggaagagtcaggagctgcgggtctggccaggctatgactatgtgggatggagcaaccacagcttctccagtggctatgtggagatggagtttgagtttgaccggctgagggccttccaggctatgcaggtccactgtaacaacatgcacacgctgggagcccgtctgcctggcggggtggaatgtcgcttccggcgtggccctgccatggcctgggagggggagcccatgcgccacaacctagggggcaacctgggggaccccagagcccgggctgtctcagtgccccttggcggccgtgtggctcgctttctgcagtgccgcttcctctttgcggggccctggttactcttcagcgaaatctccttcatctctgatgtggtgaacaattcctctccggcactgggaggcaccttcccgccagccccctggtggccgcctggcccacctcccaccaacttcagcagcttggagctggagcccagaggccagcagcccgtggccaaggccgaggggagcccgaccgccatcctcatcggctgcctggtggccatcatcctgctcctgctgctcatcattgccctcatgctctggcggctgcactggcgcaggctcctcagcaaggctgaacggagggtgttggaagaggagctgacggttcacctctctgtccctggggacactatcctcatcaacaaccgcccaggtcctagagagccacccccgtaccaggagccccggcctcgtgggaatccgccccactccgctccctgtgtccccaatggctctgcgttgctgctctccaatccagcctaccgcctccttctggccacttacgcccgtccccctcgaggcccgggcccccccacacccgcctgggccaaacccaccaacacccaggcctacagtggggactatatggagcctgagaagccaggcgccccgcttctgcccccacctccccagaacagcgtcccccattatgccgaggctgacattgttaccctgcagggcgtcaccgggggcaacacctatgctgtgcctgcactgcccccaggggcagtcggggatgggccccccagagtggatttccctcgatctcgactccgcttcaaggagaagcttggcgagggccagtttggggaggtgcacctgtgtgaggtcgacagccctcaagatctggttagtcttgatttcccccttaatgtgcgtaagggacaccctttgctggtagctgtcaagatcttacggccagatgccaccaagaatgccagcttctccttgttctccaggaatgatttcctgaaagaggtgaagatcatgtcgaggctcaaggacccaaacatcattcggctgctgggcgtgtgtgtgcaggacgaccccctctgcatgattactgactacatggagaacggcgacctcaaccagttcctcagtgcccaccagctggaggacaaggcagccgagggggcccctggggacgggcaggctgcgcaggggcccaccatcagctacccaatgctgctgcatgtggcagcccagatcgcctccggcatgcgctatctggccacactcaactttgtacatcgggacctggccacgcggaactgcctagttggggaaaatttcaccatcaaaatcgcagactttggcatgagccggaacctctatgctggggactattaccgtgtgcagggccgggcagtgctgcccatccgctggatggcctgggagtgcatcctcatggggaagttcacgactgcgagtgacgtgtgggcctttggtgtgaccctgtgggaggtgctgatgctctgtagggcccagccctttgggcagctcaccgacgagcaggtcatcgagaacgcgggggagttcttccgggaccagggccggcaggtgtacctgtcccggccgcctgcctgcccgcagggcctatatgagctgatgcttcggtgctggagccgggagtctgagcagcgaccacccttttcccagctgcatcggttcctggcagaggatgcactcaacacggtgtgaatcacacatccagctgcccctccctcagggagcgatccaggggaagccagtgacactaaaacaagaggacacaatggcacctctgcccttcccctcccgacagcccatcacctctaatagaggcagtgagactgcaggtgggctgggcccacccagggagctgatgccccttctccccttcctggacacactctcatgtccccttcctgttcttccttcctagaagcccctgtcgcccacccagctggtcctgtggatgggatcctctccaccctcctctagccatcccttggggaagggtggggagaaatataggatagacactggacatggcccattggagcacctgggccccactggacaacactgattcctggagaggtggctgcgcccccagcttctctctccctgtcacacactggaccccactggctgagaatctgggggtgaggaggacaagaaggagaggaaaatgtttccttgtgcctgctcctgtacttgtcctcagcttgggcttcttcctcctccatcacctgaaacactggacctgggggtagccccgccccagccctcagtcacccccacttcccacttgcagtcttgtagctagaacttctctaagcctatacgtttctgtggagtaaatattgggattggggggaaagagggagcaacggcccatagccttggggttggacatctctagtgtagctgccacattgatttttctataatcacttggggtttgtacatttttggggggagagacacagatttttacactaatatatggacctagcttgaggcaattttaatcccctgcactaggcaggtaataataaaggttgagttttcc

SEQ ID NO: 831 - DNA, 2238 bp, Homo sapiens
  source 1..2238: mol_type = genomic DNA
cttgtggagcattcgggcttggaaggaaagctataggctacccattcagctcccctgtcagagactcaagctttgagaaaggctagcaaagagcaaggaaagagagaaaacaacaaagtggcgaggccctcagagtgaaagcgtaaggttcagtcagcctgctgcagctttgcagacctcagctgggcatctccagactcccctgaaggaagagccttcctcacccaaacccacaaaagatgctgaaaaagcctctctcagctgtgacctggctctgcattttcatcgtggcctttgtcagccacccagcgtggctgcagaagctctctaagcacaagacaccagcacagccacagctcaaagcggccaactgctgtgaggaggtgaaggagctcaaggcccaagttgccaaccttagcagcctgctgagtgaactgaacaagaagcaggagagggactgggtcagcgtggtcatgcaggtgatggagctggagagcaacagcaagcgcatggagtcgcggctcacagatgctgagagcaagtactccgagatgaacaaccaaattgacatcatgcagctgcaggcagcacagacggtcactcagacctccgcagatgccatctacgactgctcttccctctaccagaagaactaccgcatctctggagtgtataagcttcctcctgatgacttcctgggcagccctgaactggaggtgttctgtgacatggagacttcaggcggaggctggaccatcatccagagacgaaaaagtggccttgtctccttctaccgggactggaagcagtacaagcagggctttggcagcatccgtggggacttctggctggggaacgaacacatccaccggctctccagacagccaacccggctgcgtgtagagatggaggactgggagggcaacctgcgctacgctgagtatagccactttgttttgggcaatgaactcaacagctatcgcctcttcctggggaactacactggcaatgtggggaacgacgccctccagtatcataacaacacagccttcagcaccaaggacaaggacaatgacaactgcttggacaagtgtgcacagctccgcaaaggtggctactggtacaactgctgcacagactccaacctcaatggagtgtactaccgcctgggtgagcacaataagcacctggatggcatcacctggtatggctggcatggatctacctactccctcaaacgggtggagatgaaaatccgcccagaagacttcaagccttaaaaggaggctgccgtggagcacggatacagaaactgagacacgtggagactggatgagggcagatgaggacaggaagagagtgttagaaagggtaggactgagaaacagcctataatctccaaagaaagaataagtctccaaggagcacaaaaaaatcatatgtaccaaggatgttacagtaaacaggatgaactatttaaacccactgggtcctgccacatccttctcaaggtggtagactgagtggggtctctctgcccaagatccctgacatagcagtagcttgtcttttccacatgatttgtctgtgaaagaaaataattttgagatcgttttatctattttctctacggcttaggctatgtgagggcaaaacacaaatccctttgctaaaaagaaccatattattttgattctcaaaggataggcctttgagtgttagagaaaggagtgaaggaggcaggtgggaaatggtatttctatttttaaatccagtgaaattatcttgagtctacacattatttttaaaacacaaaaattgttcggctggaactgacccaggctggacttgcggggaggaaactccagggcactgcatctggcgatcagactctgagcactgcccctgctcgccttggtcatgtacagcactgaaaggaatgaagcaccagcaggaggtggacagagtctctcatggatgccggcacaaaactgccttaaaatattcatagttaatacaggtatatctatttttatttactttgtaagaaacaagctcaaggagcttccttttaaattttgtctgtaggaaatggttgaaaactgaaggtagatggtgttatagttaataataaatgctgtaaataagcatctcactttgtaaaaataaaatattgtggttttgttttaaacattcaacgtttcttttccttctacaataaacactttcaaaatgtga

SEQ ID NO: 832 - DNA, 4978 bp, Homo sapiens
  source 1..4978: mol_type = genomic DNA
agctgagctccctgggtgatggctccttccacaagttctaacgtcccactgaaagcaagctgcaatttctgttgcttcttgtatcaattgcatgaaaggacgggcagtttcttttgatcctctggcatgccaaggcctgaatgccagtcctgggagccttaccagccctctaagaagaatcagaagcctgaccgggcgggaagtcctgacgcccttcccaggattgggcactgcggcagccccggcacagggcggggcccacctgaagccacattctcttgtcctgcccatcacagcgctgccaccaccgcctctggccctcagagggcggcaggcaacctctaagcttcctcctttcctctcttccccctttcctccctccctatgcccctgggtgcccgatccaggcttcaaagagacagctttcctgtacgcggtgtcctctgccgccctcacccacaccctggcccgggcctgcagcgctgggcgcatggagcgctgcacctgtgatgactctccggggctggagagccggcaggcctggcagtggggcgtgtgcggtgacaacctcaagtacagcaccaagtttctgagcaacttcctggggtccaagagaggaaacaaggacctgcgggcacgggcagacgcccacaatacccacgtgggcatcaaggctgtgaagagtggcctcaggaccacgtgtaagtgccatggcgtatcaggctcctgtgccgtgcgcacctgctggaagcagctctccccgttccgtgagacgggccaggtgctgaaactgcgctatgactcggctgtcaaggtgtccagtgccaccaatgaggccttgggccgcctagagctgtgggcccctgccaggcagggcagcctcaccaaaggcctggccccaaggtctggggacctggtgtacatggaggactcacccagcttctgccggcccagcaagtactcacctggcacagcaggtagggtgtgctcccgggaggccagctgcagcagcctgtgctgcgggcggggctatgacacccagagccgcctggtggccttctcctgccactgccaggtgcagtggtgctgctacgtggagtgccagcaatgtgtgcaggaggagcttgtgtacacctgcaagcactaggcctactgcccagcaagccagtctggcactgccaggacctcctgtggcacccttcaagctgcccagccggccctctgggcagactgtcatcacatgcatgcataaaccggcatgtgtgccaatgcacacgagtgtgccactcaccaccattccttggccagccttttgcctccctcgatactcaacaaagagaagcaaagcctcctcccttaacccaagcatccccaaccttgttgaggacttggagaggagggcagagtgagaaagacatggagggaaataagggagaccaagagcacagcaggactgaaattttggacgggagagaggggctattccatcttgcttcctgggatgaatggcttggagccagcatgttcttgggaggtgaactgctgggctaggaatgccaaggcaggcagtgccagctggaagtgaaggcgggagcctggctgagatgggtcaatcgggtcctgtggccctgctcaggtgcagtgggctccaggtgtcacacacctccaccactcccctggttttgctgtgccagagatggggagaaagcacaggtggtagaagccatccgttcagagaaaggagagctttctgtgcttgagtggacccgagtgagatctgtgccctggagccctgtgtccttgatttggcttttcaaatatgcctccgctgaggcctcattcttgtctcgagagctgggttatgcacactcacccagccgtgctcaaaactaccaccagtgcaggtaagacaggtgggagaactagccaccaaggcgggactcagtgcacctgaggttgaacagggagacaacggcccctccctgtgttccctgctggccaaaggaatcttcactcccagcgcagaggaggagggcaacagcttcctggtgcctggcagtgacgtggcgagctcagtttctcagctggctcttgagtgagctttggtgacttcctgtggctggggcctgcctggtctgtgacacccccataccagctgagttcacaatactgaagaacagctggctcacgagctatgacttgaagttacatttctattcttgtggctgctcatctagttaaggcttttgccctggctggggttataggtgcttgagtccttgctaagcctggctcctgggtagcctccttcagttcctaatggcctctcacttggccctcactttggctcttacttgaggaggagacgtgactttgataatttcctcagatcctgtggacattttcagcagcacctgccaaggccctctgtgaaaggaggagagactggtacctccacacaggcacacatggatgcacagcccctggaccaggctgggggttcctgttgcacatgcctctcttgttcaggatgaagaccttgcaggggtccccttgctggaggcattgtacttccccagagtggggcccgatgccacccaggaggaagtgacttctttcgggaagcccttggccactttgctggccctgccacgcccatctgtcagcttcctttctccctaaacctagagttgctgacccttcaccaacacaggaaatttcagaatcagctgaatgctcagaaacctcgcctgtgccagctccaggacaaaggcccgctgactgtgccctggccaactccctgagacctccaagggcgaggaggagctgcccagtctccagtggatcagggcagtctgctggatgctggaaggatttttgactgcagaggcccggctgagaagccaaactgacctgagcccctctcgttaaaatgacattgctgacccaagcacctggcccacaccttggcagcaggagaaaaatggggagagggctggttttctcctttcttccacttccccacagcatggagattttctctgccttcccaatccatcttgctcctccgagaccccaactctgcctccacccaggctcagtgctgggcgtaaggcagcagggacctcactggcagagcagggggcctgggagcaacgtggaggccagagcaccctgatccaccaacatgccacctgcattctgacttcatggctggcagtgccagggtcgtgggagggcaaagggcaggctctaaggcatctaggcagtggctggctgctaacatggacaccccaagtcaatggcacagtgcaggttctgagggctccttggcttgtggggtcttctctgtctgtctctctccctctcttcttccttgctctcatccctttcttttccagttacccctgaagacccacctcggccctcttggggcccctggggactagagtgaccactgacccctcattctacagctttaagggaaatgctcacagggtatttttgtctacctcaaatatatagtttttagagcaaaggagaataatttatatagctaagatatatgagaaagtatttatattatttatatagttgctatatttcacagacagcacaggtggggtttgtgtattttcccggaaaccctctgtctggggagatacagcctgacctgaccgggtcccccactgagcaggaggccgggtcgctgggaaggaggacaaacctgtattccatgactgggtctgtctcggagctggtaagcacatgtccgctctgtgatgagccctggtgggctccatccagaccctccttgtgatgtttttgtagattttctgcccttctgggtccaggcccccttcttctgctctggcaaaagtgtcttactcataatgataatgacaacgagaattcccacacctggcatttgtaaagcactttgctatttagaaacaaaaacttttacccctttcatctcacttgatttctccgttatctctgtgaggtaggtggggccacattactgtggccattttatagatgaggtccagagatggagagctgtgctcaaagtcacacctaagagacttgttcaatgaatatttactgaacatctccatagaccaggcactacgggctgacctgctctgagcccaggagccccaaagcctggataccactgtgagcccaagaactcagggaagcagttccttcccaggctgtgatcccagccttttggatctggatggcatgttggcacttcccccaagtggagtcccatgtctcaggggctttggctgcctgagaaggctggagagaccaggaacccatggaggccactccaaggggtccttctgcccacactgcccaagaagcttgggctacaccactgggcccctcccaacctacagatgaattttgattgctctcatttgtgttttgcttgtaaaaatgaattgttttccactggatttctggctgcttttgcaaaagtcagctgcgctggcagactgggcctgcatgtcctcctgcaggcagctagagtgagggagtctaatggacaggatgccccaagtgcccccgttgctcatggatgcccctgcctgcctctcatgagcacatagtcctgtcccctggtctagataagcccagctttcctggtacccttcatcacctggcagacagacagccccatgccaaccctggacattacttgcttttgaacctttcctttctcaacaaccatgaacttcaaatgctttctgtctcaggacactttagaataacaatggaagccatcacttattgagcaccccttatgtccatttattcaaccaatgattatttagggatctcttattgagcaccaggcagcatcctgggtgcttggtgcagcaaggaacaggaccaagtctctgcctcatggggctgacatcctagtgggtgagaaagacaataaaccaataaatgacatgcc

SEQ ID NO: 833 - DNA, 485 bp, Homo sapiens
  source 1..485: mol_type = genomic DNA
tctcacaatgaaacatcttcgtccccagttccctctcatcttggccatctactgcttctgcatgctacagattccctcctcaggatttcctcaacctttagctgatccttcagatggcttggatattgtgcagcttgagcagctggcatattgtctgagtcagtgggcacctctttctcgccaacctaaggataatcaagacatatacaaaaggtttttgtttcactactccagaactcaggaggcaacacatccagttaaaactgggtttcctccagtgcatcctctaatgcacctggctgccaagctcgccaacaggcggatgaagagaattctgcagcgaggctcggggactgctgcagtggacttcaccaagaaggatcacactgcgacctggggacgaccctttttccttttcaggcccaggaatggaagaaacattgaagatgaggcccagattcagtggtgaaagaaagctggatctg

SEQ ID NO: 834 - DNA, 2033 bp, Homo sapiens
  source 1..2033: mol_type = genomic DNA
ttcctcccggcgtgctccgcggctcttggctcacagccgtcccttcgctggtgggaagaagccgagatggcggcagccagcgctggggcaacccggctgctcctgctcttgctgatggcggtagcagcgcccagtcgagcccggggcagcggctgccgggccgggactggtgcgcgaggggctggggcggaaggtcgagagggcgaggcctgtggcacggtggggctgctgctggagcactcatttgagatcgatgacagtgccaacttccggaagcggggctcactgctctggaaccagcaggatggtaccttgtccctgtcacagcggcagctcagcgaggaggagcggggccgactccgggatgtggcagccctgaatggcctgtaccgggtccggatcccaaggcgacccggggccctggatggcctggaagctggtggctatgtctcctcctttgtccctgcgtgctccctggtggagtcgcacctgtcggaccagctgaccctgcacgtggatgtggccggcaacgtggtgggcgtgtcggtggtgacgcaccccgggggctgccggggccatgaggtggaggacgtggacctggagctgttcaacacctcggtgcagctgcagccgcccaccacagccccaggccctgagacggcggccttcattgagcgcctggagatggaacaggcccagaaggccaagaacccccaggagcagaagtccttcttcgccaaatactggcacatcatcctggggggggccgtgttgctcacagccctgcgtcctgctgcgccagggcccgcgccaccgccacaggaggcctgatggatgtacatcattcccgtcgtcctgttcctcatgatgtcaggagcgccagacaccgggggccagggtgggggtgggggtgggggtggtggtgggggtagtggccggtgagggcccaggctggtcagcgtcccgtcttgcacacccaggggcctccctttctgctggagtcccctgtgtcctcagccatcccaagaagggtttgctggtccctcctttccccccgtcccacgaggccacctgggccagccccttgtcctctgccttctgctggcagaggagcagctggactggggcctttggcacagcagccggtgtctcctgcgcccgcctcccccatggccccatgcagccccaggggcttcccccctgcccatggagtagagcccgagatcctggccactatgccagttctgacctcgcatccccctaccccgagcccatgcagtctgggaacatgccgccttctctccagcctctgtgcctttgttccaggtggtctcaccctcctgtccctggctgggctaggtggtcctgtccaggctcctgcagcgcccccctcactttgacactggactaggatgcagcctcccttctgtgtccccttgagggtaccctgggtcccctcatcaggggcagaggcatgaaagagtcggggctggatggccgggggcttctgggcccgacgcctagtgcagcccctggggtcgtggtttgacatttgtctgcctggtgcaaacaaggaatccttgcctttaaggtgacaggccctccacaggcttccagacttgaaggaaaaggtttaagaaagaaaacaaaaccaacagttagtggagtcaaagcccagacactgtaaatagaaccccctccaccaccccccgccgcccagcatcctacctggactgcggtgctacgagggcctgcgggcctttgctgtgtgccaccctccctgtaagtctatttaaaaacatcgacgatacattgaaatgtgtgaacgttttgaaaagctacagcttccagcagccaaaagcaactgttgttttggcaagacggtcctgatgtacaagcttgattgaaattcactgctcacttgatacgttattcagaaacccaaggaatggctgtccccatcctcatgtggctgtgtggagctcagctgtgttgtgtggcagtttattaaactgtcccccagatcgacacgc

SEQ ID NO: 835 - DNA, 825 bp, Homo sapiens
  source 1..825: mol_type = genomic DNA
tgggaagaagccgagatggcggcagccagcgctggggcaacccggctgctcctgctcttgctgatggcggtagcagcgcccagtcgagcccggggcagcggctgccgggccgggactggtgcgcgaggggctggggcggaaggtcgagagggcgaggcctgtggcacggtggggctgctgctggagcactcatttgagatcgatgacagtgccaacttccggaagcggggctcactgctctggaaccagcaggatggtaccttgtccctgtcacagcggcagctcagcgaggaggagcggggccgactccgggatgtggcagccctgaatggcctgtaccgggtccggatcccaaggcgacccggggccctggatggcctggaagctggtggctatgtctcctcctttgtccctgcgtgctccctggtggagtcgcacctgtcggaccagctgaccctgcacgtggatgtggccggcaacgtggtgggcgtgtcggtggtgacgcaccccgggggctgccggggccatgaggtggaggacgtggacctggagctgttcaacacctcggtgcagctgcagccgcccaccacagccccaggccctgagacggcggccttcattgagcgcctggagatggaacaggcccagaaggccaagaacccccaggagcagaagtccttcttcgccaaatactggatgtacatcattcccgtcgtcctgttcctcatgatgtcaggagcgccagacaccgggggccagggtgggggtgggggtgggggtggtggtgggggtagtggccgttgctgtgtgccaccctccctgtaa

SEQ ID NO: 836 - DNA, 1592 bp, Homo sapiens
  source 1..1592: mol_type = genomic DNA
ggagcctgcatcatgtcgagtccgcagaggaggaaggctatgccctgggcactgtcactgcttctcatgggcttccagctcctggtgacttatgcctggtgttctgaagaggaaatgggtggtaataataaaatagtccaggatcctatgttcctcgccacagtggagtttgccttgaacactttcaacgtgcagagcaaggaggagcatgcctacaggctgttgcgcgtcctgagttcatggagggaggatagcatggacagaaagtggcgaggtaagatggtgttctccatgaatctgcaactgcgccaaaccgtatgtaggaaatttgaagatgacattgacaactgcccttttcaagaaagcctggagctgaacaacgtaagacagggcatcagctttcctcaggtccacagctgtggatgctgcatggggtgtggtgtgggcacaggagcagctgacaaagccattccgagggacaaagggaagtgagcccacagcaggctgtaccaggctgccctgcttgtgccttagtgggaagcccagtgaggcattaagcccaggggttcactttcaggcccctggccaatctgagtttcctgattctgccctctgacaccattgcagctgcctgcacctgggccacatggccttcagaaccttctctctggtcttcctccccacttcttccctgccttctagagaaagagcctggagacaatggtgacaatgtctgtgggtacttttctcagggtttccctaccctgccctagacccaaaagtggtggaggctgagaagaagccccactgccctcgctcctaggccctgctgagctgcagcacctgctctaggggacgagctccaagcaaagcctggctctgggaaaacttcccattcttagtcaacccccttattgtaagattaacaaataggtaactaattgcctaagtctgggaactgcttccactgggacaaaacattctcctgctgctcttggatgcagggatcacaccaggacagcctggggttcccctgaggggcacgggctggaggaggaggcatggcacaagtgaccctggctaaggagggagggagcctcaaatcacgttgtagttcaggattggcctcaggctcaggctagacctgaaggccagagccacgtggcacaattgctggccccaggaatgggcaaggtggagatggaacctgtgttgagggcagatgccacaagattcccgaacctccccaaaccccgccctactgtctcttcctgtttgttccctcggaccttcagctgcttcttcactgttgaaaccatgccctggaagacatattttgaactcctgaacaagacctgctcagaggggctctcctgagtggaagccactcacatgcctggccacatgctgccccctcccccgtggacaccagctgttcccaggagttgacatatcagtggctgagcagctccgtgcatatttgttctcttattttgcaagtgtctgaggttttatgacttggcattttagaaaatcctcactgtccaggttcctcaagtagaataggtcattaaacatcagcatttgcagaa

SEQ ID NO: 837 - DNA, 4385 bp, Homo sapiens
  source 1..4385: mol_type = genomic DNA
ccctctcttccccccgccctgccttcccttgcaccctccttcttccctccgcccgggagctctccctggtccccggcgccgcctccttccctcccggctccccgctccccgctcccgtggctgccgccgccccggggaagaagagacaggggtggggtttgggggaagcgagagaggaggggagagaccctggccaggctggagcctggattcgaggggaggagggacgggaggaggagaaaggtggaggagaagggaggggggagcggggaggagcggccgggcctggggccttgaggcccggggagagccggggagccgggcccgcgcgccgagatgttgctgctgctgctactggcgccactcttcctccgccccccgggcgcgggcggggcgcagacccccaacgccacctcagaaggttgccagatcatacacccgccctgggaagggggcatcaggtaccggggcctgactcgggaccaggtgaaggctatcaacttcctgccagtggactatgagattgagtatgtgtgccggggggagcgcgaggtggtggggcccaaggtccgcaagtgcctggccaacggctcctggacagatatggacacacccagccgctgtgtccgaatctgctccaagtcttatttgaccctggaaaatgggaaggttttcctgacgggtggggacctcccagctctggacggagcccgggtggatttccggtgtgaccccgacttccatctggtgggcagctcccggagcatctgtagtcagggccagtggagcacccccaagccccactgccaggtgaatcgaacgccacactcagaacggcgcgcagtgtacatcggggcactgtttcccatgagcgggggctggccagggggccaggcctgccagcccgcggtggagatggcgctggaggacgtgaatagccgcagggacatcctgccggactatgagctcaagctcatccaccacgacagcaagtgtgatccaggccaagccaccaagtacctatatgagctgctctacaacgaccctatcaagatcatccttatgcctggctgcagctctgtctccacgctggtggctgaggctgctaggatgtggaacctcattgtgctttcctatggctccagctcaccagccctgtcaaaccggcagcgtttccccactttcttccgaacgcacccatcagccacactccacaaccctacccgcgtgaaactctttgaaaagtggggctggaagaagattgctaccatccagcagaccactgaggtcttcacttcgactctggacgacctggaggaacgagtgaaggaggctggaattgagattactttccgccagagtttcttctcagatccagctgtgcccgtcaaaaacctgaagcgccaggatgcccgaatcatcgtgggacttttctatgagactgaagcccggaaagttttttgtgaggtgtacaaggagcgtctctttgggaagaagtacgtctggttcctcattgggtggtatgctgacaattggttcaagatctacgacccttctatcaactgcacagtggatgagatgactgaggcggtggagggccacatcacaactgagattgtcatgctgaatcctgccaatacccgcagcatttccaacatgacatcccaggaatttgtggagaaactaaccaagcgactgaaaagacaccctgaggagacaggaggcttccaggaggcaccgctggcctatgatgccatctgggccttggcactggccctgaacaagacatctggaggaggcggccgttctggtgtgcgcctggaggacttcaactacaacaaccagaccattaccgaccaaatctaccgggcaatgaactcttcgtcctttgagggtgtctctggccatgtggtgtttgatgccagcggctctcggatggcatggacgcttatcgagcagcttcagggtggcagctacaagaagattggctactatgacagcaccaaggatgatctttcctggtccaaaacagataaatggattgttatatccagaactcacagcccaacctgaacaacctgactgctgtgggctgctcactggctttagctgctgtcttccccctggggctcgatggttaccacattgggaggaaccagtttcctttcgtctgccaggcccgcctctggctcctgggcctgggctttagtctgggctacggttccatgttcaccaagatttggtgggtccacacggtcttcacaaagaaggaagaaaagaaggagtggaggaagactctggaaccctggaagctgtatgccacagtgggcctgctggtgggcatggatgtcctcactctcgccatctggcagatcgtggaccctctgcaccggaccattgagacatttgccaaggaggaacctaaggaagatattgacgtctctattctgccccagctggagcattgcagctccaggaagatgaatacatggcttggcattttctatggttacaaggggctgctgctgctgctgggaatcttccttgcttatgagaccaagagtgtgtccactgagaagatcaatgatcaccgggctgtgggcatggctatctacaatgtggcagtcctgtgcctcatcactgctcctgtcaccatgattctgtccagccagcaggatgcagcctttgcctttgcctctcttgccatagttttctcctcctatatcactcttgttgtgctctttgtgcccaagatgcgcaggctgatcacccgaggggaatggcagtcggaggcgcaggacaccatgaagacagggtcatcgaccaacaacaacgaggaggagaagtcccggctgttggagaaggagaaccgtgaactggaaaagatcattgctgagaaagaggagcgtgtctctgaactgcgccatcaactccagtctcggcagcagctccgctcccggcgccacccaccgacacccccagaaccctctgggggcctgcccaggggaccccctgagccccccgaccggcttagctgtgatgggagtcgagtgcatttgctttataagtgagggtagggtgagggaggacaggccagtagggggagggaaagggagaggggaagggcaggggactcaggaagcagggggtccccatccccagctgggaagaacatgctatccaatctcatctcttgtaaatacatgtccccctgtgagttctgggctgatttgggtctctcatacctctgggaaacagacctttttctctcttactgcttcatgtaattttgtatcacctcttcacaatttagttcgtacctggcttgaagctgctcactgctcacacgctgcctcctcagcagcctcactgcatctttctcttcccatgcaacaccctcttctagttaccacggcaacccctgcagctcctctgcctttgtgctctgttcctgtccagcaggggtctcccaacaagtgctctttccaccccaaaggggcctctccttttctccactgtcataatctctttccatcttacttgcccttctatactttctcacatgtggctccccctgaattttgcttcctttgggagctcattcttttcgccaaggctcacatgctccttgcctctgctctgtgcactcacgctcagcacacatgcatcctcccctctcctgcgtgtgcccactgaacatgctcatgtgtacacacgcttttcccgtatgctttcttcatgttcagtcacatgtgctctcgggtgccctgcattcacagctacgtgtgcccctctcatggtcatgggtctgcccttgagcgtgtttgggtaggcatgtgcaatttgtctagcatgctgagtcatgtctttcctatttgcacacgtccatgtttatccatgtactttccctgtgtaccctccatgtaccttgtgtactttcttcccttaaatcatggtattcttctgacagagccatatgtaccctaccctgcacattgttatgcacttttccccaattcatgtttggtggggccatccacaccctctccttgtcacagaatctccatttctgctcagattccccccatctccattgcattcatgtactaccctcagtctacactcacaatcatcttctcccaagactgctcccttttgttttgtgtttttttgaggggaattaaggaaaaataagtgggggcaggtttggagagctgcttccagtggatagttgatgagaatcctgaccaaaggaaggcacccttgactgttgggatagacagatggacctatggggtgggaggtggtgtccctttcacactgtggtgtctcttggggaaggatctccccgaatctcaataaaccagtgaacagtgtgactcggc

SEQ ID NO: 838 - DNA, 959 bp, Homo sapiens
  source 1..959: mol_type = genomic DNA
agccttcaaagctagtggcagagggtagctcccctcctgcctgtggcttgtgctggcctagagagtatagggcagaaggatggcagatgagtgactccacatccagagctgcctccctttaatccaggatcctgtccttcctgtcctgtaggagtgcctgttgccagtgtggggtgagacaagtttgtcccacagggctgtctgagcagataagattaagggctgggtctgtgctcaattaactcctgtgggcacgggggctgggaagagcaaagtcagcggtgcctacagtcagcaccatgctgggcctgccgtggaagggaggtctgtcctgggcgctgctgctgcttctcttaggctcccagatcctgctgatctatgcctggcatttccacgagcaaagggactgtgatgaacacaatgtcatggctcgttacctccctgccacagtggagtttgctgtccacacattcaaccaacagagcaaggactactatgcctacagactggggcacatcttgaattcctggaaggagcaggtggagtccaagactgtattctcaatggagctactgctggggagaactaggtgtgggaaatttgaagacgacattgacaactgccatttccaagaaagcacagagctgaacaatactttcacctgcttcttcaccatcagcaccaggccctggatgactcagttcagcctcctgaacaagacctgcttggagggattccactgagtgaaacccactcacaggcttgtccatgtgctgctcccacattccgtggacatcagcactactctcctgaggactcttcagtggctgagcagctttggacttgtttgttatcctattttgcatgtgtttgagatctcagatcagtgttttagaaaatccacacatcttgagcctaatcatgtagtgtagatcattaaacatcagcattttaagaaa

SEQ ID NO: 839 - DNA, 444 bp, Homo sapiens
  source 1..444: mol_type = genomic DNA
atgtggagtctgccgccgagcagggctctgtcctgtgcgccactgctgcttctcttcagcttccagttcctggttacctatgcttggcgtttccaagaggaagaggagtggaatgaccaaaaacaaattgctgtttatctccctcccaccctggagtttgccgtgtacacattcaacaagcagagcaaggactggtatgcctacaagctggtgcctgtcctggcttcctggaaggagcagggttatgataagatgacattctccatgaatctgcaactgggcagaaccatgtgtgggaaatttgaagatgacattgacaactgcccttttcaagagagcccagagctgaacaatacctgcacctgcttcttcaccattggaatagagccctggaggacacggtttgacctctggaacaagacgtgctcaggcgggcattcctga

SEQ ID NO: 840 - DNA, 4104 bp, Homo sapiens
  source 1..4104: mol_type = genomic DNA
acatctccctcctgctcctcctcctcccctccgtcggtcagtcagtccgcgaggagagtccgcggtggcggcgacggtggcgagagccgcgggggccgtaggaagccaaccttccctgcttctccggggccctcgccccctcctccccacaaaatcagggatggaggcgcctccccggcaccctcttagcagccctccccaggaaaagtgtcccccctgagctcctaacgctccccaacagctacccctgccccccacgccatggggcccggggccccttttgcccgggtggggtggccactgccgcttctggttgtgatggcggcaggggtggctccggtgtgggcctcccactccccccatctcccgcggcctcactcgcgggtccccccgcacccctcctcagaacggcgcgcagtgtacatcggggcactgtttcccatgagcgggggctggccagggggccaggcctgccagcccgcggtggagatggcgctggaggacgtgaatagccgcagggacatcctgccggactatgagctcaagctcatccaccacgacagcaagtgtgatccaggccaagccaccaagtacctatatgagctgctctacaacgaccctatcaagatcatccttatgcctggctgcagctctgtctccacgctggtggctgaggctgctaggatgtggaacctcattgtgctttcctatggctccagctcaccagccctgtcaaaccggcagcgtttccccactttcttccgaacgcacccatcagccacactccacaaccctacccgcgtgaaactctttgaaaagtggggctggaagaagattgctaccatccagcagaccactgaggtcttcacttcgactctggacgacctggaggaacgagtgaaggaggctggaattgagattactttccgccagagtttcttctcagatccagctgtgcccgtcaaaaacctgaagcgccaggatgcccgaatcatcgtgggacttttctatgagactgaagcccggaaagttttttgtgaggtgtacaaggagcgtctctttgggaagaagtacgtctggttcctcattgggtggtatgctgacaattggttcaagatctacgacccttctatcaactgcacagtggatgagatgactgaggcggtggagggccacatcacaactgagattgtcatgctgaatcctgccaatacccgcagcatttccaacatgacatcccaggaatttgtggagaaactaaccaagcgactgaaaagacaccctgaggagacaggaggcttccaggaggcaccgctggcctatgatgccatctgggccttggcactggccctgaacaagacatctggaggaggcggccgttctggtgtgcgcctggaggacttcaactacaacaaccagaccattaccgaccaaatctaccgggcaatgaactcttcgtcctttgagggtgtctctggccatgtggtgtttgatgccagcggctctcggatggcatggacgcttatcgagcagcttcagggtggcagctacaagaagattggctactatgacagcaccaaggatgatctttcctggtccaaaacagataaatggattggagggtcccccccagctgaccagaccctggtcatcaagacattccgcttcctgtcacagaaactctttatctccgtctcagttctctccagcctgggcattgtcctagctgttgtctgtctgtcctttaacatctacaactcacatgtccgttatatccagaactcacagcccaacctgaacaacctgactgctgtgggctgctcactggctttagctgctgtcttccccctggggctcgatggttaccacattgggaggaaccagtttcctttcgtctgccaggcccgcctctggctcctgggcctgggctttagtctgggctacggttccatgttcaccaagatttggtgggtccacacggtcttcacaaagaaggaagaaaagaaggagtggaggaagactctggaaccctggaagctgtatgccacagtgggcctgctggtgggcatggatgtcctcactctcgccatctggcagatcgtggaccctctgcaccggaccattgagacatttgccaaggaggaacctaaggaagatattgacgtctctattctgccccagctggagcattgcagctccaggaagatgaatacatggcttggcattttctatggttacaaggggctgctgctgctgctgggaatcttccttgcttatgagaccaagagtgtgtccactgagaagatcaatgatcaccgggctgtgggcatggctatctacaatgtggcagtcctgtgcctcatcactgctcctgtcaccatgattctgtccagccagcaggatgcagcctttgcctttgcctctcttgccatagttttctcctcctatatcactcttgttgtgctctttgtgcccaagatgcgcaggctgatcacccgaggggaatggcagtcggaggcgcaggacaccatgaagacagggtcatcgaccaacaacaacgaggaggagaagtcccggctgttggagaaggagaaccgtgaactggaaaagatcattgctgagaaagaggagcgtgtctctgaactgcgccatcaactccagtctcggcagcagctccgctcccggcgccacccaccgacacccccagaaccctctgggggcctgcccaggggaccccctgagccccccgaccggcttagctgtgatgggagtcgagtgcatttgctttataagtgagggtagggtgagggaggacaggccagtagggggagggaaagggagaggggaagggcaggggactcaggaagcagggggtccccatccccagctgggaagaacatgctatccaatctcatctcttgtaaatacatgtccccctgtgagttctgggctgatttgggtctctcatacctctgggaaacagacctttttctctcttactgcttcatgtaattttgtatcacctcttcacaatttagttcgtacctggcttgaagctgctcactgctcacacgctgcctcctcagcagcctcactgcatctttctcttcccatgcaacaccctcttctagttaccacggcaacccctgcagctcctctgcctttgtgctctgttcctgtccagcaggggtctcccaacaagtgctctttccaccccaaaggggcctctccttttctccactgtcataatctctttccatcttacttgcccttctatactttctcacatgtggctccccctgaattttgcttcctttgggagctcattcttttcgccaaggctcacatgctccttgcctctgctctgtgcactcacgctcagcacacatgcatcctcccctctcctgcgtgtgcccactgaacatgctcatgtgtacacacgcttttcccgtatgctttcttcatgttcagtcacatgtgctctcgggtgccctgcattcacagctacgtgtgcccctctcatggtcatgggtctgcccttgagcgtgtttgggtaggcatgtgcaatttgtctagcatgctgagtcatgtctttcctatttgcacacgtccatgtttatccatgtactttccctgtgtaccctccatgtaccttgtgtactttcttcccttaaatcatggtattcttctgacagagccatatgtaccctaccctgcacattgttatgcacttttccccaattcatgtttggtggggccatccacaccctctccttgtcacagaatctccatttctgctcagattccccccatctccattgcattcatgtactaccctcagtctacactcacaatcatcttctcccaagactgctcccttttgttttgtgtttttttgaggggaattaaggaaaaataagtgggggcaggtttggagagctgcttccagtggatagttgatgagaatcctgaccaaaggaaggcacccttgactgttgggatagacagatggacctatggggtgggaggtggtgtccctttcacactgtggtgtctcttggggaaggatctccccgaatctcaataaaccagtgaacagtgtga

SEQ ID NO: 841 - DNA, 4299 bp, Homo sapiens
  source 1..4299: mol_type = genomic DNA
gcccgggagctctccctggtccccggcgccgcctccttccctcccggctccccgctccccgctcccgtggctgccgccgccccggggaagaagagacaggggtggggtttgggggaagcgagagaggaggggagagaccctggccaggctggagcctggattcgaggggaggagggacgggaggaggagaaaggtggaggagaagggaggggggagcggggaggagcggccgggcctggggccttgaggcccggggagagccggggagccgggcccgcgcgccgagatgttgctgctgctgctactggcgccactcttcctccgccccccgggcgcgggcggggcgcagacccccaacgccacctcagaaggttgccagatcatacacccgccctgggaagggggcatcaggtaccggggcctgactcgggaccaggtgaaggctatcaacttcctgccagtggactatgagattgagtatgtgtgccggggggagcgcgaggtggtggggcccaaggtccgcaagtgcctggccaacggctcctggacagatatggacacacccagccgctgtgtgaatcgaacgccacactcagaacggcgcgcagtgtacatcggggcactgtttcccatgagcgggggctggccagggggccaggcctgccagcccgcggtggagatggcgctggaggacgtgaatagccgcagggacatcctgccggactatgagctcaagctcatccaccacgacagcaagtgtgatccaggccaagccaccaagtacctatatgagctgctctacaacgaccctatcaagatcatccttatgcctggctgcagctctgtctccacgctggtggctgaggctgctaggatgtggaacctcattgtgctttcctatggctccagctcaccagccctgtcaaaccggcagcgtttccccactttcttccgaacgcacccatcagccacactccacaaccctacccgcgtgaaactctttgaaaagtggggctggaagaagattgctaccatccagcagaccactgaggtcttcacttcgactctggacgacctggaggaacgagtgaaggaggctggaattgagattactttccgccagagtttcttctcagatccagctgtgcccgtcaaaaacctgaagcgccaggatgcccgaatcatcgtgggacttttctatgagactgaagcccggaaagttttttgtgaggtgtacaaggagcgtctctttgggaagaagtacgtctggttcctcattgggtggtatgctgacaattggttcaagatctacgacccttctatcaactgcacagtggatgagatgactgaggcggtggagggccacatcacaactgagattgtcatgctgaatcctgccaatacccgcagcatttccaacatgacatcccaggaatttgtggagaaactaaccaagcgactgaaaagacaccctgaggagacaggaggcttccaggaggcaccgctggcctatgatgccatctgggccttggcactggccctgaacaagacatctggaggaggcggccgttctggtgtgcgcctggaggacttcaactacaacaaccagaccattaccgaccaaatctaccgggcaatgaactcttcgtcctttgagggtgtctctggccatgtggtgtttgatgccagcggctctcggatggcatggacgcttatcgagcagcttcagggtggcagctacaagaagattggctactatgacagcaccaaggatgatctttcctggtccaaaacagataaatggattggagggtcccccccagctgaccagaccctggtcatcaagacattccgcttcctgtcacagaaactctttatctccgtctcagttctctccagcctgggcattgtcctagctgttgtctgtctgtcctttaacatctacaactcacatgtccgttatatccagaactcacagcccaacctgaacaacctgactgctgtgggctgctcactggctttagctgctgtcttccccctggggctcgatggttaccacattgggaggaaccagtttcctttcgtctgccaggcccgcctctggctcctgggcctgggctttagtctgggctacggttccatgttcaccaagatttggtgggtccacacggtcttcacaaagaaggaagaaaagaaggagtggaggaagactctggaaccctggaagctgtatgccacagtgggcctgctggtgggcatggatgtcctcactctcgccatctggcagatcgtggaccctctgcaccggaccattgagacatttgccaaggaggaacctaaggaagatattgacgtctctattctgccccagctggagcattgcagctccaggaagatgaatacatggcttggcattttctatggttacaaggggctgctgctgctgctgggaatcttccttgcttatgagaccaagagtgtgtccactgagaagatcaatgatcaccgggctgtgggcatggctatctacaatgtggcagtcctgtgcctcatcactgctcctgtcaccatgattctgtccagccagcaggatgcagcctttgcctttgcctctcttgccatagttttctcctcctatatcactcttgttgtgctctttgtgcccaagatgcgcaggctgatcacccgaggggaatggcagtcggaggcgcaggacaccatgaagacagggtcatcgaccaacaacaacgaggaggagaagtcccggctgttggagaaggagaaccgtgaactggaaaagatcattgctgagaaagaggagcgtgtctctgaactgcgccatcaactccagtctcggcagcagctccgctcccggcgccacccaccgacacccccagaaccctctgggggcctgcccaggggaccccctgagccccccgaccggcttagctgtgatgggagtcgagtgcatttgctttataagtgagggtagggtgagggaggacaggccagtagggggagggaaagggagaggggaagggcaggggactcaggaagcagggggtccccatccccagctgggaagaacatgctatccaatctcatctcttgtaaatacatgtccccctgtgagttctgggctgatttgggtctctcatacctctgggaaacagacctttttctctcttactgcttcatgtaattttgtatcacctcttcacaatttagttcgtacctggcttgaagctgctcactgctcacacgctgcctcctcagcagcctcactgcatctttctcttcccatgcaacaccctcttctagttaccacggcaacccctgcagctcctctgcctttgtgctctgttcctgtccagcaggggtctcccaacaagtgctctttccaccccaaaggggcctctccttttctccactgtcataatctctttccatcttacttgcccttctatactttctcacatgtggctccccctgaattttgcttcctttgggagctcattcttttcgccaaggctcacatgctccttgcctctgctctgtgcactcacgctcagcacacatgcatcctcccctctcctgcgtgtgcccactgaacatgctcatgtgtacacacgcttttcccgtatgctttcttcatgttcagtcacatgtgctctcgggtgccctgcattcacagctacgtgtgcccctctcatggtcatgggtctgcccttgagcgtgtttgggtaggcatgtgcaatttgtctagcatgctgagtcatgtctttcctatttgcacacgtccatgtttatccatgtactttccctgtgtaccctccatgtaccttgtgtactttcttcccttaaatcatggtattcttctgacagagccatatgtaccctaccctgcacattgttatgcacttttccccaattcatgtttggtggggccatccacaccctctccttgtcacagaatctccatttctgctcagattccccccatctccattgcattcatgtactaccctcagtctacactcacaatcatcttctcccaagactgctcccttttgttttgtgtttttttgaggggaattaaggaaaaataagtgggggcaggtttggagagctgcttccagtggatagttgatgagaatcctgaccaaaggaaggcacccttgactgttgggatagacagatggacctatggggtgggaggtggtgtccctttcacactgtggtgtctcttggggaaggatctccccgaatctcaataaaccagtgaacagtgtgactcgg

SEQ ID NO: 842 - DNA, 4527 bp, Homo sapiens
  source 1..4527: mol_type = genomic DNA
ccctctcttccccccgccctgccttcccttgcaccctccttcttccctccgcccgggagctctccctggtccccggcgccgcctccttccctcccggctccccgctccccgctcccgtggctgccgccgccccggggaagaagagacaggggtggggtttgggggaagcgagagaggaggggagagaccctggccaggctggagcctggattcgaggggaggagggacgggaggaggagaaaggtggaggagaagggaggggggagcggggaggagcggccgggcctggggccttgaggcccggggagagccggggagccgggcccgcgcgccgagatgttgctgctgctgctactggcgccactcttcctccgccccccgggcgcgggcggggcgcagacccccaacgccacctcagaaggttgccagatcatacacccgccctgggaagggggcatcaggtaccggggcctgactcgggaccaggtgaaggctatcaacttcctgccagtggactatgagattgagtatgtgtgccggggggagcgcgaggtggtggggcccaaggtccgcaagtgcctggccaacggctcctggacagatatggacacacccagccgctgtgtccgaatctgctccaagtcttatttgaccctggaaaatgggaaggttttcctgacgggtggggacctcccagctctggacggagcccgggtggatttccggtgtgaccccgacttccatctggtgggcagctcccggagcatctgtagtcagggccagtggagcacccccaagccccactgccaggtgaatcgaacgccacactcagaacggcgcgcagtgtacatcggggcactgtttcccatgagcgggggctggccagggggccaggcctgccagcccgcggtggagatggcgctggaggacgtgaatagccgcagggacatcctgccggactatgagctcaagctcatccaccacgacagcaagtgtgatccaggccaagccaccaagtacctatatgagctgctctacaacgaccctatcaagatcatccttatgcctggctgcagctctgtctccacgctggtggctgaggctgctaggatgtggaacctcattgtgctttcctatggctccagctcaccagccctgtcaaaccggcagcgtttccccactttcttccgaacgcacccatcagccacactccacaaccctacccgcgtgaaactctttgaaaagtggggctggaagaagattgctaccatccagcagaccactgaggtcttcacttcgactctggacgacctggaggaacgagtgaaggaggctggaattgagattactttccgccagagtttcttctcagatccagctgtgcccgtcaaaaacctgaagcgccaggatgcccgaatcatcgtgggacttttctatgagactgaagcccggaaagttttttgtgaggtgtacaaggagcgtctctttgggaagaagtacgtctggttcctcattgggtggtatgctgacaattggttcaagatctacgacccttctatcaactgcacagtggatgagatgactgaggcggtggagggccacatcacaactgagattgtcatgctgaatcctgccaatacccgcagcatttccaacatgacatcccaggaatttgtggagaaactaaccaagcgactgaaaagacaccctgaggagacaggaggcttccaggaggcaccgctggcctatgatgccatctgggccttggcactggccctgaacaagacatctggaggaggcggccgttctggtgtgcgcctggaggacttcaactacaacaaccagaccattaccgaccaaatctaccgggcaatgaactcttcgtcctttgagggtgtctctggccatgtggtgtttgatgccagcggctctcggatggcatggacgcttatcgagcagcttcagggtggcagctacaagaagattggctactatgacagcaccaaggatgatctttcctggtccaaaacagataaatggattggagggtcccccccagctgaccagaccctggtcatcaagacattccgcttcctgtcacagaaactctttatctccgtctcagttctctccagcctgggcattgtcctagctgttgtctgtctgtcctttaacatctacaactcacatgtccgttatatccagaactcacagcccaacctgaacaacctgactgctgtgggctgctcactggctttagctgctgtcttccccctggggctcgatggttaccacattgggaggaaccagtttcctttcgtctgccaggcccgcctctggctcctgggcctgggctttagtctgggctacggttccatgttcaccaagatttggtgggtccacacggtcttcacaaagaaggaagaaaagaaggagtggaggaagactctggaaccctggaagctgtatgccacagtgggcctgctggtgggcatggatgtcctcactctcgccatctggcagatcgtggaccctctgcaccggaccattgagacatttgccaaggaggaacctaaggaagatattgacgtctctattctgccccagctggagcattgcagctccaggaagatgaatacatggcttggcattttctatggttacaaggggctgctgctgctgctgggaatcttccttgcttatgagaccaagagtgtgtccactgagaagatcaatgatcaccgggctgtgggcatggctatctacaatgtggcagtcctgtgcctcatcactgctcctgtcaccatgattctgtccagccagcaggatgcagcctttgcctttgcctctcttgccatagttttctcctcctatatcactcttgttgtgctctttgtgcccaagatgcgcaggctgatcacccgaggggaatggcagtcggaggcgcaggacaccatgaagacagggtcatcgaccaacaacaacgaggaggagaagtcccggctgttggagaaggagaaccgtgaactggaaaagatcattgctgagaaagaggagcgtgtctctgaactgcgccatcaactccagtctcggcagcagctccgctcccggcgccacccaccgacacccccagaaccctctgggggcctgcccaggggaccccctgagccccccgaccggcttagctgtgatgggagtcgagtgcatttgctttataagtgagggtagggtgagggaggacaggccagtagggggagggaaagggagaggggaagggcaggggactcaggaagcagggggtccccatccccagctgggaagaacatgctatccaatctcatctcttgtaaatacatgtccccctgtgagttctgggctgatttgggtctctcatacctctgggaaacagacctttttctctcttactgcttcatgtaattttgtatcacctcttcacaatttagttcgtacctggcttgaagctgctcactgctcacacgctgcctcctcagcagcctcactgcatctttctcttcccatgcaacaccctcttctagttaccacggcaacccctgcagctcctctgcctttgtgctctgttcctgtccagcaggggtctcccaacaagtgctctttccaccccaaaggggcctctccttttctccactgtcataatctctttccatcttacttgcccttctatactttctcacatgtggctccccctgaattttgcttcctttgggagctcattcttttcgccaaggctcacatgctccttgcctctgctctgtgcactcacgctcagcacacatgcatcctcccctctcctgcgtgtgcccactgaacatgctcatgtgtacacacgcttttcccgtatgctttcttcatgttcagtcacatgtgctctcgggtgccctgcattcacagctacgtgtgcccctctcatggtcatgggtctgcccttgagcgtgtttgggtaggcatgtgcaatttgtctagcatgctgagtcatgtctttcctatttgcacacgtccatgtttatccatgtactttccctgtgtaccctccatgtaccttgtgtactttcttcccttaaatcatggtattcttctgacagagccatatgtaccctaccctgcacattgttatgcacttttccccaattcatgtttggtggggccatccacaccctctccttgtcacagaatctccatttctgctcagattccccccatctccattgcattcatgtactaccctcagtctacactcacaatcatcttctcccaagactgctcccttttgttttgtgtttttttgaggggaattaaggaaaaataagtgggggcaggtttggagagctgcttccagtggatagttgatgagaatcctgaccaaaggaaggcacccttgactgttgggatagacagatggacctatggggtgggaggtggtgtccctttcacactgtggtgtctcttggggaaggatctccccgaatctcaataaaccagtgaacagtg

SEQ ID NO: 843 - DNA, 1312 bp, Homo sapiens
  source 1..1312: mol_type = genomic DNA
cagcgccccgcaccggggccgttagtcagcagaacgcgagctcttgtggaggagcagggccggcgcgaggcgagactcgggagcgtgagcggggcccctggggcgccgccgtccttcttcgccccggcgccgggggctgtagccctggtccccgctcctctgtcgggccagtctgcaggcggagagagtcggacggcgcccggagcgcggatctcgccttgtggaggacagcgcgtcggctgcggttctctctcgaccccttctgcccggcgcttcggcccgggccgctcaggtgcagagcatgaataatctttcatttagtgagctatgttgcctcttctgctgtccaccttgtccagggaagattgcttcaaaattagcgtttttgccacctgatccaacttacacactgatgtgtgatgaaagcggaagccgttggactttacatctgtctgaacgagcagactggcagtattcttctagagaaaaagatgctattgagtgtttcatgactagaaccagtaaaggcaacagaattgcttgtatgtttgtacgttgttcacccaatgcgaaatacactttactcttctcacatggaaatgctgttgatcttggtcaaatgagcagcttttacataggactaggatcacggattaattgtaatatattctcatatgattattctggatatggtgccagttccgggaaacccacagagaagaacctctatgcagacattgaagctgcttggcttgctcttaggacaagatatggcattcgccctgaaaatgtgattatatatggccaaagtatagggacagtaccgtctgtggatcttgctgctcgatatgagagtgctgctgttattcttcattctcctctgacttcgggaatgcgagttgcctttcctgataccaagaagacctactgttttgatgcattcccaaacattgacaaaatctctaagataacctctccagtattaataattcatgggactgaagatgaagtcattgacttttcacatggcctcgcattgtttgaacgttgccaaagacctgtggagcctctctgggttgaaggagcaggtcacaatgatgtggaactttatggacagtatcttgaaaggttgaaacagtttgtgtcacaggaactggtgcagaaacataaagaagggaagtgattttctcaaggtctacagttttcaatgacggtactatgtattccattatcttctctttaccaaacttaactggattaatataccaatgatcctttcaaattatatgacataaacttatttgctctccaa

SEQ ID NO: 844 - DNA, 1959 bp, Homo sapiens
  source 1..1959: mol_type = genomic DNA
agctccggccccgaccggaagccccaccgcaccgtcagggacgcggactcgggagtgcgcacattcgcagcccgggcagccctgctgcgcaccgggcctcgcgccccgcgccccgcgccccgcgccccgcgccccgcaccggcctccaggatcatgtggtatgtcagcaccaggggcgtagccccacgggtcaactttgagggggccctcttctctggctatgcacctgacgggggcctctttatgcctgaagagctcccacagttggacagagggaccctgtgccagtggagcacactctcctatcctggcctggtgaaggagctgtgtgccctcttcattggctctgagctccttccaaaagatgaattaaatgatctgatcgaccgagccttcagcagattccgtcacagagaagtggtccatctgtccaggttgaggaatgggctgaacgtgttggagctgtggcatggcgtcacatatgcatttaaggacctgtccctgtcctgcacaacacagttcctgcagtacttcctggagaagagggagaagcacgtcactgtggttgtaggaacatctggggacacaggaagtgctgccattgagagtgttcaaggggcaaagaacatggacattatcgttctgctgcccaaaggtcactgcacaaagattcaggagctccagatgacaacggtgctgaagcagaacgtacatgtgtttggagtggagggaaacagcgatgagctcgatgagccgatcaagactgtgtttgccgatgtggcttttgtcaagaagcacaatctgatgagcctgaattcgatcaactggtcccgggtcctggtgcagatggcccatcacttctttgcttacttccagtgtacgccatccttggacacacatcccctacccctggtggaggtggttgtgccaacaggggctgccggtaaccttgcagctgggtacattgctcaaaagataggcctgcccatccgtctggtcgtggcagtgaaccgcaatgacatcatccacaggactgtccagcagggagacttctctctctctgaggctgttaaatcaaccttggcatcagctatggacattcaggtgccctacaacatggagagggtgttctggctgctctctggctctgacagccaggtgacaagagccctcatggagcagtttgaaaggacccaaagtgtgaatctgcccaaggaactgcacagcaagcactccccggtgctgcctcgcccctgcctctgcagccaagttcccggaagctgtcctggctgctggcctgacccctgagactcccgcggagatcgtagccctggagcacaaggagacacgctgcaccctgatgcggagaggtgacaactggatgctgatgcttcgggacaccattgaggaccttagccgacagtggaggagtcatgccctcaacacctcccagtagcctggctggaggtggctttctttaggcttcagatcccaggaagatgcaccttctgagctgccttgtgcaccctccccattaagcgtaggttaggaggtttccgggaggctgctcagctggatctggagccagctggctttgctccgttccctggctagtctgtgcctggtcaccagggaggctgagtgaggggctgtgaacagttgccggaagcaccccctccctccccggcccgtgcagcagtgtctgagctgtagtgaaagtttcagggcctgcaaaagaagaggcttgggcacaggactgaccatggctccaggggtttaggaccccagacctgtgaaggtgggagcagctcaccaccttcacgcaggctttgtatgttctctgagccttagttgattttggcccccaaaccaaatccaaaggttctggcccaccttgtcagaggcttccaccctgctcacatgttgggaatccctggaataaaatgcttgttcagtgtg

SEQ ID NO: 845 - DNA, 5162 bp, Homo sapiens
  source 1..5162: mol_type = genomic DNA
gtctcctggaccccctttcgtgacccctctcaacacctctactggggagacgaggaccccgaggttctggggggcgacgcgacctgcccgaagtgacaagggtcctgggccgcactgctccgccggggtctgcgctcctcggcggagcgggtgggaaggatgagtcctcggggtggagaaggaggagcgggtccccgggtaccgctcacccggccttaggagcccgggagcgcgcgtagggacgcggagttgaggctctccatctgcggccagggaaagggatacagtcccccgggcccctcccggccgctcggaacccaccccaggcgcgtccccgcgggcgcgcgctccaggcggggccgacgggctcggaggcgcgcgcccgctgccgggtccgccgcgcgcgctccctccgctcctctcccccgcccctcccgggcccgcgcgctcccagggtccgccgcgcgcgcgcctcgcgtcgctccccatccccgcccctcccgccgccaccccgcccccggccgggtaccctcgccggacccgagagagagcgccgccgccatcttagttgctgccgctgccttcagcaagacgctgctctgaggcggggagggcgccgcgtcctgagcgcgcggcccagcgtcacggcggcggcggcggcggctcctccttggacccccggagctccccgcgccgcggagcagctagccccaggcccctagagccccgagagctccgagagctccgctcggcgtcccgcgcgcctccctgccgctcccgccccgggctggcgatgctgcgccgccccgctcccgcgctggccccggccgcccggctgctgctggccgggctgctgtgcggcggcggggtctgggccgcgcgagttaacaagcacaagccctggctggagcccacctaccacggcatagtcacagagaacgacaacaccgtgctcctcgaccccccactgatcgcgctggataaagatgcgcctctgcgatttgcagagagttttgaggtgacagtcaccaaagaaggtgagatttgtggatttaaaattcacgggcagaatgtcccctttgatgcagtggtagtggataaatccactggtgagggagtcattcgctccaaagagaaactggactgtgagctgcagaaagactattcattcaccatccaggcctatgattgtgggaagggacctgatggcaccaacgtgaaaaagtctcataaagcaactgttcatattcaggtgaacgacgtgaatgagtacgcgcccgtgttcaaggagaagtcctacaaagccacggtcatcgaggggaagcagtacgacagcattttgagggtggaggccgtggatgccgactgctcccctcagttcagccagatttgcagctacgaaatcatcactccagacgtgccctttactgttgacaaagatggttatataaaaaacacagagaaattaaactacgggaaagaacatcaatataagctgaccgtcactgcctatgactgtgggaagaaaagagccacagaagatgttttggtgaagatcagcattaagcccacctgcacccctgggtggcaaggatggaacaacaggattgagtatgagccgggcaccggcgcgttggccgtctttccaaatatccacctggagacatgtgacgagccagtcgcctcagtacaggccacagtggagctagaaaccagccacatagggaaaggctgcgaccgagacacctactcagagaagtccctccaccggctctgtggtgcggccgcgggcactgccgagctgctgccatccccgagtggatccctcaactggaccatgggcctgcccaccgacaatggccacgacagcgaccaggtgtttgagttcaacggcacccaggcagtgaggatcccggatggcgtcgtgtcggtcagccccaaagagccgttcaccatctcggtgtggatgagacatgggccattcggcaggaagaaggagacaattctttgcagttctgataaaacagatatgaatcggcaccactactccctctatgtccacgggtgccggctgatcttcctcttccgtcaggatccttctgaggagaagaaatacagacctgcagagttccactggaagttgaatcaggtctgtgatgaggaatggcaccactacgtcctcaatgtagaattcccgagtgtgactctctatgtggatggcacgtcccacgagcccttctctgtgactgaggattacccgctccatccatccaagatagaaactcagctcgtggtgggggcttgctggcaaggtggcgacctgcacatgacccagtttttccgaggcaatctggctggcttaactctccgttccgggaaactcgcggataagaaggtgatcgactgtctgtatacctgcaaggaggggctggacctgcaggtcctcgaagacagtggcagaggcgtgcagatccaagcacaccccagccagttggtattgaccttggagggagaagacctcggggaattggataaggccatgcagcacatctcgtacctgaactcccggcagttccccacgcccggaattcgcagactcaaaatcaccagcacaatcaagtgttttaacgaggccacctgcatttcggtccccccggtagatggctacgtgatggttttacagcccgaggagcccaagatcagcctgagtggcgtccaccattttgcccgagcagcttctgaatttgaaagctcagaaggggtgttccttttccctgagcttcgcatcatcagcaccatcacgagagaagtggagcctgaaggggacggggctgaggaccccacagttcaagaatcactggtgtccgaggagatcgtgcacgacctggatacctgtgaggtcacggtggagggagaggagctgaaccacgagcaggagagcctggaggtggacatggcccgcctgcagcagaagggcattgaagtgagcagctctgaactgggcatgaccttcacaggcgtggacaccatggccagctacgaggaggttttgcacctgctgcgctatcggaactggcatgccaggtccttgcttgaccggaagtttaagctcatctgctcagagctgaatggccgctacatcagcaacgaatttaaggtggaggtgaatgtaatccacacggccaaccccatggaacacgccaaccacatggctgcccagccacagttcgtgcacccggaacaccgctcctttgttgacctgtcaggccacaacctggccaacccccacccgttcgcagtcgtccccagcactgcgacagttgtgatcgtggtgtgcgtcagcttcctggtgttcatgattatcctgggggtatttcggatccgggccgcacatcggcggaccatgcgggatcaggacaccgggaaggagaacgagatggactgggacgactctgccctgaccatcaccgtcaaccccatggagacctatgaggaccagcacagcagtgaggaggaggaggaagaggaagaggaagaggaaagcgaggacggcgaagaagaggatgacatcaccagcgccgagtcggagagcagcgaggaggaggagggggagcagggcgacccccagaacgcaacccggcagcagcagctggagtgggatgactccaccctcagctactgacccgtgcccccggccacctcggtttctgctttcgaagactctgctgccatccgttctcccagtcccaagggtccacgatgtacaaagtcatttcggccagtaggtgtgcagacccctccccgccacgatcgtcgctgtgcttggtgtgtaggaccctaggctccccgcccaccctctgcctggtcgcgctcttcagtcccacgaggagctgacacgtcctctctggccgccatccggctcgcacaggggcctcccagcgcctcaggccccgcgtttgtgtctggagtctccccccggggagaggacactggcccctcgcactccagaaaagccatgccagctgggctcgttgacaaagggtaaaacatgctcactcccacccggtaatcatttttttctttttttaaaaaaagtttttattttttccaaactagtgcatgtataaataatggcaggatggggggtactgtgtagatgattaactgactttttaatattttgtaaataaatcggattccttgtgtcctttgtgctagtgtaacccgggactggaatgtaaagtgaagttcggagctctgagcacgggctcttcccgccgggtcctccctccccagaccccagagggagaggcccaccccgcccagccccgccccagcccctgctcaggtctgagtatggctgggagtcgggggccacaggcctctagctgtgctgctcaagagactggatcagggtagctacaagtggccgggccttgcctttgggattctacctgttcctaatttggtgtggggtgcggggtccctggccccttttccacactcctcctccgacagcagctccctgggcagtggcctggtctcaccgtgtgcagccttgtggtttatgcttaaatgtacattttcctgctggtaaaaggagaaactgagaggtgtcctgcagaccggctgaccactccttttggagacggcaggaggcctgagcgatccgtactcagaacgtccaggagagacgcatggcccgaagtcaaagtgctggaattttccaaaacagcctgttctctcctctctcctccccagagcaccccctgccatcaggggggttgaaatccctctcccccaggagccctgctgctttgcttggtggtagggcaggagagcaaacaaacagtcatggtctaaaacccacatagcactttgctcttagttacatgtaaaattttagatttctaaaacaggtgggcaatcattttgaatactgttctgtgaccctgactgctagttctgaggacactggtggctgtgctatgtgtggccatcctccatgtcccgtccctgtagctgctctgtttagacagcggacagacgctcacgcccaggggatgtcctcacgctgtcgccgcgcggtttcccttcgcagatgtgtatactcatgataggtcagaaagtgtatccgctacaataaagttctggttctaact

SEQ ID NO: 846 - DNA, 5221 bp, Homo sapiens
  source 1..5221: mol_type = genomic DNA
gtctcctggaccccctttcgtgacccctctcaacacctctactggggagacgaggaccccgaggttctggggggcgacgcgacctgcccgaagtgacaagggtcctgggccgcactgctccgccggggtctgcgctcctcggcggagcgggtgggaaggatgagtcctcggggtggagaaggaggagcgggtccccgggtaccgctcacccggccttaggagcccgggagcgcgcgtagggacgcggagttgaggctctccatctgcggccagggaaagggatacagtcccccgggcccctcccggccgctcggaacccaccccaggcgcgtccccgcgggcgcgcgctccaggcggggccgacgggctcggaggcgcgcgcccgctgccgggtccgccgcgcgcgctccctccgctcctctcccccgcccctcccgggcccgcgcgctcccagggtccgccgcgcgcgcgcctcgcgtcgctccccatccccgcccctcccgccgccaccccgcccccggccgggtaccctcgccggacccgagagagagcgccgccgccatcttagttgctgccgctgccttcagcaagacgctgctctgaggcggggagggcgccgcgtcctgagcgcgcggcccagcgtcacggcggcggcggcggcggctcctccttggacccccggagctccccgcgccgcggagcagctagccccaggcccctagagccccgagagctccgagagctccgctcggcgtcccgcgcgcctccctgccgctcccgccccgggctggcgatgctgcgccgccccgctcccgcgctggccccggccgcccggctgctgctggccgggctgctgtgcggcggcggggtctgggccgcgcgagttaacaagcacaagccctggctggagcccacctaccacggcatagtcacagagaacgacaacaccgtgctcctcgaccccccactgatcgcgctggataaagatgcgcctctgcgatttgcagagagttttgaggtgacagtcaccaaagaaggtgagatttgtggatttaaaattcacgggcagaatgtcccctttgatgcagtggtagtggataaatccactggtgagggagtcattcgctccaaagagaaactggactgtgagctgcagaaagactattcattcaccatccaggcctatgattgtgggaagggacctgatggcaccaacgtgaaaaagtctcataaagcaactgttcatattcaggtgaacgacgtgaatgagtacgcgcccgtgttcaaggagaagtcctacaaagccacggtcatcgaggggaagcagtacgacagcattttgagggtggaggccgtggatgccgactgctcccctcagttcagccagatttgcagctacgaaatcatcactccagacgtgccctttactgttgacaaagatggttatataaaaaacacagagaaattaaactacgggaaagaacatcaatataagctgaccgtcactgcctatgactgtgggaagaaaagagccacagaagatgttttggtgaagatcagcattaagcccacctgcacccctgggtggcaaggatggaacaacaggattgagtatgagccgggcaccggcgcgttggccgtctttccaaatatccacctggagacatgtgacgagccagtcgcctcagtacaggccacagtggagctagaaaccagccacatagggaaaggctgcgaccgagacacctactcagagaagtccctccaccggctctgtggtgcggccgcgggcactgccgagctgctgccatccccgagtggatccctcaactggaccatgggcctgcccaccgacaatggccacgacagcgaccaggtgtttgagttcaacggcacccaggcagtgaggatcccggatggcgtcgtgtcggtcagccccaaagagccgttcaccatctcggtgtggatgagacatgggccattcggcaggaagaaggagacaattctttgcagttctgataaaacagatatgaatcggcaccactactccctctatgtccacgggtgccggctgatcttcctcttccgtcaggatccttctgaggagaagaaatacagacctgcagagttccactggaagttgaatcaggtctgtgatgaggaatggcaccactacgtcctcaatgtagaattcccgagtgtgactctctatgtggatggcacgtcccacgagcccttctctgtgactgaggattacccgctccatccatccaagatagaaactcagctcgtggtgggggcttgctggcaagagttttcaggagttgaaaatgacaatgaaactgagcctgtgactgtggcctctgcaggtggcgacctgcacatgacccagtttttccgaggcaatctggctggcttaactctccgttccgggaaactcgcggataagaaggtgatcgactgtctgtatacctgcaaggaggggctggacctgcaggtcctcgaagacagtggcagaggcgtgcagatccaagcacaccccagccagttggtattgaccttggagggagaagacctcggggaattggataaggccatgcagcacatctcgtacctgaactcccggcagttccccacgcccggaattcgcagactcaaaatcaccagcacaatcaagtgttttaacgaggccacctgcatttcggtccccccggtagatggctacgtgatggttttacagcccgaggagcccaagatcagcctgagtggcgtccaccattttgcccgagcagcttctgaatttgaaagctcagaaggggtgttccttttccctgagcttcgcatcatcagcaccatcacgagagaagtggagcctgaaggggacggggctgaggaccccacagttcaagaatcactggtgtccgaggagatcgtgcacgacctggatacctgtgaggtcacggtggagggagaggagctgaaccacgagcaggagagcctggaggtggacatggcccgcctgcagcagaagggcattgaagtgagcagctctgaactgggcatgaccttcacaggcgtggacaccatggccagctacgaggaggttttgcacctgctgcgctatcggaactggcatgccaggtccttgcttgaccggaagtttaagctcatctgctcagagctgaatggccgctacatcagcaacgaatttaaggtggaggtgaatgtaatccacacggccaaccccatggaacacgccaaccacatggctgcccagccacagttcgtgcacccggaacaccgctcctttgttgacctgtcaggccacaacctggccaacccccacccgttcgcagtcgtccccagcactgcgacagttgtgatcgtggtgtgcgtcagcttcctggtgttcatgattatcctgggggtatttcggatccgggccgcacatcggcggaccatgcgggatcaggacaccgggaaggagaacgagatggactgggacgactctgccctgaccatcaccgtcaaccccatggagacctatgaggaccagcacagcagtgaggaggaggaggaagaggaagaggaagaggaaagcgaggacggcgaagaagaggatgacatcaccagcgccgagtcggagagcagcgaggaggaggagggggagcagggcgacccccagaacgcaacccggcagcagcagctggagtgggatgactccaccctcagctactgacccgtgcccccggccacctcggtttctgctttcgaagactctgctgccatccgttctcccagtcccaagggtccacgatgtacaaagtcatttcggccagtaggtgtgcagacccctccccgccacgatcgtcgctgtgcttggtgtgtaggaccctaggctccccgcccaccctctgcctggtcgcgctcttcagtcccacgaggagctgacacgtcctctctggccgccatccggctcgcacaggggcctcccagcgcctcaggccccgcgtttgtgtctggagtctccccccggggagaggacactggcccctcgcactccagaaaagccatgccagctgggctcgttgacaaagggtaaaacatgctcactcccacccggtaatcatttttttctttttttaaaaaaagtttttattttttccaaactagtgcatgtataaataatggcaggatggggggtactgtgtagatgattaactgactttttaatattttgtaaataaatcggattccttgtgtcctttgtgctagtgtaacccgggactggaatgtaaagtgaagttcggagctctgagcacgggctcttcccgccgggtcctccctccccagaccccagagggagaggcccaccccgcccagccccgccccagcccctgctcaggtctgagtatggctgggagtcgggggccacaggcctctagctgtgctgctcaagagactggatcagggtagctacaagtggccgggccttgcctttgggattctacctgttcctaatttggtgtggggtgcggggtccctggccccttttccacactcctcctccgacagcagctccctgggcagtggcctggtctcaccgtgtgcagccttgtggtttatgcttaaatgtacattttcctgctggtaaaaggagaaactgagaggtgtcctgcagaccggctgaccactccttttggagacggcaggaggcctgagcgatccgtactcagaacgtccaggagagacgcatggcccgaagtcaaagtgctggaattttccaaaacagcctgttctctcctctctcctccccagagcaccccctgccatcaggggggttgaaatccctctcccccaggagccctgctgctttgcttggtggtagggcaggagagcaaacaaacagtcatggtctaaaacccacatagcactttgctcttagttacatgtaaaattttagatttctaaaacaggtgggcaatcattttgaatactgttctgtgaccctgactgctagttctgaggacactggtggctgtgctatgtgtggccatcctccatgtcccgtccctgtagctgctctgtttagacagcggacagacgctcacgcccaggggatgtcctcacgctgtcgccgcgcggtttcccttcgcagatgtgtatactcatgataggtcagaaagtgtatccgctacaataaagttctggttctaactaa

SEQ ID NO: 847 - DNA, 1197 bp, Homo sapiens
  source 1..1197: mol_type = genomic DNA
aagaaagacagtcagcaaagcctgggagagctccagctcctccctccctgctctgctcaacttcactctcctcctcggttcccttggagtaccttgtgccccggcagtgctgtcccggccctggcatcctgaggtcctcccgtggtgaggacttaagtggacagcaggagtgggtggagagagggagggagagtttgccctgcaggctctctggatgcagaagccagactcgctgcagaggcagctgtgctgttcccggagcctggcttcaggggtgcatccgtcactcagggttcattcacccaggcaggctccaagttcctggggtgcacaaggtgggcactgtcccttctgggtgctgacagcagagcctggctcccctccgccaccatgagcggctgctccaaaagatgcaagcttgggttcgtgaaatttgcccagaccatctttaagctcatcactgggaccctcagcaaagataagattgaagatgagctggagatgaccatggtttgccatcggcccgagggactggagcagctcgaggcccagaccaacttcaccaagagggagctgcaggtcctttatcgaggcttcaaaaatgagtgccccagtggtgtggtcaacgaagacacattcaagcagatctatgctcagtttttccctcatggagatgccagcacgtatgcccattacctcttcaatgccttcgacaccactcagacaggctccgtgaagttcgaggactttgtaaccgctctgtcgattttattgagaggaactgtccacgagaaactaaggtggacatttaatttgtatgacatcaacaaggacggatacataaacaaagaggagatgatggacattgtcaaagccatctatgacatgatggggaaatacacatatcctgtgctcaaagaggacactccaaggcagcatgtggacgtcttcttccagaaaatggacaaaaataaagatggcatcgtaactttagatgaatttcttgaatcatgtcaggaggacgacaacatcatgaggtctctccagctgtttcaaaatgtcatgtaactggtgacactcagccattcagctctcagagacattgtactaaacaaccaccttaacaccctgatctgcccttgttctgattttacacaccaactcttgggacagaaacaccttttacactttggaaga

SEQ ID NO: 848 - DNA, 1601 bp, Homo sapiens
  source 1..1601: mol_type = genomic DNA
tccacagattgtcattcttcagggatggcagccctaaacacagcatggcaactcatctactcactcatgaaagattaaaaaatggaaaccaacgtatttcatcttatgctctgcgtcacttctgctcggactcataaatccacgtctctttgctttggccacttcaactcatatccaagccttcctttaattcatgatttattgctgatgatgtcaggtcataggatgatatatataatcagtgagcaggcagaatgaggagacagttgaaagttctctacaacagaagccaagaaggaagccgtctatcttgtggcgatcatgtataagctggcctcctgctgtttgcttttcataggattcttaaatcctctcttatctcttcctctccttgactccagggaaatatcctttcaactctcagcacctcatgaagacgcgcgcttaactccggaggagctagaaagagcttcccttctacagatactgccagagatgctgggtgcagaaagaggggatattctcaggaaagcagactcaagtaccaacatttttaacccaagaggaaatttgagaaagtttcaggatttctctggacaagatcctaacattttactgagtcatcttttggccagaatctggaaaccatacaagaaacagagaagaaagctgaggcaagatttaagattgtggaagaaagagcctggcttacgaatttttaaaaactatgtgtgggtgtgaatttcatctatcattccaagtttaagaaggaatcagggacttctctaaaaagcaccagagagtgagctgatttatcaagtaaacaatcacactcacttcttaaaagacacaactacaaacgccatagaaagcggtgactgatggagcctgcaggaccctgtgggcgaggacaactgggctcgcctggacgttttctcttttgcagtccccacaacactgccctgttcaagggcaaacaaaaggcagtgccagtcagacctgtggtagggctggagcgacctcttttgtataaattgattggaaagaaagagttaactgttttggtaagaatgaaaatttaaacacagaagtatgtaagaatgatactagcttttacattacttgtaaaacattttacaatcattattttaaaaacaaaaatactcaaaagggcaacagcactgggtaagaagctctttcattttaatattacacatgcaaatgctaactgaaacttacaagaataggcccatggtaagcggatcgatttttaagataagactttcagaatttcactggaaggtgggaaatcaataggaaagggatctacaaggatgaaggccaaaactcaacccccaaaacctggttatcccagatatgctaatggacagtatgtgctaatgtgttgtgagaaaaccggaatgtttcatcttaattatggaggggaacgccaggttgaatgaagcctgtatgaacgtactacattcatggaaaccattatgaaaagtacacaacctgtaggtggcatttcttcaagcactctaaggggaaaatgacttatgtaacagaacaaaataaatgaggctaaggtttggggctca

SEQ ID NO: 849 - DNA, 3158 bp, Homo sapiens
  source 1..3158: mol_type = genomic DNA
ataacgggaggagagcgccaggcggagctggggcgtccctcccgctcgcttcttgactcgcgttgctgccggccgcctcccgcgcctagtgtccgggacgcgcctgaacctgccgcctccgtgcctggggtggcgccgcgcggccccgagcgctccagaaagctgcggcgcgagtccgcggggccgacctcggagacgcagctggggccgggcgcggcttggcgggagggtctgcagcgccgagggaggctgctggtgcgtgaggaagagagctagagactggacaggggaggcagagcagcgtcagagccgcgcaggggacgggagtgagagcaggagcgacgcagagcggccgtctcaaggtgctgctgcttctccccactcagacttggagccccgtgggagcaggaaatccacctgactgtgatgccccactggcctctgccttgcctaggtcatccttcagcagctcctcagagctgtccagcagccacggcccggggttttcaaggcttaatcgaagagatggagctggtggctggactccacttgtgtcaaataaataccaatggctgcaaattgaccttggagagagaatggaggtcactgctgtcgccacccaaggaggatatgggagctctgactgggtgaccagctacctcctgatgttcagtgatggtgggagaaactggaagcagtatcgccgagaagaaagcatctggggttttccaggaaacacaaacgcagacagtgtggtgcactacagactccagcctccctttgaagccaggttcctgcgctttctccctttagcctggaaccctaggggcaggattgggatgcggatcgaagtgtacggatgtgcatataaatctgaggtggtttattttgatggacaaagtgctctgctgtatagacttgataaaaaacctttaaaaccaataagagacgttatttctttgaaatttaaagccatgcagagcaatggaattctacttcacagagaaggacaacatggaaatcacattactctggaattaattaaaggaaagcttgtcttttttcttaattcaggcaatgctaagctgccttccactattgctcctgtgaccctcaccctgggcagcctgctggacgaccagcactggcattccgtcctcatcgagctcctcgacacgcaggtcaacttcaccgtggacaaacacactcatcatttccaagcaaagggagattccagttacttggatcttaattttgagatcagctttgggggaattccgacacccggaagatcgcgggcattcagacgtaaaagctttcatgggtgtttagaaaatctttattataatggagtggatgttaccgaattagccaagaaacacaaaccacagatcctcatgatggagttggctcatgggttgcaggaccaaaacctgaaaatatctctgactgtgtgtcaccagaccacacaatgaatacatcacttaggttagcatgagaaaaagggaaaaacagctgtgaagcccatgaactttccaagaaggtaaaggagaaaaaaaaaaaaaaagatgggtttgaagtctaagttttactatgaacagcaccctgctgagatcataaaaatgaaaaataccatcaagatacatgaaaaaggaaacaccaaagggaagagtgataacaaggctccacagagtgcagtttcctttgacaagatgaaaaagaaatgaaaagaggaaggagataaatggaacagccctctacctaaagtttctgtccatggagaaactgacatttaagtgctgctcaacaggaaaaagaaaaaagacctggttattgaagttggctttgttggagatgcgttactcagatacagatacaaagatgggtttggccaatgggcatccgtgtcaagaagcctgacctaacacgttctgaatattaagctaccttttatctgccagtccttggtgttcagaagaatccctcctcctcaccctaacttctatggggctatttacaaagacactgtcattgaagtgaggaagagtgagttgggccttatgacacaaagagacaagactatttgaggacaacagacacaggttttcatatacattccatgttattctgaattactgatgggttcactgatggaattattgagtatagccaataaggagaaccacaattaagctggtatctctgggttctggatatcatcctcaagaaaactatttactaattacattgaatgaggttattaaaatgtgtaagtttcacacaaaaacaaaaagacaattcattccaaattgtgcatatggatatataatgttaattatgggaattccattttaagaattactacaattctatgtgttctgtataaaaacaggaaaatagttgttccaatatataaaaggaaaacatttaaaaatgtattttgttgggaaaatcagttgccagaattcattcagtcaactaacaagcactcctctgtggcaagaagccctgcctctctgttgtagcaggcagctacccacctaaatgatgaggtcaagaaatatacagctgataaaaagataaaaaatatgtaatagtccagtgattacatgtgtactatggatcagtgccaattacttgtaagcttttggtatttagtttgttacagcaaatgttttcttttttaaattttcttctgcaaatgttttcttgtcatgaaaactgtttcccatttggcagaattacaaaaacagtcaagaagaaatgttctgattgatgtatacagttagaatgtgtattaaagattattataaaatgataactgaattatatccatttctaaagtatgttgggacagaattttttaaaaatgtgattctgttttgaaaattgttttaccactggatcagtgtggttcttaaacttggctttatcttggagtcaccagaggagattcaaaagataccattacctggctctacctccagagatcgggattttaattggtctgtatctggattttaagagcccttctggtgattcgactgtttagctaggtttgagagccactaccctagattatctgtcctgctccagtaacattctttttctaaaatcatttatagtatattagaaataaatccatggaaattccaagt

SEQ ID NO: 850 - DNA, 1667 bp, Homo sapiens
  source 1..1667: mol_type = genomic DNA
gcaacgcgctgtccatgtcgcgggcctcgctgggactccctgggagatgaggccgcgaggtctcccgccgctcctggtggtgctcctgggctgctgggcctccgtgagcgcccagaccgatgccaccccggcggtgacgacagagggcctcaactccaccgaggcagccctggccaccttcggaactttcccgtcgaccaggccccccgggactcccagggctccagggccctcctccggccccaggcctaccccagtcacggacgttgctgttctctgtgtctgtgacttatccccagcacagtgtgacatcaactgctgctgtgatcccgactgcagctccgtggatttcagtgtcttttctgcctgctcagttccagttgtcacgggcgacagccagttttgtagtcaaaaagcagtcatctattcattgaattttacagcaaacccacctcaaagagtatttgaacttgttgaccagattaatccatctattttctgcattcatattacaaactataaacctgcattatcctttattaatccagaagtacctgatgaaaacaattttgatacattgatgaaaacatctgatggttttacattgaatgctgaatcatatgtttccttcacaaccaaactggatattcctactgctgctaaatatgagtatggggttcctctgcagacttcagattcgtttctgagatttccttcgtccctgacatcatctctgtgcactgataataaccctgcagcgtttctggtgaaccaggctgttaagtgcaccagaaaaataaatttagaacagtgtgaagaaattgaagccctcagcatggctttttacagcagcccggaaattctgagggtacctgattcaagaaaaaaggtccctatcactgttcagtccatcgtcattcagtctctaaataaaacgctcacccgacgggaggacactgatgtgctgcagccgactctcgtcaacgctggacactttagcctttgcgtgaatgttgttcttgaggtaaagtacagcctcacatacacagatgcaggtgaagtcaccaaagctgatctctcattcgttctggggacagttagcagcgtagtggtcccactgcagcaaaagtttgaaattcattttcttcagactgactggagctctcccgtgtcagctcgtagcacagaaggtgaagagcctgctgtggggccagggcttcccagattacgtggccccttttggaaattcccaggcccaggacatgctggactgggtgcccatccacttcatcacccagtcattcaacaggaaggattcctgccagctcccaggggctttggttatagaagtgaagtggactaaatacggatccctgctgaatccacaggccaaaatagtcaatgtaactgcaaatctaatttcatcctcctttcctgaggccaactcaggaaatgaaaggacgattcttatttccactgcggttacttttgtggatgtgtctgcacctgcagaggcaggcttcagagctccaccagccatcaatgccaggctgccctttaacttcttcttcccgtttgtttgacaatgctcagatgcatcagttccttaatatacacgtgaaatttgaaaactgtacattcggtgagattaaattttatatacaact

SEQ ID NO: 851 - DNA, 3921 bp, Homo sapiens
  source 1..3921: mol_type = genomic DNA
gctggtgcgtgaggaagagagctagagactggacaggggaggcagagcagcgtcagagccgcgcaggggacgggagtgagagcaggagcgacgcagagcggccgtcgccgtgcccgggtctcagggcgcctggctgaagtgagcatggcttcagtggcctgggccgtcctcaaggtgctgctgcttctccccactcagacttggagccccgtgggagcaggaaatccacctgactgtgatgccccactggcctctgccttgcctaggtcatccttcagcagctcctcagagctgtccagcagccacggcccggggttttcaaggcttaatcgaagagatggagctggtggctggactccacttgtgtcaaataaataccaatggctgcaaattgaccttggagagagaatggaggtcactgctgtcgccacccaaggaggatatgggagctctgactgggtgaccagctacctcctgatgttcagtgatggtgggagaaactggaagcagtatcgccgagaagaaagcatctggggttttccaggaaacacaaacgcagacagtgtggtgcactacagactccagcctccctttgaagccaggttcctgcgctttctccctttagcctggaaccctaggggcaggattgggatgcggatcgaagtgtacggatgtgcatataaatctgaggtggtttattttgatggacaaagtgctctgctgtatagacttgataaaaaacctttaaaaccaataagagacgttatttctttgaaatttaaagccatgcagagcaatggaattctacttcacagagaaggacaacatggaaatcacattactctggaattaattaaaggaaagcttgtcttttttcttaattcaggcaatgctaagctgccttccactattgctcctgtgaccctcaccctgggcagcctgctggacgaccagcactggcattccgtcctcatcgagctcctcgacacgcaggtcaacttcaccgtggacaaacacactcatcatttccaagcaaagggagattccagttacttggatcttaattttgagatcagctttgggggaattccgacacccggaagatcgcgggcattcagacgtaaaagctttcatgggtgtttagaaaatctttattataatggagtggatgttaccgaattagccaagaaacacaaaccacagatcctcatgatgggaaatgtgtccttctcatgtccacagccacagactgtccctgtgacttttctgagctccaggagttatctggctctgccaggcaactctggggaggacaaagtgtctgtcacttttcaatttcgaacgtggaacagagcaggacatttgcttttcggcgaacttcgacgtggttcagggagtttcgtcctctttcttaaggatggcaagctcaaactgagtctcttccagccgggacagtcaccaaggaatgtcacagcaggtgctggattaaacgatgggcagtggcactctgtgtccttctctgccaagtggagccatatgaatgtggtggtggacgatgacacagctgttcagcccctggtggctgtgctcattgattcaggtgacacctattattttggaggctgcctggacaacagctctggctctggatgtaaaagccccctgggagggtttcagggctgcctaaggctcatcaccattggtgacaaagcggtggatcccatcttagtacagcagggggcgctggggagtttcagggacctccagatagactcctgcggcatcacagacaggtgcttgcccagctactgtgagcatgggggcgagtgttcccagtcgtgggacaccttctcctgtgactgtctaggcacaggctatacgggcgagacctgccattcctctctctacgagcagtcttgtgaagcccacaagcaccgagggaacccgtctgggctttactatattgatgcagatggaagtggccccctgggaccatttcttgtgtactgcaatatgacagacgccgcgtggacggtggtgcagcacggtggccccgacgcggtgaccctccgaggtgcccccagcgggcacccgcgctcggctgtgtccttcgcgtacgcagcgggcgcggggcagctgcggtccgcggtgaacctggcggagcgctgcgagcagcggctggctctgcgctgcgggacggcgcggcgcccggactcacgagatggaaccccactgagctggtgggttggaagaaccaatgaaacacacacttcctggggaggttctctgcctgatgctcaaaagtgtacttgtggattagaggggaactgcattgattctcagtattactgcaactgtgatgctggccggaatgaatggactagtgacacaatagtcctttcccaaaaggagcacctgccagtcactcagattgtgatgacagacgcaggccgaccacattccgaagcagcttatacactggggccactgctctgccgcggagatcagtcattctggaattcagcttccttcaacactgagacttcataccttcatttccctgctttccacggagaactcactgctgacgtgtgcttcttttttaagaccacagtttcctccggggtgtttatggagaacctggggatcacagatttcatcaggattgagctgcgtgctcccacagaagtgaccttttccttcgatgtggggaatggaccttgtgaggtcacggtgcagtcacccactccctttaatgacaatcagtggcaccacgtgagggcagagagaaatgttaaaggagcgtctcttcaagttgatcagcttcctcagaagatgcagcctgcccctgctgatgggcacgttcgtttacagctcaacagccagctcttcattgagatttccgcatattttgcaactggctcctcaatgacataccattttcaagaacattacactttaagtgaaaactccagctctctcgtttcttcattacacagagatgtaacattgaccagagaaatgatcacactgagcttccgaaccacacgaactccgagcttattgctgtatgtgagctctttctatgaggaatacctttcagttatcctcgccaacaatggaagtttgcagattaggtacaagctagatagacatcaaaatcctgatgcatttacctttgattttaaaaacatggctgatgggcaacttcaccaagtgaagattaacagagaagaagctgtggtcatggtagaggttaaccagagcacaaagaaacaagtcatcttgtcctcagggacagaattcaacgccgtcaaatctctcatattgggaaaggttttagaggctgccggcgcggacccggacacaaggcgggcggcgactagtggcttcactggctgcctctcggcggtgcgcttcggccgcgctgctcccctgaaggcggcgctgcgccccagcggcccctcccgggtcaccgtccgcggccacgtggcccctatggcccgctgcgcagcgggggcggcgtccggctccccggcgcgggaactggctccccgactcgcggggggcgcaggtcgttctggaccagcggatgagggagagcccttggttaatgcagacagaagagactctgctgtcatcggaggtgtgatagcagtggtgatatttattttgctttgcatcactgccatagccatacgcatctatcaacagagaaagttacgcaaagaaaatgagtcaaaagtctcaaaaaaagaagagtgctaggacagctctaaacagtgagctcgatgtgcaaaacgcagtccatgaaaaccagaaagagcgagtcttctgattggcagctgtggctgtctctatcatcgtgactgtggacttccctgctgttgccatcagggtgcacacaagcaggtgcagtgc

SEQ ID NO: 852 - DNA, 2649 bp, Homo sapiens
  source 1..2649: mol_type = genomic DNA
agaaagctgcggcgcgagtccgcggggccgacctcggagacgcagctggggccgggcgcggcttggcgggagggtctgcagcgccgagggaggctgctggtgcgtgaggaagagagctagagactggacaggggaggcagagcagcgtcagagccgcgcaggggacgggagtgagagcaggagcgacgcagagcggccgtcgccgtgcccgggtctcagggcgcctggctgaagtgagcatggcttcagtggcctgggccgtcctcaaggtgctgctgcttctccccactcagacttggagccccgtgggagcaggaaatccacctgactgtgatgccccactggcctctgccttgcctaggtcatccttcagcagctcctcagagctgtccagcagccacggcccggggttttcaaggcttaatcgaagagatggagctggtggctggactccacttgtgtcaaataaataccaatggctgcaaattgaccttggagagagaatggaggtcactgctgtcgccacccaaggaggatatgggagctctgactgggtgaccagctacctcctgatgttcagtgatggtgggagaaactggaagcagtatcgccgagaagaaagcatctggggttttccaggaaacacaaacgcagacagtgtggtgcactacagactccagcctccctttgaagccaggttcctgcgctttctccctttagcctggaaccctaggggcaggattgggatgcggatcgaagtgtacggatgtgcatataaatctgaggtggtttattttgatggacaaagtgctctgctgtatagacttgataaaaaacctttaaaaccaataagagacgttatttctttgaaatttaaagccatgcagagcaatggaattctacttcacagagaaggacaacatggaaatcacattactctggaattaattaaaggaaagcttgtcttttttcttaattcaggcaatgctaagctgccttccactattgctcctgtgaccctcaccctgggcagcctgctggacgaccagcactggcattccgtcctcatcgagctcctcgacacgcaggtcaacttcaccgtggacaaacacactcatcatttccaagcaaagggagattccagttacttggatcttaattttgagatcagctttgggggaattccgacacccggaagatcgcgggcattcagacgtaaaagctttcatgggtgtttagaaaatctttattataatggagtggatgttaccgaattagccaagaaacacaaaccacagatcctcatgatgggaaatgtgtccttctcatgtccacagccacagactgtccctgtgacttttctgagctccaggagttatctggctctgccaggcaactctggggaggacaaagtgtctgtcacttttcaatttcgaacgtggaacagagcaggacatttgcttttcggcgaacttcgacgtggttcagggagtttcgtcctctttcttaaggatggcaagctcaaactgagtctcttccagccgggacagtcaccaaggaatgtcacagcaggtgctggattaaacgatgggcagtggcactctgtgtccttctctgccaagtggagccatatgaatgtggtggtggacgatgacacagctgttcagcccctggtggctgtgctcattgattcaggtgacacctattattttggaggctgcctggacaacagctctggctctggatgtaaaagccccctgggagggtttcagggctgcctaaggctcatcaccattggtgacaaagcggtggatcccatcttagtacagcagggggcgctggggagtttcagggacctccagatagactcctgcggcatcacagacaggtgcttgcccagctactgtgagcatgggggcgagtgttcccagtcgtgggacaccttctcctgtgactgtctaggcacaggctatacgggcgagacctgccattcctctctctacgagcagtcttgtgaagcccacaagcaccgagggaacccgtctgggctttactatattgatgcagatggaagtggccccctgggaccatttcttgtgtactgcaatatgacagacgccgcgtggacggtggtgcagcacggtggccccgacgcggtgaccctccgaggtgcccccagcgggcacccgcgctcggctgtgtccttcgcgtacgcagcgggcgcggggcagctgcggtccgcggtgaacctggcggagcgctgcgagcagcggctggctctgcgctgcgggacggcgcggcgcccggactcacgagatggaaccccactgagctggtgggttggaagaaccaatgaaacacacacttcctggggaggttctctgcctgatgctcaaaagtgtacttgtggattagaggggaactgcattgattctcagtattactgcaactgtgatgctggccggaatgaatggtgatttccacatgatttccctgcacaaaaatgtggtttttattctttaattatgcatagttaattaaatgtcagacaagctggtacaataaggtaactaaagtatgttcaagcaagctgaaatacaagttttgatgaaatatgatcagttaatctaaggattaaattttatgacc

SEQ ID NO: 853 - DNA, 2513 bp, Homo sapiens
  source 1..2513: mol_type = genomic DNA
ctctttggccaagccctgcctctgtacagcctcgagtggacagccagaggctgcagctggagcccagagcccaagatggagccccagctggggcctgaggctgccgccctccgccctggctggctggccctgctgctgtgggtctcagccctgagctgttctttctccttgccagcttcttccctttcttctctggtgccccaagtcagaaccagctacaattttggaaggactttcctcggtcttgataaatgcaatgcctgcatcgggacatctatttgcaagaagttctttaaagaagaaataagatctgacaactggctggcttcccaccttggactgcctcccgattccttgctttcttatcctgcaaattactcagatgattccaaaatctggcgccctgtggagatctttagactggtcagcaaatatcaaaacgagatctcagacaggagaatctgtgcctctgcatcagccccaaagacctgcagcattgagcgtgtcctgcggaaaacagagaggttccagaaatggctgcaggccaagcgcctcacgccggacctggtgcaggactgtcaccagggccagagagaactaaagttcctgtgtatgctgagataacaccagtgaaaaagcctggcatggagcccagcactgagaacttccagaaagtgttagccttctcccaactgtgttataccaaccacattttcaaatagtaatcattaaagaggcttctgcatcaaaccttcacatgcagctcccatgccaccctccagaattcaccaacacacaggcccaccagcaacaggctacctttgcacaatattctctgatgacaactccaaagccccggctctttccaccacactgtggtcccctagatggggctgttgctgagcccaccccaatccagatgtgatccccctgtgatctacttctggcaagattctcagtctggacaggtcttccctatgagatagaacctgataaggagctagggcaattctgacaacattaccaaaggcccacataacttctaaattttggtctggtctgaaggaaaacctgttcttgccctagtgatggatgaactctcttatctctggcttctagagggaaaaaaaagcatacctcttttactttttaagtacctccatcagagtcatgaaatcacctgtcaagactatctatcttttatgtttccattctggtaagaactctttaaatgaggacactgctgattgctggtgatgttttttgagcaaacactcgggggtatggatgaaagccaatcgcaggtcaaatgactccttggggaagctacttctcctctattcagatttcactaaaatcttccaagatgaaagcaaatctagatttcggtcttcattgctgtccatttttgtaatgaacgagtgtttttcctttagctagtgtatcaggcagggttctaccagagaaacagaaccagtaggagatacatatacatgtccagatttatttcaaagaattgatttacatgattgtggggattggcaagtccaaaatccatatggtaggcctgcaatctgtaaacctttgggcaggagctgatgctgtagtttgcagatagaattccttgttccttaaaaaaatctgtttttgttcttaagggctttgaatgattggatcaggcccacccagattacctagataatctcttttacttaaagtaaactgattgtaggtgctaatcacatctatgaaatgccttcacagcaacacctagattagcattcaattgaataactggggaatacagcctagccaagttgacacataaaattaaccatcacagcaacatgcctgctaaattttatcgaccgtcttcagactgttaaggattgtggtagagaactgtgacagccactctcagcatcaccctgaaccaaaggcccctatcaagtaacaatatagccaagcaaaattccagtcaatagagacattgactggttggctggcttcccaagggatagcaccagacaagaaatgcaaggatgaggaaaccaggcacgggagagagaggggcaacagaggtccagggtttggttatctttttatttttcactgggaggtggtaagttagccctgttgcccatgtatgcagatgggagaagtgatttagaaactccaaagcaattggtaatccccaaaatgggtgtatctggtttgaaatgaaaccttattttattggaaatggttggtttcccaattctgtttgccattggccaatataattgtgggtttgcacatggccagcacatgccaaacagaagtagacaaaggtctcactctgtaagtgggaccttggggaggagctgcctccatcataaagggaggggttagtaaaaatggtctcttaagcctgttcctgctacagttatagaggttgctcagaaccttctcagcaaatatagcagttatctattgttgtgtattaaaccatttcaacacatagtggcttaaaa

SEQ ID NO: 854 - DNA, 1947 bp, Homo sapiens
  source 1..1947: mol_type = genomic DNA
ctagcctgcgccaaggggtagtgagaccgcgcggcaacagcttgcggctgcggggagctcccgtgggcgctccgctggctgtgcaggcggccatggattccttgcggaaaatgctgatctcagtcgcaatgctgggcgcaggggctggcgtgggctacgcgctcctcgttatcgtgaccccgggagagcggcggaagcaggaaatgctaaaggagatgccactgcaggacccaaggagcagggaggaggcggccaggacccagcagctattgctggccactctgcaggaggcagcgaccacgcaggagaacgtggcctggaggaagaactggatggttggcggcgaaggcggcgccggcgggaggtcaccgtgagaccggacttgcctccgtgggcgccggaccttggcttgggcgcaggaatccgaggcagcctttctccttcgtgggcccagcggagagtccggaccgagataccatgccaggactctccggggtcctgtgagctgccgtcgggtgagcacgtttcccccaaaccctggactgactgctttaaggtccgcaaggcgggccagggccgagacgcgagtcggatgtggtgaactgaaagaaccaataaaatcatgttcctccacccagaatgagccctgcagtcgacacctaccaatgcttagagacgcgtggtcggtgctgggggcgcggcctggagctgctgcctgtcccaccccaccagaagaggctgatcccgataggtatctgaccacattttttttttttttttttttttgagacggagtcaatgtcacccaggctggagtgcagtggcacgatctcggctcactgcaacctccgcccctgggttccagcaattctcctgcctcagcttcccgagtagccgggatcacaagtgcgcgccaccaagcccagctaacttttgtgtttttagttgagacagggttcaccatgttggctagactggtctcgaactccagacccaggtgatccgcccgcctcggcctcccaaagggctgggattacaggcgtgaaccacctcgccctgccgcggccacattttttcttttttttgagatggagtcttgctcttgtcacccaggcaggagtgcagtggcgcaatcttggctcactgcaacctctgcctcctgggttcaagctgttctccttactcagcctcccatgtagctgggattacaggcgtccgcaaccacgcccggctgatattagtagttttagtagaggcgggtttcaccatgtggccaggctgatctcgaactcctgacctcaggcagttcacccgtctcagcctcccaaagtgctgggattagaggcgtgagccactgcgcccggccaaccacattttcaaaacaggtcatgtggtgtcaggttggagtgtacttccagggataaccgtgggacattcttgaaatctgaactatcctgggaagtcttgaagtaatggatgcctatagtggacactcaggactcctgtccttggagcgagattggaggggcatctagcacttaacatatgccacaatgctttctgtggccattatttaacctctggttaaacaagcttaggaggctgacttactagtagtaaaaggagtgtgctttgagtcacagatcctggttgaactccagcatgttacaaacctcagccctgttctatgaaaggtcataactacgaggattattgtaaaacattaatttagaaatgtaaagtggtccccaatctctggatctggtcaggatttattggagctgccactgaggggattaaataagtggggtcaaagccccacagcctagtcaaccaagttgctcctcttttgtctatcctgtggttcccaagcaagactgcaattgaaaaaaaggctgctgttattaaagtcagaacaccaaataaagctttttttttttttttgag

SEQ ID NO: 855 - DNA, 812 bp, Homo sapiens
  source 1..812: mol_type = genomic DNA
cgcagccgcggggagcgaggagcgcgcggagccggccatgggcaagtcagcttccaaacagtttcataatgaggtcctgaaggcccacaatgagtaccggcagaagcacggcgtccccccactgaagctctgcaagaacctcaaccgggaggctcaacagtattctgaggccctggccagcacgaggatcctcaagcacagcccggagtccagccgtggccagtgtggggagaaccttgcatgggcatcctatgatcagacaggacacttcacggccatggtatggaagaacaccaagaagatgggcgtggggaaggcgtccgcaagtgacgggtcctcctttgtggtggccagatacttcccagcggggaatgttgtcaatgagggcttcttcgaagaaaacgtcctgccgccgaagaagtaacttgttaaatgtaatgggaaggtggcagacttaagaacgtggatatgaagtgcctagaaccaccacaacctggctgtgcgtctgtccctgtgggtgtatgtgcttgtgtgtgtgatgcatgtgagcgtctctggcacacacacttggacatacagttctgtgtgcgctcattcttattacaggagtgagcaaaggaagcatttaccccgatggttacctagaccacgattatttggattggggggaggggggatccgttttttttttttaattttttgttatttctaagcaaacctcttttgtacttttcttacttctaatatccatccctggactttttgtattccaaatgtttgtgatgctgagaagtgaagttcattttatgtga

SEQ ID NO: 856 - DNA, 1890 bp, Homo sapiens
  source 1..1890: mol_type = genomic DNA
agccgcggggagcgaggagcgcgcggagccggccatgggcaagtcagcttccaaacagtttcataatgaggtcctgaaggcccacaatgagtaccggcagaagcacggcgtccccccactgaagctctgcaagaacctcaaccgggaggctcaacagtattctgaggccctggccagcacgaggatcctcaagcacagcccggagtccagccgtggccagtgtggggagaaccttgcatgggcatcctatgatcagacaggaaaggaggtggctgatagatggtacagtgaaatcaagaactataacttccagcagcctggcttcacctcggggactggacacttcacggccatggtatggaagaacaccaagaagatgggcgtggggaaggcgtccgcaagtgacgggtcctcctttgtggtggccagatacttcccagcggggaatgttgtcaatgagggcttcttcgaagaaaacgtcctgccgccgaagaagtaacttgttaaatgtaatgggaaggtggcagacttaagaacgtggatatgaagtgcctagaaccaccacaacctggctgtgcgtctgtccctgtgggtgtatgtgcttgtgtgtgtgatgcatgtgagcgtctctggcacacacacttggacatacagttctgtgtgcgctcattcttattacaggagtgagcaaaggaagcatttaccccgatggttacctagaccacgattatttggattggggggaggggggatccgttttttttttttaattttttgttatttctaagcaaacctcttttgtacttttcttacttctaatatccatccctggactttttgtattccaaatgtttgtgatgctgagaagtgaagttcattttatgtgatcttcatgcgtcgtaatctacttttggtagataattaagattattaaaccctcatttaaatgtgacataaaatacagctttaagcacataaatacaaagcagcttccatcaggaacatggagcaggcagggactccattttacagaattactgagatttctcagttgtaaaacatgatgtcatcctgcatgcctcctggaattctccaatggggtcgccaaacaacaaatggagaaaaaaagttttacttccttgcattcttctacctttaaatagcaaagtaccactaccaccaccacctcttgcccccttccctcttttcttaaacttctggcatttcagagctcagcaggctacccctggtttctggagagttgggctaggcctgaagctccccctcccccacctctgctaggcagcccaggcctggtctgggagacagcccctcaccctgcctgggctcttggccaagcggccttggatggatgaagtcagagaggtggggtgagggtgagcttactcagggcccccagaggaagccctcagcctctgccctccccccacacagggcgggagcccaggcctgttcctggcagctgtggctgcagctgtgctcctgctccctcctggaatgtgcgacaagcccaaatgttccggggaggcggccggggcagggggcttagaagtgctaatatggttctgtgttttgcctgaaacgataccaggttcccctgaatagcaactttacaaggtccatgtgggagggaccaacccagatgccctgctgagtgtccctgaaaccatggcagctccatctgtcaagatggcaggggccggagtgagggggctgctggcttaacagcaggcatctgggcaggccagtcctcaaagcagctcctgaaggtctgtgttgcactgtcaccagtctcaagctatgcctctaatttcaccagggatattgactaagaagacaataaaatctttttctttgtgtaataacctc

SEQ ID NO: 857 - DNA, 1447 bp, Homo sapiens
  source 1..1447: mol_type = genomic DNA
cagcgacgccacggccagcagcgctcgcgtcctccccagcaacagttactcaaagctaatcagatagcgaaagaagcaggagagcaagtcaagaaatacggtgaaggagtccttcccaaagttgtctaggtccttccgcgccggtgcctggtcttcgtcgtcaacaccatggacagctcccgggaaccgactctggggcgcttggacgccgctggcttctggcaggtctggcagcgctttgatgcggatgaaaaaggttacatagaagagaaggaactcgatgctttctttctccacatgttgatgaaactgggtactgatgacacggtcatgaaagcaaatttgcacaaggtgaaacagcagtttatgactacccaagatgcctctaaagatggtcgcattcggatgaaagagcttgctggtatgttcttatctgaggatgaaaactttcttctgctctttcgccgggaaaacccactggacagcagcgtggagtttatgcagatttggcgcaaatatgacgctgacagcagtggctttatatcagctgctgagctccgcaacttcctccgagacctctttcttcaccacaaaaaggccatttctgaggctaaactggaagaatacactggcaccatgatgaagatttttgacagaaataaagatggtcggttggatctaaatgacttagcaaggattctggctcttcaggaaaacttccttctccaatttaaaatggatgcttgttctactgaagaaaggaaaagggactttgagaaaatctttgcctactatgatgttagtaaaacaggagccctggaaggcccagaagtggatgggtttgtcaaagacatgatggagcttgtccagcccagcatcagcggggtggaccttgataagttccgcgagattctcctgcgtcactgcgacgtgaacaaggatggaaaaattcagaagtctgagctggctttgtgtcttgggctgaaaatcaacccataatcccagactgctttgccttttgctcttactatgtttctgtgatcttgctggtagaattgtatctgtgcattgatgttgggaacacagtgggcaaactcacaaatggtgtgctattcttgggcaagaacagggacgctagggccttccttccaccggcgtgatctatccctgtctcactgaaagcccctgtgtagtgtctgtgttgttttcccttgaccctgggctttcctatcctcccaaagactcagctcccctgttagatggctctgcctgtccttccccagtcaccagggtgggggggacaggggcagctgagtgcattcattttgtgcttttcttgtgggctttctgcttagtctgaaaggtgtgtggcattcatggcaatcctgtaacttcaacatagatttttttgtgtgtgtggaaataaatctgcaattggaaacaaaaa

SEQ ID NO: 858 - DNA, 1738 bp, Homo sapiens
  source 1..1738: mol_type = genomic DNA
tgcgccggcagcgctcccactttcctgtccggtgcggccccgggtccctgtattttgggtccggcctgctcgccgtccgctccgtccgcccttagacctgttgcccagcatccctgcagttcgcggtacagtctctagtagagcgcgtgtatagaggcagagaggagtgaagtccacagttcctctcctccaagagcctgccgaccatgcccgcgggcgtgcccatgtccacctacctgaaaatgttcgcagccagtctcctggccatgtgcgcaggggcagaagtggtgcacaggtactaccgaccggacctgacaatacctgaaattccaccaaagcgtggagaactcaaaacggagcttttgggactgaaagaaagaaaacacaaacctcaagtttctcaacaggaggaacttaaataactatgccaagaattctgtgaataatataagtcttaaatatgtatttcttaatttattgcatcaaactacttgtccttaagcacttagtctaatgctaactgcaagaggaggtgctcagtggatgtttagccgatacgttgaaatttaattacggtttgattgatatttcttgaaaactgccaaagcacatatcatcaaaccatttcatgaatatggtttggaagatgtttagtcttgaatataacgcgaaatagaatatttgtaagtctactatatgggttgtctttatttcatataaattaagaaattatttaaaactatgaactagtttcattaattgaatttgctaagtggagttatttctcattgctaaactgttttttttcaaattctagatctctgctaactttagtaaatgaacactaaagtggtgagctttgataatgcattttgtggatacaaaatcatcgcctcatcactttctagaatgaaaggctgggggcattgctcaccttttgcgtgaagaaaagacctgtcccttagagccagtttttgcttaaggggaggacagaccgtcgtcacccagtggaccacgtgaatgaatggatgcagtgcatgctttagaagcaccgcatacctccttttacaggtacagagtaagtggtctggctactgagggaaagagtcatgatttgaatccgagtcttctgtaagacaatgacttcatgaaggtgaaaaatcagttttatggttattaaagtaaaaatttaccttgggtaaaaatgccatctttatttcattaagtactggttctaagtgacttccaataagatacattttcttcctgttttgaagttgatccccattgtgaaaaatatacattgtagtggtcatggaaatgcgccatccatactccctaaggcaggcttgttgccctagtatcaagcatgccagcagctttcaatggtcagcttctagaaggattgcctcggctatggtggccttgctcaaagccatgcctcctgaaggggcccaaatccagtgactgttggaggtgagaatagaaaggcctggccacttcagcacgtgagtggtgggcaactctgctgggcccaccacaactccctatggggtttagggacactgtctttggatctgcattgcaactcaacttatacctctgctcagtcctgtttcctttctcaggtgttgatcgaagggtgtgccttcatagaccccctgctaaactgcacctcagtgtttcttggagaaccaaatctgtaacatatatgcattaaaaattaaaggcagtacta

SEQ ID NO: 859 - DNA, 1829 bp, Homo sapiens
  source 1..1829: mol_type = genomic DNA
actagagtagaagtgattgaatgtgaagtgtcaggagattgctcgctcgtccttcgttaaacccctggtccggctgtgtgctgtggatgcgggtgtgtgttgaggggacctgcgtctgccggggccgcaccccctcccgcaggaccttggctggccgcgcgtttcctgcctgtttcctgtccagcagctggcgagctggggaccggcaggaaaggatgcgctgcccagaaggggcgggaaccgaccacgcccggtcccgtgtgccccccgccctcccggcgcccgccctccccacgccgtcgggggcgggccccgcggggctgtgggagccgaacgccgcggggtcagggcgtgcagtctgggacgcgggatgcttggcgctctacctcgccgcccctgagccttcccgtccgcctcgccacgcgcccggacggcctggggttgctgcccgtcagtctcgaaaggtgtttttggggaaaaaaatcacaatctggacgtgagaaaggacatgaggagactaaagacctgggattttgtcaatcagaatgaaaccaatgttgaaagacttttcaaatctattgttggtggtactctgtgactatgttcttggagaagctgaatatcttctcttgagagagccaggccatgtagcactaagcaacgacacagtgtatgtggatttccagtattttgatggtgctaatgggacactgaggaatgtatctgtcctgctgttggaggccaacaccaatcagactgtaactaccaagtacctcctgaccaaccagtcccagggaacactaaagtttgagtgcttctatttcaaggaggctggtgactactggttcacaatgactccagaagcaacagacaacagcactccattcccctggtgggagaaaagtgcctttctgaaggtggaatggcctgtctttcacgttgacttgaataggagtgccaaggcagcagaaggcaccttccaagtgggcctatttaccagtcaaccactgtgcccgtttcctgtggacaagcccaacatcgtagtggatgtcatcttcaccaacagtcttcctgaggcaagaagaaattcaagacagccgctggaaataagaaccagcaaaaggacagaacttgctcaaggtcagtgggttgagtttggctgtgcacccttggggccagaagcctatgtcaccgtggtgctgaagctgcttgggcgagactcagtcattacctccacaggacccattgacctggcccagaaatttggatacaaactggtgatggtgccagaactcacatgtgagtccggggtagaggtgacagtgctgcctccaccatgcaccttcgtccaaggagtggtcactgtcttcaaggaggcccccagataccctgggaagaggaccattcacttggctgaaaacagcctgcccctgggagagaggaggacaatttttaactgtactttgtttgacatggggaagaataagtactgctttgactttggcatttcaagcagaagccatttttctgcaaaggaggagtgcatgctaattcagagaaatacagaaacttggggactgtggcagccatggagccagtgtagtgccacatgtggggatggtgtcagagagcgtcgccgagtgtgtctcacttccttcccctccagtcctgtctgccctggaatgtccttggaggcctccctgtgttccctggaggagtgtgctggtaggtttcgctcttgttgcccaggctggagtgcaatggtgcgatctcggctcacgaactccgcctcccgggttcaagcgattctcctgcctcagcctctggca

SEQ ID NO: 860 - DNA, 546 bp, Homo sapiens
  source 1..546: mol_type = genomic DNA
ccctggggaagagaagctgagaggaactcctcactcagctagcttcaggagccatgacatcatctctaccatggaaattccactcactctcctgtgcccccacatttgtcctaggcctcagagtccctataaagagagattcccaactcagtatcagcacaggacacagctaggttctgaagcttctgagttctgcagcctcacctctgagaaaacctctttgccaccaataccatgaagctctgcgtgactgtcctgtctctcctcgtgctagtagctgccttctgctctctagcactctcagcaccaatgggctcagaccctcccaccgcctgctgcttttcttacaccgcgaggaagcttcctcgcaactttgtggtagattactatgagaccagcagcctctgctcccagccagctgtggtttacagggagtctgcttccagtgctgctccgggaaggatcccatccaccagagctgccccacatggaccatggtcaggcagaggaagatgcctaccacaggcaagggataaagccagatga

SEQ ID NO: 861 - DNA, 355 bp, Homo sapiens
  source 1..355: mol_type = genomic DNA
acaggacacagctaggttctgaagcttctgagttctgcagcctcacctctgagaaaacctctttgccaccaataccatgaagctctgcgtgactgtcctgtctctcctcgtgctagtagctgccttctgctctctagcactctcagcaccaatgggctcagaccctcccaccgcctgctgcttttcttacaccgcgaggaagcttcctcgcaactttgtggtagattactatgagaccagcagcctctgctcccagccagctgtcccatgggattctaatctaggcaagcaagtctgcgctgaccccagtgagtcctgggtccaggagtacgtgtatgacctggaactgaactga

SEQ ID NO: 862 - DNA, 780 bp, Homo sapiens
  source 1..780: mol_type = genomic DNA
gaaggacgcaggcagcaaagagtagtcagtcccttcttggctctgctgacactcgagcccacattccatcacctgctcccaatcatgcaggtctccactgctgcccttgccgtcctcctctgcaccatggctctctgcaaccaggtcctctctgcaccacttgctgctgacacgccgaccgcctgctgcttcagctacacctcccgacagattccacagaatttcatagctgactactttgagacgagcagccagtgctccaagcccagtgtcatcttcctaaccaagagaggccggcaggtctgtgctgaccccagtgaggagtgggtccagaaatacgtcagtgacctggagctgagtgcctgaggggtccagaagcttcgaggcccagcgacctcagtgggcccagtggggaggagcaggagcctgagccttgggaacatgcgtgtgacctccacagctacctcttctatggactggttattgccaaacagccacactgtgggactcttcttaacttaaattttaatttatttatactatttagtttttataatttatttttgatttcacagtgtgtttgtgattgtttgctctgagagttccccctgtcccctccaccttccctcacagtgtgtctggtgacaaccgagtggctgtcatcggcctgtgtaggcagtcatggcaccaaagccaccagactgacaaatgtgtatcagatgcttttgttcagggctgtgatcggcctggggaaataataaagatgttcttttaaacggt

SEQ ID NO: 863 - DNA, 2431 bp, Homo sapiens
  source 1..2431: mol_type = genomic DNA
atcacaaaggaggcccagaagccttcaggcagcctcaactcagccccaagccactgctctcccatcccagtccctggaaatccacccacttggcccagctcaccccaactccaacccactgggacccagtctccaggggcctgactgtgggcggcagccactcctgagtgagcaaaggttcctccgcggtgctctcccgtccagagccctgctgatggggaagtccgaaggcccagtggggatggtggagagcgccggccgtgcagggcagaagcgcccggggttcctggagggggggctgctgctgctgctgctgctggtgaccgctgccctggtggccttgggtgtcctctacgccgaccgcagagggaagcagctgccacgccttgctagccggctgtgcttcttacaggaggagaggacctttgtaaaacgaaaaccccgagggatcccagaggcccaagaggtgagcgaggtctgcaccacccctggctgcgtgatagcagctgccaggatcctccagaacatggacccgaccacggaaccgtgtgacgacttctaccagtttgcatgcggaggctggctgcggcgccacgtgatccctgagaccaactcaagatacagcatctttgacgtcctccgcgacgagctggaggtcatcctcaaagtggagctggagacacagctggccaaggccacggtaccccaggaggagagacacgacgtcatcgccttgtaccaccggatgggactggaggagctgcaaagccagtttggcctgaagggatttaactggactctgttcatacaaactgtgctatcctctgtcaaaatcaagctgctgccagatgaggaagtggtggtctatggcatcccctacctgcagaaccttgaaaacatcatcgacacctactcagccaggaccatacagaactacctggtctggcgcctggtgctggaccgcattggtagcctaagccagagattcaaggacacacgagtgaactaccgcaaggcgctgtttggcacaatggtggaggaggtgcgctggcgtgaatgtgtgggctacgtcaacagcaacatggagaacgccgtgggctccctctacgtcagggaggcgttccctggagacagcaagagcatggtcagagaactcattgacaaggtgcggacagtgtttgtggagacgctggacgagctgggctggatggacgaggagtccaagaagaaggcgcaggagaaggccatgagcatccgggagcagatcgggcaccctgactacatcctggaggagatgaacaggcgcctggacgaggagtactccaatctgaacttctcagaggacctgtactttgagaacagtctgcagaacctcaaggtgggcgcccagcggagcctcaggaagcttcgggaaaaggtggacccaaatctctggatcatcggggcggcggtggtcaatgcgttctactccccaaaccgaaaccagattgtattccctgccgggatcctccagccccccttcttcagcaaggagcagccacaggccttgaactttggaggcattgggatggtgatcgggcacgagatcacgcacggctttgacgacaatggccggaacttcgacaagaatggcaacatgatggattggtggagtaacttctccacccagcacttccgggagcagtcagagtgcatgatctaccagtacggcaactactcctgggacctggcagacgaacagaacgtgaacggattcaacacccttggggaaaacattgctgacaacggaggggtgcggcaagcctataaggcctacctcaagtggatggcagagggtggcaaggaccagcagctgcccggcctggatctcacccatgagcagctcttcttcatcaactatgcccaggtgtggtgcgggtcctaccggcccgagttcgccatccaatccatcaagacagacgtccacagtcccctgaagtacagggtactggggtcgctgcagaacctggccgccttcgcagacacgttccactgtgcccggggcacccccatgcaccccaaggagcgatgccgcgtgtggtagccaaggccctgccgcgctgtgcggcccacgcccacccgctgctcggaggcatctgtgcgaaggtgcagctagcggcgacccagtgtacgtcccgccccggccaaccatgccaagcctgcctgccaggcctctgcgcctggcctagggtgcagccacctgcctgacacccagggatgagcagtgtccagtgcagtacctggaccggagccccctccacagacacccgcggggctcagtgcccccgtcacagctctgtagagacaatcaactgtgtcctgcccaccctccaaggtgcattgtcttccagtatctacagcttcagacttgagctaagtaaatgcttcaaag

SEQ ID NO: 864 - DNA, 2849 bp, Homo sapiens
  source 1..2849: mol_type = genomic DNA
actgctctcccatcccagtccctggaaatccacccacttggcccagctcaccccaactccaacccactgggacccagtctccaggggcctgactgtgggcggcagccactcctgagtgagcaaaggttcctccgcggtgctctcccgtccagagccctgctgatggggaagtccgaaggcccagtggggatggtggagagcgccggccgtgcagggcagaagcgcccggggttcctggagggggggctgctgctgctgctgctgctggtgaccgctgccctggtggccttgggtgtcctctacgccgaccgcagagggaagcagctgccacgccttgctagccggctgtgcttcttacaggaggagaggacctttgtaaaacgaaaaccccgagggatcccagaggcccaagaggtgagcgaggtctgcaccacccctggctgcgtgatagcagctgccaggatcctccagaacatggacccgaccacggaaccgtgtgacgacttctaccagtttgcatgcggaggctggctgcggcgccacgtgatccctgagaccaactcaagatacagcatctttgacgtcctccgcgacgagctggaggtcatcctcaaagcggtgctggagaattcgactgccaaggaccggccggctgtggagaaggccaggacgctgtaccgctcctgcatgaaccagagtgtgatagagaagcgaggctctcagcccctgctggacatcttggaggtggtgggaggctggccggtggcgatggacaggtggaacgagaccgtaggactcgagtgggagctggagcggcagctggcgctgatgaactcacagttcaacaggcgcgtcctcatcgacctcttcatctggaacgacgaccagaactccagccggcacatcatctacatagaccagcccaccttgggcatgccctcccgagagtactacttcaacggcggcagcaaccggaaggtgcgggaagcctacctgcagttcatggtgtcagtggccacgttgctgcgggaggatgcaaacctgcccagggacagctgcctggtgcaggaggacatggtgcaggtgctggagctggagacacagctggccaaggccacggtaccccaggaggagagacacgacgtcatcgccttgtaccaccggatgggactggaggagctgcaaagccagtttggcctgaagggatttaactggactctgttcatacaaactgtgctatcctctgtcaaaatcaagctgctgccagatgaggaagtggtggtctatggcatcccctacctgcagaaccttgaaaacatcatcgacacctactcagccaggaccatacagaactacctggtctggcgcctggtgctggaccgcattggtagcctaagccagagattcaaggacacacgagtgaactaccgcaaggcgctgtttggcacaatggtggaggaggtgcgctggcgtgaatgtgtgggctacgtcaacagcaacatggagaacgccgtgggctccctctacgtcagggaggcgttccctggagacagcaagagcatggtcagagaactcattgacaaggtgcggacagtgtttgtggagacgctggacgagctgggctggatggacgaggagtccaagaagaaggcgcaggagaaggccatgagcatccgggagcagatcgggcaccctgactacatcctggaggagatgaacaggcgcctggacgaggagtactccaatctgaacttctcagaggacctgtactttgagaacagtctgcagaacctcaaggtgggcgcccagcggagcctcaggaagcttcgggaaaaggtggacccaaatctctggatcatcggggcggcggtggtcaatgcgttctactccccaaaccgaaaccagattgtattccctgccgggatcctccagccccccttcttcagcaaggagcagccacaggccttgaactttggaggcattgggatggtgatcgggcacgagatcacgcacggctttgacgacaatggccggaacttcgacaagaatggcaacatgatggattggtggagtaacttctccacccagcacttccgggagcagtcagagtgcatgatctaccagtacggcaactactcctgggacctggcagacgaacagaacgtgaacggattcaacacccttggggaaaacattgctgacaacggaggggtgcggcaagcctataaggcctacctcaagtggatggcagagggtggcaaggaccagcagctgcccggcctggatctcacccatgagcagctcttcttcatcaactatgcccaggtgtggtgcgggtcctaccggcccgagttcgccatccaatccatcaagacagacgtccacagtcccctgaagtacagggtactggggtcgctgcagaacctggccgccttcgcagacacgttccactgtgcccggggcacccccatgcaccccaaggagcgatgccgcgtgtggtagccaaggccctgccgcgctgtgcggcccacgcccacccgctgctcggaggcatctgtgcgaaggtgcagctagcggcgacccagtgtacgtcccgccccggccaaccatgccaagcctgcctgccaggcctctgcgcctggcctagggtgcagccacctgcctgacacccagggatgagcagtgtccagtgcagtacctggaccggagccccctccacagacacccgcggggctcagtgcccccgtcacagctctgtagagacaatcaactgtgtcctgcccaccctccaaggtgcattgtcttccagtatctacagcttcagacttgagctaagtaaatgcttcaaa

SEQ ID NO: 865 - DNA, 1492 bp, Homo sapiens
  source 1..1492: mol_type = genomic DNA
gccactccacgacatccctaggccggcgacacgccgctctcaagcctgtggatgacccagcgccagaaaaccgggtggccgtcatgaagccctagcccagctccgcagcccctcaccttatagacggccacacaggctgaggtgcagcccaggtaaagaagcttgtgtaatcgcagaggaaggacataacagtttgagcctcactctgtcacccaggttggagtacagtggaacagtctcagctcactgcaacttccgtcttccaggctcaagtgatcctccctcctcagcctcctgagtagctggactacagtatgtaaagaattcttgaaccgattctacaagtcactgatagacagaggagttaacttttcgctggacactatagagaaagaattgatcagtttttgcttggacaccaaaggaaaagaaaaccgcctgtgctattatctaggagccacaaaagacgcagccacaaagatcctaagtgaagtcactcgcccaatgagtgtgcatatgcctgcaatgaagatttgtgagaagctgaagaagttggatagccagatctgtgagctgaaatatgaaaaaacactggacttggcatcagttgacctgcggaagatgagagtggcagagctgaagcagatcctgcatagctggggggaggagtgcagggcctgtgcagaaaaaactgactatgtgaatctcattcaagagctggcccccaagtatgcagcgacacaccccaaaacagagctctgatctccaatgccagcacatttgtgacttgtaattagagagaaaagtgactctctaggatatggacatgttgattaaggataactgggaatgcatcatatttggtctcatgctttttgtgttggtattattcctcagaattttgttacgtgggtttatgagtgaaactaatactactgataacttacatttgcagtgtaccaaaagctaaaagttcctttctcataagtttcttggaatgactatgccagttttcattgcctgtctcctaaaagtgacctactgacaaattgatggagtaaattgattccaagaaagaagaaggcattcagagactcctctctggatgcaattttaaaatatattggactaaaacaaaagacacaacagtcagcttatctaatgcacaacttcaatcccaaatacagaatcaaaagtttttttcaagtgaattttctgttttcactctatattgtagctctctttggtatcagaaatggtcaggcaggagtactcgtttttcccattggaagaaaacccacttaaacctacttaaagaaaatagagagatcaagaaaccgtataagtatagccaatgtttggcaattatatcaacatttacattgttaattgaaccaagctcaaggtctttttcattccttacagtcacatatcagacaagtttttgatggaagattaaagcatattaaaaacactcataggcaacttggaa

SEQ ID NO: 866 - DNA, 4493 bp, Homo sapiens
  source 1..4493: mol_type = genomic DNA
tctttccacctcccttccagtccgctcccggttcctggctccagctaggctcggcagaaataggagcgcgcaggcgcgacgtgcggctcgcagaacggcgagtagcggagcgggacccgctggaatcatcatccagggacgtgccagaaaccacaagaaaacatggggagggttttcctcacgggagaaaaagccaattccatattaaaacgctacccaagagctaatgggttttttgaagaaataagacagggcaacattgagcgtgagtgcaaagaagaattctgtacatttgaagaagcaagagaagcttttgaaaataatgaaaaaactaaggagttttggagcacctacacaaaagcgcaacaaggggagagtaaccgaggaagtgactggtttcagttttaccttacctttccgttaatctttggcctcttcattatcctccttgtcattttcctaatctggagatgcttcctaagaaacaaaactcgtagacagacagtgactgaaggccacattcctttccctcagcaccttaatattatcaccccaccccccccaccagatgaagtgtttgacagcagtggattgtctccaggctttctgggatatgtagttgggcgctcagattccgtctctactcgcctgtccaattgtgatcccccgccaacctatgaggaagccactggccaagtgaacctgcagaggagtgaaacagaacctcatttagacccacccccagagtatgaggacatagtcaactccaactcagccagtgccattcctatggtgcctgtggtcaccaccatcaaatgaagctgcaaacttctttttactctaatcatttttaaaatactaatggaagaactttctagcactttaccactacataaatgttcattgacttattttattggactcttaccgcataccacttcacacttgttttattttctttagttttgtttcttgttatagaatcattatccatgctcatttttgctaggggaaatatatgaagagggaaaacatactaatgggggtctttctgtgatgtgatgagacatacatgtaagtgtatatatgtgtgtataggcatatatacgtgtgtatgcatcaacacagtatatgtaaaactgtcttaaaaatccattaacttctacctaaatcacctggaaggagagcattactcaccaaaattgcaaaacaagggtatcaagaatttgtgtaatagccagtgacatgctgtagatttttgcaaactggatgtacttagcatgttttctaattctgactggcttttgttaacttgataattcttcatctaccttaaaaagaaaaaaattacacatagtcattcttgatgttataaatagagaaaaagtgtgtgtgagcaataatgcataagctactgataacttgcttacagcagatagcaataaggtatttggtggcattcggcttgttttgtaatagggattttttttttggttgaccactcccccacacttccaaaattaaacagtgttttcttagcatcttgaatatctcctgcggtgtatattaacatcttgatgagacagatttccaggcaacaaaataatttctaaaatggatatatgtgtggattaatgacaggcagtaaatacccattactcctttactcatagctggtaaaattattcccactgttttattgccttttactgtacgttctacactctgtcctactcccacagaattttcaagcccttaagagtttagttaaaataaaatttttgaaattattgtcttaatatttttatataggctgatgtctttgcctcaagattgttaggaggtaattttccattgaattatcaactgtgatttttatattgccctccaagtggtagaagaagattgcaaagtccatgttatgctaggtgcacaataaatctagtaatagccccacacagatctcatcattgttgctacttccttttgtattttcatcaggtatttttttaactgtagggtttttacttttttcttggagcagagagaacaggctgtaaatgggttgccaacataagctggctgagaaataaaagaaaacaagacagttgttcataaagtttcattttgtatgcactgatggcaaattcattaggtcagttaagggaaatatttgtaccacttccaaacttttcagcgttggataaaatgattgatgaggcaggcagaaggaatgtaggtttcaggtgtgtcatttcctgctgcttccagctccatccctacagactcctccccgagtcctgccctggaaccaaaggaaggaggaacactgaggggaatcctgaagtaggagtcagatgacctgaactcagatctccctctatcacatgcttgccaccactgtaccttgagcaagaatcatatctgaccctcaacctcctcaactctaaaatggggataacatcatttgtcctgcacttctctaagggctttacaaggatcaaataagatggtgtgtatgtaagaaatttgtaaaatgtgaagagctatctacactaagttcgtaatgttattattattgtgcttcatggagaattttcccctctgttttcctaaattgtatgagagctttcacacagtgagaaatagagcaggctgccccataaatgggtaacatattcctaatctgagtgtgtgggctgttagagaacccctgccatgctctggtctgttctgaaactgtgccaactgaaagatgatagtccacacagcacaaacaggtttaagcaaatgatagaaagggaagtaaggcgtgtgtgctagttaataggtttagtagcttttatggactaaaaatgattgattgtatcttgaccctggtctcagaaatgacatttttacttttgccatgagtacacatcagatatctttggcttctatttaaagctaaaggtagaagtgtttgatccagtgaactgtgtatgtatgtgtggggtttttttctttatttttaaatgaaaattaagacaccttttgtgtggacatgtttttgtctttaatgtcaggctttagattagaccagcagttttcaaagtatggccaatggacccctgggttccttgagagcctttcaggggggactatgagatcaaaatatttttattataatgtgaagacattgtcttttcactctatctcaaaaaaagtgttgcaaatgtaaaacattgccatcttctcacaaatctctttttttgtttttgaaaatatggccatttttcataaaatgttatttgtgttagcatgtaatgggtttactatgtttaaataagttaatactttaaaaattttcaggtttttttagtatggtgaatattgatagatataaacctcatgaacaaaagtactttggcatccagattctcaataaatgttaagagcgtaagtgtaagggggtccagagaccaaaagttttagagctacaggattagacataggagcaggatattctgttagtgtgatttcttgcaactttattttacattttaaactgctgatattggatataatgctgctttttagagacacctaaattgcagtatcagaatgaatgttgatgtttgaagccaaaaagccaaatgcttaaactgatcaatgactgtagctttttagactgttggtcaaagaacattctacttcacagtaatagctctatcagccacagatctcatggtggctgttgcatgataatgataggataaacaaaataccactgtcttcaagaaacattatcttaggtttgtttgtttggtttgagtttgatttggcttttatattttttaaaatcccttttgctaccccatctggttttataaactgagtttcttagcattcgttaaaattaaggggtttgtttggaataatatatattttttatgcttttgtctttcttacctgattgatattacattcacctttgattgttttttaaaagtttatttttacagaatatatttagtacctttcttaaggagtaactgaattgaatcaaccagtttgcatttaaataaaagaacaggctcagtggtcttcctgtagaatggtttacatgcctgcatgtgcagtagttgtgtctggaatcctagaattggcactttctgcctccttgctctaaatgtcacaaaaaattatacttccttaaagtaaatgtaatgatttcttcttttcctattgaccagtacagatagatatgttgtgtttgcttcatttttaatgatgacttcaagattgatgatgtgatccaataactgtggaggtagctttaacttggttctgtgtaaatagtatgtattttattataatatttctcattttaagatgcttggtttacattaaattatggtatttaactatttttatgtttatactaggtagggtctttcttatgtttctgtgtttttggtatgctaaataaagctatttttaaacccaagaga

SEQ ID NO: 867 - DNA, 2640 bp, Homo sapiens
  source 1..2640: mol_type = genomic DNA
tttccggcaaggttggaagccgctcttggaggtcgtgagcatctgcaaacatcccaaaacctttcaaccaaaatatgtatagatgagtgtgcagaccaaagtaaggacatcagtatgttacatttaaaaataagtcaaggttaaaggcggtgtcctcttttaagaacatcgcaaatacaattccagtactccaagtacgtattctgtacccagccacctgggaggactgagagacctaatggttttctgctttctggaacttctatgccaattgtgactttctcacccaaatttgtaaattcgcaaattaacatgcagcgaataattacaattgtaaacacctggaagtggaaaaggccgtgaggataaattgagaggaagagtaaacctaataccataagttgcataccagcagatctgagtatcgtcatgaataattggttagcttttccacatgccttagaagtttcagcaagcacctagcgaacatcttaatccaaatttctcaaaaaatgagagattttatttaagatcattcctcaatttatcttagactttcagctacatagttagtccggtagtgtaacagtaacgggttttacgtaaatgccaggggaaaagagaggaaagctaaataaccaagtaaatctgtatctaattaacaaattggctaaataaggtgttatcagctgcttgatatagagctgataaaatcttcagctaggcatacttgaggcctgattacagaagtgaccgtagtccacccacacacctgaaatttatttaagagaccaagctaggctcttcctggcctttaggaagaggactggcatggagaaatatgttcctcactagttctcccaagccatggcacgtcccaacaaattcctcctttggttttgctgctttgcctggctgtgttttcctattagccttggttctcaggcttctgggggagaagctcagattgctgctagtgctgagttggaatctggggctatgccttggtccttgctgcagcatatagatgagagagacagagctggcctccttcccgcgcttttcaaagttctatctgttgggcgaggtgggtcacctaggctgcagccagactccagagctttgcactacatgaagaagctctataagacatatgctaccaaggaagggattcctaaatccaatagaagtcacctctacaacactgttcggctcttcaccccctgtacccggcacaagcaggctcctggagaccaggtaacaggaatccttccatcagtggaactgctatttaacctggatcgcattactaccgttgaacacttactcaagtcagtcttgctgtacaatatcaacaactcagtttctttttcctctgctgtcaaatgtgtgtgcaatctaatgataaaggagccaaagtcttctagcaggactctcggcagagctccatactcatttacctttaactcacagtttgaatttggaaagaaacacaaatggattcagattgatgtgaccagcctccttcaacctttagtggcctccaacaagagaagtattcacatgtctataaattttacttgcatgaaagaccagctggagcatccttcagcacagaatggtttgtttaacatgactctggtgtccccctcactgatcttatatttgaatgacacaagtgctcaggcttatcacagctggtattcccttcactataaaaggaggccttcccagggtcctgaccaggagagaagtctgtctgcctatcctgtgggagaagaggctgctgaggatgggagatcttcccatcaccgtcaccgcagaggtcaggaaactgtcagttctgaattgaagaagcccttgggcccagcttccttcaatctgagtgaatacttcagacaatttcttcttccccaaaatgagtgtgagctccatgactttagacttagctttagtcagctgaagtgggacaactggattgtggctccgcacaggtacaaccctcgatactgtaaaggggactgtccaagggcagttggacatcggtatggctctccagttcacaccatggtacagaacatcatctatgagaagctggactcctcagtgccaagaccgtcatgtgtacctgccaaatacagccccttgagtgttttgaccattgagcccgatggctcaattgcctataaagagtacgaagatatgatagctacaaagtgcacctgtcgttaacaaatggtcctcttaaaaccttgagcctatttggcaaagtaactactgtgtgcctatgtgtgccttcaagagaaagcttcatatattaagtctctaaatgtagcatatgttatataaagaggagcctgtgtaggttagtaccttctatggcatctatcaggataaagggataacatcaattgttgctacagagcctttttttatttccaaatttaaatgaaatataattattgtggagaactttacatttttttccttgagtgattttttttcttttcataggagtcttattcttgatagggaaaaaaccttaattagcatcaatcctggatggacttgcagctataaataggcaattcagattgctgtagtcttaatagaagaataaatttctgtcaatggcataaa

SEQ ID NO: 868 - DNA, 826 bp, Homo sapiens
  source 1..826: mol_type = genomic DNA
agtggggacccaaagggtgcaggacgcctggtctgccttgtgggtcctggacggagcccctacctctgcaaagatgacttggagacaggccgtcctgctgtcttgcttctccgccgtggtgctcctgtctatgctgagagagggaaccagtgtatctgtgggcaccatgcagatggcgggagaagaggcgagtgaagatgcaaaacagaagattttcatgcaggaatcagatgcctcgaatttcctcaagaggcgcggcaagcggtcccccaagtccagagatgaggtcaatgtggaaaacaggcagaagcttcgggttgatgagctgcggagagaatattacgaggaacaaaggaatgaatttgagaacttcgtggaggaacaaaacgatgagcaggaagagaggagccgggaggctgtggagcagtggcgccagtggcactatgacggcctgcacccatcctatctctacaaccgccaccacacctgatcccatcctgaagccggccaagaagacaaagcttgtagcaccattggcatccccgtgttccagcaatctttcccatgcaaaccggcccttcagagggtctcagcttggggtctgcagtggccagcagctcttgaaaagacgcatgcctttccttccagtgtgtgaaagtgtcctgactttcacctctttgcagaccatcttctgaggtgagcaactgcctgcagggcctcctagtaccaaacctacagtggcttcccctggcttcgttcccaagcaaaagaatcagtcaagaatcacatgtttgcttatggcttacaaataaaaacgctgaatcaa

SEQ ID NO: 869 - DNA, 885 bp, Homo sapiens
  source 1..885: mol_type = genomic DNA
gcgtggtgcgggggcgtggggaaatcgggttgccccagccgttactggtccgcgcagtcagggcatcctccgcatcctccacatccttccatggctctgaagaataaattcagttgtttatggatcttgggtctgtgtttggtagccactacatcttccaaaatcccatccatcactgacccacactttatagacaactgcatagaagcccacaacgaatggcgtggcaaagtcaaccctcccgcggccgacatgaaatacatgatttgggataaaggtttagcaaagatggctaaagcatgggcaaaccagtgcaaatttgaacataatgactgtttggataaatcatataaatgctatgcagcttttgaatatgttggagaaaatatctggttaggtggaataaagtcattcacaccaagacatgccattacggcttggtataatgaaacccaattttatgattttgatagtctatcatgctccagagtctgtggccattatacacagttagtttgggccaattcattttatgtcggttgtgcagttgcaatgtgtcctaaccttgggggagcttcaactgcaatatttgtatgcaactacggacctgcaggaaattttgcaaatatgcctccttacgtaagaggagaatcttgctctctctgctcaaaagaagagaaatgtgtaaagaacctctgcaggactccacaacttattatacctaaccaaaatccatttctgaagccaacggggagagcacctcagcagacagcctttaatccattcagcttaggttttcttcttctgagaatcttttaatgtcatttatatacaaaagaaattctcaaatgttaaaataaaggaatagtttattgcttaatataa

SEQ ID NO: 870 - DNA, 2729 bp, Homo sapiens
  source 1..2729: mol_type = genomic DNA
cggagacagcggtgcgctcagctcccgggagcggcccgagcagccgagcgcccagggctgcccttcccgggccggcgggctccccgggctccccgccgccgccccgtgcgccccgggagggcccggcatgctgcgccagctgctgctcgccgcgctctgcctggcgggtcccccagcgcccgcgcgcgcctgccagctgccctccgagtggaggcccctgagcgagggctgccgcgccgagctggccgagaccatcgtgtacgccagggtgctggcgctgcaccccgaggcgcccggcctctacaaccacctgccctggcagtaccacgccggccaggggggcctcttctactcggccgaggtcgagatgctgtgcgaccaggcgtggggcagcatgctggaggtgcccgccggctccaggctcaacctcaccggcctgggctacttctcgtgccactcccacaccgtggtccaggactactcctatttcttcttcctcaggatggatgaaaattataacctcttgcctcacggagtcaatttccaagatgccatcttcccagacactcaagagaacagaaggatgttttctagccttttccagttttcaaactgttcgcaagggcagcagctggcgactttctccagtgactgggaaatccaggaagacagtaggctcatgtgctcctcggtgcagaaggccttgtttgaggaggaggaccacgtcaagaaactgcagcagaaagtggccaccctggagaagcgcaaccggcagctccgggagcgagtgaagaaggtcaagaggtccttgcggcaggcgcgtaagaagggccgccacctggagctggcgaaccagaaactcagtgagaagctggcggcgggcgcgctgccgcacatcaatgcccgggggcccgtgcgccccccctacctgcgggggtaacgggcctgggggctgccaggtgtgcagggccaatcctgacggtaattgagaatgagtgaggtttcgtacatgcagctatttcaagggttgtaagagtttttgtttttaatcacgcatttggtagagtctaaatggataaaatgcaaggcttgctttccccttgggtgctggcctcaatgtcagaccccacgcgctgccccttcctggcctgaccccagacgcagtgcctggcagtccagaggcagtgggatccctgagtgctgaatgctcgcctgcagagcagcccagaaagagccctgactggggagagaacattttagaatctctagtgtaaaagacatcaacgtgcttagcctttatttcagaaaaaaatcagggtggttcccagctccccagtccaggacaaccattagtcctgatgagtgagctgacgctggtgctggaacctgctggcacctcactggccacatctttggaaggggatggtggccttgcatccaagatgcctgaaaatcagcacgtgcagggcctccctatccagccagcattttccttccagctgaggcaggtgaagacttcataagctcatcacaggggagggaattaggagcagggcagcaggtaattaaacaagataaattatacctgatttccaacaccagctacaaagagttgaagatgatacctatgggtcgcgttaacacagggggcaactgccttgatcggcctgccatgggtcatcagactgcttcctaaattgagagaaactgagcaatctctcagccactgctatagtctaacttcttgtttgctgagtaattgtttctaatgtctctgaactcaaagtgaggtgctccaagacgctgtgaacttctgcaaagacacctccttacctactgggatcacgtgacctgacctcactcccagccaggctcccaaagggctcattccagccattccaatctcttcttctttatgcaaacacttttcccccacaacaagccttgtttgttccgataggaatacgtgtacgtcagtgcacttgtccttacgtcagttccttacaccaccaaagcacttcacctttctggaaataaaacttttaagacactactataagtaaaaatgagagtattcactagacttattgctcaggcacatttgagtgggtcccagctgtgtgattaagaagtcaactgggtggccttttctgggttatcttctgatcatggcctttcaacccaacaagggcccttccctgctcttccaccagtaaaggctcctggcctctcatcaggatctgccccccagagaccccccccagacactgcagggcctggtgatgctgtcctctgtaccggaaatggcaggcactgtcagatttccactcttctgcctttaggaaggctgggtgcttcttgctctgacagccagtctggggagatgactcttacgttgcttgagtcttggtggcaggctgctgtccacgggggagaagtctctgctctggactggacagaagagagacttttaccctggggcactcacacggccaagcttctgccaccacttcattagctgtattctccatagtatggtgaaatagcaggtgcgtcttctagtttattcctcctggggacatttcctcaaagcagttttgcgcccccgcaagggaatggtcagcctaagggtaatgtacagcccgtgcttggagaaccatggaagctacacccctacaggtgcatactgttctgcttttccaataaatacgagcggcgatttcaaccac

SEQ ID NO: 871 - DNA, 3180 bp, Homo sapiens
  source 1..3180: mol_type = genomic DNA
aatacactcaaaaagcagaaagcctgcaggatgcttcttgggctcttgttgcggacgaataggctcggctattcttgttgctgaagaatagcctctgctggtgtggaggagggaagctgcccccggattagacagcaggatgacaaggaaaaaggcagatgcgccctctcctggtatctccgaaggattctgcttcgctgtctggacctcctgctgcctggccaagcctgactctcaaccctgcccctgaggctaaccccaagagcagggcagagaagcaagcaagtcagcgactgccccagacccaattccgggccctcgagttggtgtggtgtaggaggggcagatgaggctagaggctgctttataaggagcagaaaagacggtgtcacagctgtaccctgggatcggcagaaaagggtccccccggggcctgtaaggggtgcctgcgtaacaggtgacttgaatttcaagtgattatcatataaatggaggattagaaaagagacaccaactctggaaccagttcaatggaattcttcaagagactgtaacttagtgcttacaaagacttggaatgatctacactgcatggtgtacctgttagaggaggtgacatcaaagctttaggtactgagagaggatacttcctactgtggaagggaagaaaagaaaaaagcaaagctacttcttggaagagcagtggagagaaaaatattgtttctttttcttgggaaattggcagaggcatgctgaagaaatcagctacagctgttctccacacctggataaatttttaataagaacttaacacacccgccctccagaaagggtggtctgaggtgtcgatggtgttgtctctcccagggctcttctgggcagccttctctgtgacctggagagcgaagagtctatttccatcacatttcagctgccaaactcccctttaaacgatggatgaaaattataacctcttgcctcacggagtcaatttccaagatgccatcttcccagacactcaagagaacagaaggatgttttctagccttttccagttttcaaactgttcgcaagggcagcagctggcgactttctccagtgactgggaaatccaggaagacagtaggctcatgtgctcctcggtgcagaaggccttgtttgaggaggaggaccacgtcaagaaactgcagcagaaagtggccaccctggagaagcgcaaccggcagctccgggagcgagtgaagaaggtcaagaggtccttgcggcaggcgcgtaagaagggccgccacctggagctggcgaaccagaaactcagtgagaagctggcggcgggcgcgctgccgcacatcaatgcccgggggcccgtgcgccccccctacctgcgggggtaacgggcctgggggctgccaggtgtgcagggccaatcctgacggtaattgagaatgagtgaggtttcgtacatgcagctatttcaagggttgtaagagtttttgtttttaatcacgcatttggtagagtctaaatggataaaatgcaaggcttgctttccccttgggtgctggcctcaatgtcagaccccacgcgctgccccttcctggcctgaccccagacgcagtgcctggcagtccagaggcagtgggatccctgagtgctgaatgctcgcctgcagagcagcccagaaagagccctgactggggagagaacattttagaatctctagtgtaaaagacatcaacgtgcttagcctttatttcagaaaaaaatcagggtggttcccagctccccagtccaggacaaccattagtcctgatgagtgagctgacgctggtgctggaacctgctggcacctcactggccacatctttggaaggggatggtggccttgcatccaagatgcctgaaaatcagcacgtgcagggcctccctatccagccagcattttccttccagctgaggcaggtgaagacttcataagctcatcacaggggagggaattaggagcagggcagcaggtaattaaacaagataaattatacctgatttccaacaccagctacaaagagttgaagatgatacctatgggtcgcgttaacacagggggcaactgccttgatcggcctgccatgggtcatcagactgcttcctaaattgagagaaactgagcaatctctcagccactgctatagtctaacttcttgtttgctgagtaattgtttctaatgtctctgaactcaaagtgaggtgctccaagacgctgtgaacttctgcaaagacacctccttacctactgggatcacgtgacctgacctcactcccagccaggctcccaaagggctcattccagccattccaatctcttcttctttatgcaaacacttttcccccacaacaagccttgtttgttccgataggaatacgtgtacgtcagtgcacttgtccttacgtcagttccttacaccaccaaagcacttcacctttctggaaataaaacttttaagacactactataagtaaaaatgagagtattcactagacttattgctcaggcacatttgagtgggtcccagctgtgtgattaagaagtcaactgggtggccttttctgggttatcttctgatcatggcctttcaacccaacaagggcccttccctgctcttccaccagtaaaggctcctggcctctcatcaggatctgccccccagagaccccccccagacactgcagggcctggtgatgctgtcctctgtaccggaaatggcaggcactgtcagatttccactcttctgcctttaggaaggctgggtgcttcttgctctgacagccagtctggggagatgactcttacgttgcttgagtcttggtggcaggctgctgtccacgggggagaagtctctgctctggactggacagaagagagacttttaccctggggcactcacacggccaagcttctgccaccacttcattagctgtattctccatagtatggtgaaatagcaggtgcgtcttctagtttattcctcctggggacatttcctcaaagcagttttgcgcccccgcaagggaatggtcagcctaagggtaatgtacagcccgtgcttggagaaccatggaagctacacccctacaggtgcatactgttctgcttttccaataaatacgagcggcgatttcaaccac

SEQ ID NO: 872 - DNA, 2374 bp, Homo sapiens
  source 1..2374: mol_type = genomic DNA
gcaccagccgcggcaaggatggagctgggttgctggacgcagttggggctcacttttcttcagctccttctcatctcgtccttgccaagagagtacacagtcattaatgaagcctgccctggagcagagtggaatatcatgtgtcgggagtgctgtgaatatgatcagattgagtgcgtctgccccggaaagagggaagtcgtgggttataccatcccttgctgcaggaatgaggagaatgagtgtgactcctgcctgatccacccaggttgtaccatctttgaaaactgcaagagctgccgaaatggctcatgggggggtaccttggatgacttctatgtgaaggggttctactgtgcagagtgccgagcaggctggtacggaggagactgcatgccatgctcctcatccccttgtttccatgacggcacgtgcgtccttgacaaggctggatcttacaagtgtgcctgcttggcaggctatactgggcagcgctgtgaaaatctccttgaagaaagaaactgctcagaccctgggggcccagtcaatgggtaccagaaaataacagggggccctgggcttatcaacggacgccatgctaaaattggcaccgtggtgtctttcttttgtaacaactcctatgttcttagtggcaatgagaaaagaacttgccagcagaatggagagtggtcagggaaacagcccatctgcataaaagcctgccgagaaccaaagatttcagacctggtgagaaggagagttcttccgatgcaggttcagtcaagggagacaccattacaccagctatactcagcggccttcagcaagcagaaactgcagagtgcccctaccaagaagccagcccttccctttggagatctgcccatgggataccaacatctgcatacccagctccagtatgagtgcatctcacccttctaccgccgcctgggcagcagcaggaggacatgtctgaggactgggaagtggagtgggcgggcaccatcctgcatccctatctgcgggaaaattgagaacatcactgctccaaagacccaagggttgcgctggccgtggcaggcagccatctacaggaggaccagcggggtgcatgacggcagcctacacaagggagcgtggttcctagtctgcagcggtgccctggtgaatgagcgcactgtggtggtggctgcccactgtgttactgacctggggaaggtcaccatgatcaagacagcagacctgaaagttgttttggggaaattctaccgggatgatgaccgggatgagaagaccatccagagcctacagatttctgctatcattctgcatcccaactatgaccccatcctgcttgatgctgacatcgccatcctgaagctcctagacaaggcccgtatcagcacccgagtccagcccatctgcctcgctgccagtcgggatctcagcacttccttccaggagtcccacatcactgtggctggctggaatgtcctggcagacgtgaggagccctggcttcaagaacgacacactgcgctctggggtggtcagtgtggtggactcgctgctgtgtgaggagcagcatgaggaccatggcatcccagtgagtgtcactgataacatgttctgtgccagctgggaacccactgccccttctgatatctgcactgcagagacaggaggcatcgcggctgtgtccttcccgggacgagcatctcctgagccacgctggcatctgatgggactggtcagctggagctatgataaaacatgcagccacaggctctccactgccttcaccaaggtgctgccttttaaagactggattgaaagaaatatgaaatgaaccatgctcatgcactccttgagaagtgtttctgtatatccgtctgtacgtgtgtcattgcgtgaagcagtgtgggcctgaagtgtgatttggcctgtgaacttgggctgtgccagggcttctgacttcagggacaaaactcagtgaagggtgagtagacctccattgctggtaggctgatgccgcgtccactactaggacagccaattggaagatgccagggcttgcaagaagtaagtttcttcaaagaagaccatatacaaaacctctccactccactgacctggtggtcttccccaactttcagttatacgaatgccatcagcttgaccagggaagatctgggcttcatgaggccccttttgaggctctcaagttctagagagctgcctgtgggacagcccagggcagcagagctgggatgtggtgcatgcctttgtgtacatggccacagtacagtctggtccttttccttccccatctcttgtacacattttaataaaataagggttggcttctgaactac

SEQ ID NO: 873 - DNA, 3143 bp, Homo sapiens
  source 1..3143: mol_type = genomic DNA
agggcaaagccagctcccgtctcagcctcccgtaggaagatctcccggcctcacctgagcgccccgcagccctgggtacctctgctcccgcccagggtcctatggcccctcctcccagcacccaacactgggaccccacctgtacccaggctggcctccctcccccgcagcttcctttgcagccgccgtccgcgggtctccaggcgtggccacacctcccggggccccgcaagggttaaggcagcagagaggagaggtttgggctgacgtcgctctggctgaaggtggttcccctcagatgaggatgggagagcctggcgagctgaaacccgagctcccgctcagctggggctcggggaggtccctgtaaaacccgcctgcccccggcctccctgggtccctcctctccctccccagtagacgctcgggcaccagccgcggcaaggatggagctgggttgctggacgcagttggggctcacttttcttcagctccttctcatctcgtccttgccaagagagtacacagtcattaatgaagcctgccctggagcagagtggaatatcatgtgtcgggagtgctgtgaatatgatcagattgagtgcgtctgccccggaaagagggaagtcgtgggttataccatcccttgctgcaggaatgaggagaatgagtgtgactcctgcctgatccacccaggttgtaccatctttgaaaactgcaagagctgccgaaatggctcatgggggggtaccttggatgacttctatgtgaaggggttctactgtgcagagtgccgagcaggctggtacggaggagactgcatgcgatgtggccaggttctgcgagccccaaagggtcagattttgttggaaagctatcccctaaatgctcactgtgaatggaccattcatgctaaacctgggtttgtcatccaactaagatttgtcatgttgagcctggagtttgactacatgtgccagtatgactatgttgaggttcgtgatggagacaaccgcgatggccagatcatcaagcgtgtctgtggcaacgagcggccagctcctatccagagcataggatcctcactccacgtcctcttccactccgatggctccaagaattttgacggtttccatgccatttatgaggagatcacagcatgctcctcatccccttgtttccatgacggcacgtgcgtccttgacaaggctggatcttacaagtgtgcctgcttggcaggctatactgggcagcgctgtgaaaatctccttgaagaaagaaactgctcagaccctgggggcccagtcaatgggtaccagaaaataacagggggccctgggcttatcaacggacgccatgctaaaattggcaccgtggtgtctttcttttgtaacaactcctatgttcttagtggcaatgagaaaagaacttgccagcagaatggagagtggtcagggaaacagcccatctgcataaaagcctgccgagaaccaaagatttcagacctggtgagaaggagagttcttccgatgcaggttcagtcaagggagacaccattacaccagctatactcagcggccttcagcaagcagaaactgcagagtgcccctaccaagaagccagcccttccctttggagatctgcccatgggataccaacatctgcatacccagctccagtatgagtgcatctcacccttctaccgccgcctgggcagcagcaggaggacatgtctgaggactgggaagtggagtgggcgggcaccatcctgcatccctatctgcgggaaaattgagaacatcactgctccaaagacccaagggttgcgctggccgtggcaggcagccatctacaggaggaccagcggggtgcatgacggcagcctacacaagggagcgtggttcctagtctgcagcggtgccctggtgaatgagcgcactgtggtggtggctgcccactgtgttactgacctggggaaggtcaccatgatcaagacagcagacctgaaagttgttttggggaaattctaccgggatgatgaccgggatgagaagaccatccagagcctacagatttctgctatcattctgcatcccaactatgaccccatcctgcttgatgctgacatcgccatcctgaagctcctagacaaggcccgtatcagcacccgagtccagcccatctgcctcgctgccagtcgggatctcagcacttccttccaggagtcccacatcactgtggctggctggaatgtcctggcagacgtgaggagccctggcttcaagaacgacacactgcgctctggggtggtcagtgtggtggactcgctgctgtgtgaggagcagcatgaggaccatggcatcccagtgagtgtcactgataacatgttctgtgccagctgggaacccactgccccttctgatatctgcactgcagagacaggaggcatcgcggctgtgtccttcccgggacgagcatctcctgagccacgctggcatctgatgggactggtcagctggagctatgataaaacatgcagccacaggctctccactgccttcaccaaggtgctgccttttaaagactggattgaaagaaatatgaaatgaaccatgctcatgcactccttgagaagtgtttctgtatatccgtctgtacgtgtgtcattgcgtgaagcagtgtgggcctgaagtgtgatttggcctgtgaacttgggctgtgccagggcttctgacttcagggacaaaactcagtgaagggtgagtagacctccattgctggtaggctgatgccgcgtccactactaggacagccaattggaagatgccagggcttgcaagaagtaagtttcttcaaagaagaccatatacaaaacctctccactccactgacctggtggtcttccccaactttcagttatacgaatgccatcagcttgaccagggaagatctgggcttcatgaggccccttttgaggctctcaagttctagagagctgcctgtgggacagcccagggcagcagagctgggatgtggtgcatgcctttgtgtacatggccacagtacagtctggtccttttccttccccatctcttgtacacattttaataaaataagggttggcttctgaactacaaaacaaa

SEQ ID NO: 874 - DNA, 1921 bp, Homo sapiens
  source 1..1921: mol_type = genomic DNA
cgcctccgccttcggaggctgacgcgcccgggcgccgttccaggcctgtgcagggcggatcggcagccgcctggcggcgatccagggcggtgcggggcctgggcgggagccgggaggcgcggccggcatggaggcgctgctgctgggcgcggggttgctgctgggcgcttacgtgcttgtctactacaacctggtgaaggccccgccgtgcggcggcatgggcaacctgcggggccgcacggccgtggtcacgggcgccaacagcggcatcggaaagatgacggcgctggagctggcgcgccggggagcgcgcgtggtgctggcctgccgcagccaggagcgcggggaggcggctgccttcgacctccgccaggagagtgggaacaatgaggtcatcttcatggccttggacttggccagtctggcctcggtgcgggcctttgccactgcctttctgagctctgagccacggttggacatcctcatccacaatgccggtatcagttcctgtggccggacccgtgaggcgtttaacctgctgcttcgggtgaaccatatcggtccctttctgctgacacatctgctgctgccttgcctgaaggcatgtgcccctagccgcgtggtggtggtagcctcagctgcccactgtcggggacgtcttgacttcaaacgcctggaccgcccagtggtgggctggcggcaggagctgcgggcatatgctgacactaagctggctaatgtactgtttgcccgggagctcgccaaccagcttgaggccactggcgtcacctgctatgcagcccacccagggcctgtgaactcggagctgttcctgcgccatgttcctggatggctgcgcccacttttgcgcccattggcttggctggtgctccgggcaccaagagggggtgcccagacacccctgtattgtgctctacaagagggcatcgagcccctcagtgggagatattttgccaactgccatgtggaagaggtgcctccagctgcccgagacgaccgggcagcccatcggctatgggaggccagcaagaggctggcagggcttgggcctggggaggatgctgaacccgatgaagacccccagtctgaggactcagaggccccatcttctctaagcaccccccaccctgaggagcccacagtttctcaaccttaccccagccctcagagctcaccagatttgtctaagatgacgcaccgaattcaggctaaagttgagcctgagatccagctctcctaaccctcaggccaggatgcttgccatggcacttcatggtccttgaaaacctcggatgtgtgcgaggccatgccctggacactgacgggtttgtgatcttgacctccgtggttactttctggggccccaagctgtgccctggacatctcttttcctggttgaaggaataatgggtgattatttcttcctgagagtgacagtaaccccagatggagagataggggtatgctagacactgtgcttctcggaaatttggatgtagtattttcaggccccacccttattgattctgatcagctctggagcagaggcagggagtttgcaatgtgatgcactgccaacattgagaattagtgaactgatccctttgcaaccgtctagctaggtagttaaattacccccatgttaatgaagcggaattaggctcccgagctaagggactcgcctagggtctcacagtgagtaggaggagggcctgggatctgaacccaagggtctgaggccagggccgactgccgtaagatgggtgctgagaagtgagtcagggcagggcagctggtatcgaggtgccccatgggagtaaggggacgccttccgggcggatgcagggctggggtcatctgtatctgaagcccctcggaataaagcgcgttgaccgccgaa

SEQ ID NO: 875 - DNA, 381 bp, Homo sapiens
  source 1..381: mol_type = genomic DNA
atgatttcattccatgtaatatttttgtcattaggaagaggcaagttatttttacctgtcaatttctgttttttgaaattgaaaaattctcaggtacgaatcccaaaagactttacatgcaacctccatgtcctattcaggactgttcaaggagaagacagaaacaccatgtttagaggtcattggtccatctactctagaaacttccccttggcagtggtccctgcctatgttacagaagacggcaaaaatacgagccatcgtgcatctggccagttctgcaatgctctatcccagggggaaattccttcctcactccagctggtgaacagctatgccctggagcccaggacggacatgccttgtaactttttaacttag

SEQ ID NO: 876 - DNA, 1304 bp, Homo sapiens
  source 1..1304: mol_type = genomic DNA
gcgtcgacatggcggttaccctgagtctcttgctgggcgggcgcgtttgcgccgccgtcactcgctgtgggttcgcgacccggggggtggcgggcccaggccctattggccgggagccggaccccgattccgactgggagccggaggaacgggagctgcaggaggtggagagcaccctgaaacgacagaaacaagcaatccgattccagaaaattcggaggcaaatggaggcgcctggtgccccgcccaggaccctgacgtgggaagccatggagcagatacggtatttacatgaggaatttccagagtcctggtcagttcccaggttggctgaaggctttgatgtcagcactgatgtgatccgaagagttttaaaaagcaagtttttacccacattggagcagaagctgaagcaggatcaaaaagtccttaagaaagctgggcttgcccactcgctgcagcacctccggggctctggaaatacctcaaagctgctccctgcaggccactctgtatcaggctctttgcttatgccagggcatgaagcctcatctaaagacccaaatcacagcacagctttgaaagtgatagagtcagacactcacaggacaaatacaccaaggagaaggaagggaagaaataaagaaatccaggacctggaggagagctttgtgcctgttgctgcacccctaggtcatccaagagagctgcagaagtactccagtgattctgagagccccagaggaactggcagtggtgcgttgccaagtggtcagaagctggaggagttgaaggcagaggagccagataacttcagcagcaaagtagtgcagaggggccgagagttctttgacagcaacgggaacttcctgtacagaatttgagtcggggcttggcttatggagatgcctcgtgaaacacagctgggcaagtattaatgtatatggaacagcctggatttctgcatatggataagccaccttggaataggaagaggtgttgagcctggactgtgggaggaaagagctgcgtggatagattcaaacttcctgtggtagtgctcccagtctgacctctgtagaccttcagtactcactcttcttgcttaggctctctgtgtgttgaaagccatcccgtgttgcatgtgttgttacaattttctgtgatacttgcaatttatgtttgagaagaagtgaaaagtttgccttctgacctcatttccttcttgatcagtgaacactaacattttggggacaacttagtcaattggttttccttacaacaaaataaagtaaaatgtagca

SEQ ID NO: 877 - DNA, 4757 bp, Homo sapiens
  source 1..4757: mol_type = genomic DNA
gtactgtccactgtgctgtcggtgctgaacctgagacgcgagcggaccagttgctccagcacctgaaggcaacgccctcttgcaccctctgtgccctgtgggacccgcttcaccaacaggacccatatcaacttgacaaaggagtgtggtatcggacgtgggagagagtcctctgtttgccacctgggcgctcattcaggcgtgactttggagatttctatagttttagaccaaactatttttttttccccagctaagacgatcttttgagagttttttttttttattgtgatttatatttccacagcgtttaggaatctttctgggggacttttgtgactgttaaaataaggtgaaaagcaataaggatgtttaagtgctggtcagttgtcttggttctcggattcatttttctggagtcggaaggaaggccaaccaaagaaggaggatatggccttaaatcctatcagcctctaatgagattgcgacataaggaaaaaaatcaagaaagttcaagagtcaaaggatttatgattcaggatggcccttttggatcttgtgaaaataagtactgtggtttgggaagacactgtgttaccagcagagagacagggcaagcagaatgtgcctgtatggacctttgcaaacgtcactacaaacctgtgtgtggatctgacggagaattctatgaaaaccactgtgaagtgcacagagctgcttgcctgaaaaaacaaaagattaccattgttcacaatgaagactgcttctttaaaggagataagtgcaagactactgaatacagcaagatgaaaaatatgctattagatttacaaaatcaaaaatatattatgcaagaaaatgaaaatcctaatggcgacgacatatctcggaagaagctattggtggatcaaatgtttaaatattttgatgcagacagtaatggacttgtagatattaatgaactaactcaggtgataaaacaggaagaacttggcaaggatctctttgattgtactttgtatgttctattgaaatatgatgattttaatgctgacaagcacctggctcttgaagaattttatagagcattccaagtgatccagttgagtctgccagaagatcagaaactaagcatcactgcagcaactgtgggacaaagtgctgttctgagctgtgccattcaaggaaccctgagacctcccattatctggaaaaggaacaatattattctaaataatttagatttggaagacatcaatgactttggagatgatgggtccttgtatattactaaggttaccacaactcacgttggcaattacacctgctatgcagatggctatgaacaagtctatcagactcacatcttccaagtgaatgttcctccagtcatccgggtgtatccagagagtcaggctagagagcctggggtaactgccagtcttaggtgccatgcagagggcataccaaagcctcagcttggctggttgaagaatggaattgatattacaccaaagctttccaaacaactcacgcttcaagcaaatggcagtgaggttcacataagcaatgtgcgctatgaagatactggagcatacacttgtatcgcaaagaatgaagcaggagtggatgaagacatctcttctctttttgtggaagactctgctagaaagaccctagctaacatattatggagagaagaaggtctgggaattgggaacatgttctatgttttttatgaagatggaatcaaagtgatacaacccatagaatgtgaatttcagaggcacattaagcctagtgaaaagctccttggatttcaggatgaagtctgtcccaaagctgagggagatgaagttcagaggtgtgtgtgggcatcagctgttaatgtcaaagacaagttcatttatgttgcacagccaactttggacagagtccttattgttgatgtgcagtcccaaaaagttgttcaggcagtgagcacagaccctgtcccagttaaattacactatgacaaatcacatgatcaggtctgggtgctaagctggggtaccttggagaagacatcaccaacactacaggtaattaccctggccagtgggaatgtgcctcaccacacgatccacacccaaccagtgggaaagcaatttgacagagtggatgattttttcattcccaccacaacactcattatcacccatatgaggtttggatttattcttcataaagatgaagctgcactacaaaaaattgatcttgaaaccatgtcatacatcaagacaattaacttgaaggactataagtgcgttcctcagtcattggcatatacacacttgggaggctactacttcattggctgcaaacctgacagcaccggagcagtttccccacaggtcatggtggacggtgtaactgactcagtcattgggttcaatagtgatgtgacgggcactccatatgtctctccagatggccactaccttgtcagcattaatgatgtgaaaggtcttgtaagggttcagtacattaccatcagaggagaaatacaggaggcttttgatatttacacaaatctgcacatatctgatctggcatttcaaccatcctttactgaagcccaccaatataacatctacggtagttcaagcacacaaactgatgtgctctttgtggagctctcttctgggaaggtcaagatgataaagagtctcaaggaaccactcaaggcagaagaatggccttggaaccggaaaaacaggcaaatccaggacagtggcttgtttggtcaatacctgatgacaccttccaaggactctctcttcatcctagatggacgactcaataaattaaactgtgagatcactgaagttgaaaaaggaaatacagtcatttgggttggagatgcctaaaaaccctacgatacaattattgaatgaagcgttttacaatacattgcacttaatccattgtttaaatttacaacttaactttccaagtttatatcctagtcaaacaaaatttacttggttggtccaaataaaataaattgtttttgactaagtgactaagacatacacaattaattatattggttaattagaaatactcagcacaatatttaatgagaaatcacatcagtcacaagaatcaaatatgtaaattatgctttaaacaataaagtaggatttaaatcatttaaaaaactaaactgcagggaatttcagatgacataaagcattatttcattttgagggtagtttattttttttctctgtccttttggtatgattaaacaagaaataaaaggtgttgtggaaacttaaaattcttaattcaaaatattcggtcctgtccactgtttataatattttgtgccttgaagggaatgtcacaggaggaaaaggaagactaaagcctgcatactaaatgctctcataactataaatctcttgttgttaaaaaacatctcttgcaccaaatcctgtcttcagtcttttgtttaaccctcaatgaactaccaattgaaggcataagttggtcttaggttgtatacaggtgtcaaactccacttgacatttactgtataatctgcagcatgctatagaaagtggggaggaagggaggaaaaataattacagtcaaaatatttgcaatctatctactcattttgctttcaatcactagagtgcattatgtttttaatgcaagtttgtctgggatgtcaactgcctacagatgtttattactagcagaatagattatttattaatagattgtttcttttcatatagtccaatgtttcatcatcaggaactttcggttttaaaaaagaaacattacttttgtctgctaaagtaaaccatatatagggaaattaacacctaggaaaagaaaactggcaagagaattgatgaggtattagtggcttagaagaattagtaatataagttgggaataaaggggtagcccgacagtggtaagtaaaaatgtagtactccattgtttttgctatttaaatataatgtatcaaaaacctttattctaaaatttccacaaatgattccttttatccatcttcttgtaatcctaaaagcatcttctcactatgtgctgtagtttgaaacctaacgaatcctcctacttgagacactgtagaaaagtaaaaattgttgcttctgttttgttttaagaggaaatgagaaggccagcagaagtagattaaaactagagagctggtttattaaaataagcagataattatccaggcttaaagtaatagcttacatgttttgaaaatccttgtacttatttttgtttttattgttgcaaaaaaatgttaatgggctgttgaaatgacctccatttacttaaggtaatccaataaggtcttttttaaatatacaaattttactcaagtttaaattgtataaaactgcttagaaacctgaaattttatagtgtgtaatatcttatgtgtatatagcatcctgagctgtgtgatacagtagatttcttcttagcagaaacatgcgaggtagatttaataaacaacaaaaatcagcttatgtttctacttattgaatctgctttactttttagcaattttcttccttgtgaacatgaaccatataaagtgtctgtgacttaatgatttcatgtaagtctgtcgcatacatccttcttttgtagcttacaccatgtggatgctctgtctgtagacactgcttgataaaaggagaataaacctcttacatttt

SEQ ID NO: 878 - DNA, 426 bp, Homo sapiens
  source 1..426: mol_type = genomic DNA
gctgggaccagactccgctgtcatgagggtgacatccgccacctgtgctcttctgctggctctgatctgcagcgtccagctgggggatgcctgcctggatatcgataaactgcttgcgaatgttgtgtttgatgtgtcccaagacctcctgaaggaggagcttgctcgttacaaccccagtcccctgacagaggagtccttcctcaatgtccagcaatgctttgccaatgtctccgtgacagaaagatttgctcattcagttgttattaagaagatccttcagagcaacgattgcatagaagcagccttctgatctgaggacccctgcagatcagatattggccctcctgccttccttggggctccccgcgttcctggcctggctctgttcatcactacagagaccccaatgaacacctgcagctc

SEQ ID NO: 879 - DNA, 2525 bp, Homo sapiens
  source 1..2525: mol_type = genomic DNA
tagaataatttggatgggatttgtgatgcaggaaagcctaagggaaaaagaatattcattctgtgtggtgaaaattttttgaaaaaaaaattgccttcttcaaacaagggtgtcattctgatatttatgaggactgttgttctcactatgaaggcatctgttattgaaatgttccttgttttgctggtgactggagtacattcaaacaaagaaacggcaaagaagattaaaaggcccaagttcactgtgcctcagatcaactgcgatgtcaaagccggaaagatcatcgatcctgagttcattgtgaaatgtccagcaggatgccaagaccccaaataccatgtttatggcactgacgtgtatgcatcctactccagtgtgtgtggcgctgccgtacacagtggtgtgcttgataattcaggagggaaaatacttgttcggaaggttgctggacagtctggttacaaagggagttattccaacggtgtccaatcgttatccctaccacgatggagagaatcctttatcgtcttagaaagtaaacccaaaaagggtgtaacctacccatcagctcttacatactcatcatcgaaaagtccagctgcccaagcaggtgagaccacaaaagcctatcagaggccacctattccagggacaactgcacagccggtcactctgatgcagcttctggctgtcactgtagctgtggccacccccaccaccttgccaaggccatccccttctgctgcttctaccaccagcatccccagaccacaatcagtgggccacaggagccaggagatggatctctggtccactgccacctacacaagcagccaaaacaggcccagagctgatccaggacttgttccaaaagaagaattgagcacacagtctttggagccagtatccctgggagatccaaactgcaaaattgacttgtcgtttttaattgatgggagcaccagcattggcaaacggcgattccgaatccagaagcagctcctggctgatgttgcccaagctcttgacattggccctgccggtccactgatgggtgttgtccagtatggagacaaccctgctactcactttaacctcaagacacacacgaattctcgagatctgaagacagccatagagaaaattactcagagaggaggactttctaatgtaggtcgggccatctcctttgtgaccaagaacttcttttccaaagccaatggaaacagaagcggggctcccaatgtggtggtggtgatggtggatggctggcccacggacaaagtggaggaggcttcaagacttgcgagagagtcaggaatcaacattttcttcatcaccattgaaggtgctgctgaaaatgagaagcagtatgtggtggagcccaactttgcaaacaaggccgtgtgcagaacaaacggcttctactcgctccacgtgcagagctggtttggcctccacaagaccctgcagcctctggtgaagcgggtctgcgacactgaccgcctggcctgcagcaagacctgcttgaactcggctgacattggcttcgtcatcgacggctccagcagtgtggggacgggcaacttccgcaccgtcctccagtttgtgaccaacctcaccaaagagtttgagatttccgacacggacacgcgcatcggggccgtgcagtacacctacgaacagcggctggagtttgggttcgacaagtacagcagcaagcctgacatcctcaacgccatcaagagggtgggctactggagtggtggcaccagcacgggggctgccatcaacttcgccctggagcagctcttcaagaagtccaagcccaacaagaggaagttaatgatcctcatcaccgacgggaggtcctacgacgacgtccggatcccagccatggctgcccatctgaagggagtgatcacctatgcgataggcgttgcctgggctgcccaagaggagctagaagtcattgccactcaccccgccagagaccactccttctttgtggacgagtttgacaacctccatcagtatgtccccaggatcatccagaacatttgtacagagttcaactcacagcctcggaactgaattcagagcaggcagagcaccagcaagtgctgctttactaactgacgtgttggaccaccccaccgcttaatggggcacgcacggtgcatcaagtcttgggcagggcatggagaaacaaatgtcttgttattattctttgccatcatgctttttcatattccaaaacttggagttacaaagatgatcacaaacgtatagaatgagccaaaaggctacatcatgttgagggtgctggagattttacattttgacaattgttttcaaaataaatgttcggaatacagtgcagcccttacgacaggcttacgtagagcttttgtgagatttttaagttgttatttctgattagaactctgtaaccctcagcaagtttcatttttgtcatgacaatgtaggaattgctgaattaaatgtttagaaggatgaca

SEQ ID NO: 880 - DNA, 2810 bp, Homo sapiens
  source 1..2810: mol_type = genomic DNA
aattcagcactaaaaccagtgtgagaagcagtatgtgtgagcatgtgtgtgtgtgtatgtgtgtgggggggggtgtaaaatgtgtttttcaaagtactgagaggttgatgggactgttcgattagctcctctgagaagaagagaaaaggttcttggacctctccctgtttcttccttagaataatttggatgggatttgtgatgcaggaaagcctaagggaaaaagaatattcattctgtgtggtgaaaattttttgaaaaaaaaattgccttcttcaaacaagggtgtcattctgatatttatgaggactgttgttctcactatgaaggcatctgttattgaaatgttccttgttttgctggtgactggagtacattcaaacaaagaaacggcaaagaagattaaaaggcccaagttcactgtgcctcagatcaactgcgatgtcaaagccggaaagatcatcgatcctgagttcattgtgaaatgtccagcaggatgccaagaccccaaataccatgtttatggcactgacgtgtatgcatcctactccagtgtgtgtggcgctgccgtacacagtggtgtgcttgataattcaggagggaaaatacttgttcggaaggttgctggacagtctggttacaaagggagttattccaacggtgtccaatcgttatccctaccacgatggagagaatcctttatcgtcttagaaagtaaacccaaaaagggtgtaacctacccatcagctcttacatactcatcatcgaaaagtccagctgcccaagcaggtgagaccacaaaagcctatcagaggccacctattccagggacaactgcacagccggtcactctgatgcagcttctggctgtcactgtagctgtggccacccccaccaccttgccaaggccatccccttctgctgcttctaccaccagcatccccagaccacaatcagtgggccacaggagccaggagatggatctctggtccactgccacctacacaagcagccaaaacaggcccagagctgatccaggtatccaaaggcaagatccttcaggagctgccttccagaaacctgttggagcggatgtcagcctgggagagatggactcatggaaacctggatcggtccttttagatgaaggacttgttccaaaagaagaattgagcacacagtctttggagccagtatccctgggagatccaaactgcaaaattgacttgtcgtttttaattgatgggagcaccagcattggcaaacggcgattccgaatccagaagcagctcctggctgatgttgcccaagctcttgacattggccctgccggtccactgatgggtgttgtccagtatggagacaaccctgctactcactttaacctcaagacacacacgaattctcgagatctgaagacagccatagagaaaattactcagagaggaggactttctaatgtaggtcgggccatctcctttgtgaccaagaacttcttttccaaagccaatggaaacagaagcggggctcccaatgtggtggtggtgatggtggatggctggcccacggacaaagtggaggaggcttcaagacttgcgagagagtcaggaatcaacattttcttcatcaccattgaaggtgctgctgaaaatgagaagcagtatgtggtggagcccaactttgcaaacaaggccgtgtgcagaacaaacggcttctactcgctccacgtgcagagctggtttggcctccacaagaccctgcagcctctggtgaagcgggtctgcgacactgaccgcctggcctgcagcaagacctgcttgaactcggctgacattggcttcgtcatcgacggctccagcagtgtggggacgggcaacttccgcaccgtcctccagtttgtgaccaacctcaccaaagagtttgagatttccgacacggacacgcgcatcggggccgtgcagtacacctacgaacagcggctggagtttgggttcgacaagtacagcagcaagcctgacatcctcaacgccatcaagagggtgggctactggagtggtggcaccagcacgggggctgccatcaacttcgccctggagcagctcttcaagaagtccaagcccaacaagaggaagttaatgatcctcatcaccgacgggaggtcctacgacgacgtccggatcccagccatggctgcccatctgaagggagtgatcacctatgcgataggcgttgcctgggctgcccaagaggagctagaagtcattgccactcaccccgccagagaccactccttctttgtggacgagtttgacaacctccatcagtatgtccccaggatcatccagaacatttgtacagagttcaactcacagcctcggaactgaattcagagcaggcagagcaccagcaagtgctgctttactaactgacgtgttggaccaccccaccgcttaatggggcacgcacggtgcatcaagtcttgggcagggcatggagaaacaaatgtcttgttattattctttgccatcatgctttttcatattccaaaacttggagttacaaagatgatcacaaacgtatagaatgagccaaaaggctacatcatgttgagggtgctggagattttacattttgacaattgttttcaaaataaatgttcggaatacagtgcagcccttacgacaggcttacgtagagcttttgtgagatttttaagttgttatttctgattagaactctgtaaccctcagcaagtttcatttttgtcatgacaatgtaggaattgctgaattaaatgtttagaaggatga

SEQ ID NO: 881 - DNA, 2468 bp, Homo sapiens
  source 1..2468: mol_type = genomic DNA
actgccctaacagagcaggtggggaatgttctgtttactccacttgtgcttctatttggccaacttcgcctcttcaattaaaaggacacatgctgttaacgggtgctgtggattacagatgatcgcactctgggcacagtcctctggaaatgcagatgcccgtgtggaggaaattctggcgggagaggagcggcgactcgccgctctgcttggatctcaaggcatgaggttctgggtgtgcctcgcagcctgcagagccatgtggggccttgctgccagacgaggacgggctgaagacagcagctcgtctccagtggacgcctccaagttcccatggaggggtgggcagcatcgcaccaccatgatgccttgtctgctgcgggtgggagttttcaggccctgtcatgtgagacccacgggggatccttcctgcgatgtgcagcctccacgactcggcttctccagagtgccagatacacaggtggcattttatggcagtggtcactgggacccaactcccttctctgtacacagctgtttttttaatttccaggtcagaaaaattatcttcctactttgaactctttctcctttttgccaaaaatgtttctctcttacaatgcagaagcagaacacagctcctgctcttgaaatactggatggatgtttcagagggtattgtgaggcttggagctccagccagtgacattccagccacatccttctctcctggctccacttcacagaggctggctgtgtctctggactacacctcagagctaatctgctttctggaagggtcgtgtttacttctgctggtgctgtgcatgtaggagacagctgtggccagccctgtttccctggggaggtggcagaggcggtaccatgagcaagggatgcagatgctcaagggggaccagtcaggggacacggggagggtttggcctctccagccaggggctcgccacctccatggtataaacatccatgtgaacaaaaaagttctaacaagtaccagcacactgagaatattttaaaccacaactatcgtggaaaatctgggagggtggttcctaggtccagggtggaaaagtagctgaaaacctggtagggtttgaagaacaatcagaggcggccttccacttctgagaacagttcctgtgagtcacctgatgttgttctagattaattctatcaaagacagtgttggtcaacccagctgcaggcacttgatttcctctaaaagctctggataacagaagcagagctgtgaagaaagtcaagttgaataaaatgcttccacttaaaagaatagggcttttccttgaaatggtccactggatcgaccatttcctctcatttattattattatcatctccattcccatgcatgctatttagacaaggaaggctggaagcaagtgacaggtgcggcagtgcgcagcaaggcctctgcacctggcccgtcagtagggccggcacgcagcctgactactgagtttcttctgcctcattcctctccagaggccctcaacttacaatagagacccaggagctgggagatgactgaatctgttaacatgacacagaaggactaacccataaacatgagcgtgaatgtcttttgttgggggactaaggagatgacactgaaaaggagaatcacaagccaagtgccataagcagaccacattccctgcaagctgccctgctaggctttatcccaaatcaaagaaaaagggagaatgtcttaatattctcacagatttgtaaccacttcactggggtaagttttcctttgtatagatgacggattatccttctaagctgcaagctgataaatgagaagctaagtataaaatatctagaactaaggtagatgaagatgtctatatgtgcactgggtgtcacttatatatctgcctgtgttattaagggcacaaaggttgtgtggggctgtgtaaactatagatattaggaatacagattaaaacagtaatttcacaatgcaagtagtgccaagccacgaaaatatgcctggagcatcttctcttttctctacttcacagaaaatatttccatagacacttttcaccaggcatctgcagctgtttttttttttttaaacaatcataattttaagcactatatggtaagccatttggaagccattcgaattatgcattaaaacaaggaaaaataagatgccacttgacatacactgaaacacataaaatcagatacagactcttgggtggaaaaagtatgttcttcaacttagttcagatgttaacatataaaacatgctcagggaaccctgaaaaaatccagaggtgaacactctgatggtcaatcacatgtgttccttcttctgatctggatgattcttacatttttagggcgctgtactgttttttagccctttgactcattaatgtatcagggaataaaaaggatatcaaactcaa

SEQ ID NO: 882 - DNA, 8061 bp, Homo sapiens
  source 1..8061: mol_type = genomic DNA
acttcataaagactctatgtggaggatagatgctaccgtggccgggctctcagccacgttcttctgcagtatgcagtagggaagggcacatttctcacatgccttcaccagattatagttttctgggagcaaagccaagtgctcccacctttgggtgctgacccaagaagagatattctgtgaacttctgctctttggttgggcaatctccgagagtcagttggttgggcatcggcaagaacgtcatctgcgaccgcacggccacgccgctggacgctttccgcatgacctcggccgcccactactaccccaagctcatgagcatcatgggcaacgtgctgcgcttcctgccggctttcgtgcgcatgaagcagctgatcgaggagggctacgtgggcgagccgctggtgtgtgaggtgcaggtgcacggcggcagcctgctgggcaagaagtacaactggagctgcgacgacttgatgggcggcggcggcctgcactccgtgggcacctacatcatcgacctgctcaccttcctcaccggccaaaaggccgtcaaggtccacgggctgctcaagaccttcgtgaagcagactgaccacatcaagggcatccgacagatcaccagcgatgacttctgcaccttccagatggtgctggagggcggggtgtgctgcaccgtcaccctcaacttcaacgtgcccggcgagttcaagcaggatgtcactgtggtgggctcagccgggcgcctgctggccgtgggcaccgacctgtacgggcagcgcaacagcgccccggagcaggagctgctggtgcaggacgccacgccggtgagcaactccctgcttccggagaaggccttcagcgacatcccctcgccctacctgcgcggcaccatcaagatgatgcaggcggtgcgccaggccttccaggaccaggacgaccggcgcacgtgggatgggcggcccctcaccatggccgccaccttcgacgactgcctgtatgccttgtgcgtggtggacaccatcaagaggtccagccagacgggcgagtggcagaacattgccatcatgaccgaggagccggagctgagccccgcctacctgatcagcgaggccatgcgccgcagcaggatgtccctctactgttagcacagattgagaacctcggggacttgagccttctgcaggggatgtccacagagagggaagggccgaggggagagggtgaccatggggaatgtggggatcagggaggtggagggacagtgtgaataaatggcatctaggaaggtaaactccaatcccggtgaccgaccccaaaccagactgttggtgggctgagctcctagcctggaagcattcaggagagcctgccattcctgggatgatccctgctgggtatttgcacgagagtggtttggtttagctgcctctgctgccctttactgtgacaagcaaggaggggttgcttccctccctacctcatccatcccacacaccttggccttctgcaagccaagtggttctgcaaggtcaaggcactagtatcagatggcaagctcagtgcccgggatacccactgctggcaggagaaggcccattttcacagtccacagaagcgtgttaggctggggttgggggtgggatgggctggtgagaaagttcaaattccaggaagccactttttattggatataaggtatctaacggcaaaagtacttagtagcaaagtggccaccttttgattgattgggcttcctcataggaagcactgagggtgtgtctttgtacttggttcattgcccttcacctggtagagaaagagaggtcagaaatagcaagcaaaaagcaggactcccaggagccacaagaaaagagcacaggctgcaccaaagcaggggcagcagagaataaaatatccctttgaacttgtcaacaattaaaaaactgcaaggagtcaccttataacactatttccagtaaaggtggaattgagtatcagagggattactgcggtgttaaggtagccctgccacgtggctctccaggcagggccaagaagacagcacaaagtatgggtttggccataagctcatatgctgcccccaaagactggggagagctgtgtgcctcagtgttgcagtgtgaattcctaaatagagggtaaagtgagcctagccaggaggtgtttggggctctatcgcgcatctctcctaccaagctgggcaagagcttttaggagattcatccagctttgtggatttagaaaggaagccttcagttccaatcagaatcctctttccttacaaaaaaaaaaaaaaaaaaaaaaaaaaaaaggattttccttagctccagcatttgctttcaggattctgacacctgagaatttgggggtaggtactaaacgaaacaaaacaaaaggacaacaaggaacattatttctagtgtttctaaaatgggggtttagaaccccttaaggggccatacttaggcttgaaaaggctaatgttggaaaaaacatgttcttctaattggtctgctgtctgtcttgtccttgcacactctgcttacagagttttgttagagatgctgaactgcaggctgggagcaggcagtgccaaaagggaacagacacacacacacatgcacgtgcacacacacacacacacacacacacacagatttttgaatggttgctaccgacaaatgtcgctgaaaccattctttaaaaattcagatctggtcttgaaagaaagagccaatcaagtgcattcagagaacagggaattatcctttgttatctttgtttaattcttcaccccacgtaagacatttgtcaagtgtggacgtggaagccattcctcataagtctacgtagcttttgttcacaggctcactgaagtccaacaggtgtctttacatgcaactgaggtttagagttcttttcagatagctgccattggaactagaagggaatctaagaggactggagtccacctccagcctgtgtaggcaaaatctgagaatgaacagcccaatcagttgcatccttcattgtcctccctagggtcaatattctttgaagcccaggctactcataggtgcaagtgtggtgtgtccaaacacgaggggaatgctgggcattttctagaacagagaagtaagtactgccttcctggaaagagtcgccctgcttcccgaggctttgctacagcactgcagggtgggtaagctgaaattccatgcgtggtttgttgtggtccctgacctgttgctgacagacttcatggtcagcattccagctcttgcagctatcagttccaaaccagagatttgctggaatggaagtctcccaataatagtttgaacagaggcccatgtcatggactgctttggttcacattcttcttctttttttttttttttttttgaaatggagtctcgctctgtcacccaagctggagtgcagtggtgtgatctcagctcactgcaacctctgcctcccaggttcaagcgattctcctgtctcagcctcccgagcagcagggactacgggtggctgccaccacagccggctaattttttgtatttttagtagagacggggtttcactgtattagccagcatggtctcgatctcctgacctcttgatccacctgccttggccttgcaaagtgctggggttgcaggcgtgagccaccacacccagctgattctggttcttctaaattgctccctgggaaagtagtttttggggaaacattggaattattattattattattttctagctagcctgaagggctccgattaaggatgaagggaaagtaaacaaaatgattcaatgggtttcatttttctaagtcattcataacctaaatagggatattcctggggtttcaattgtatgtttctgtactaaaccataatactcgcgaaatcttttcccaaaacttcgggttttggagagaggtccccacaaaggcctctaagctctgtaatacatatttaatgtctaaaacaaaaaatctcatttgaagctggggtattagaaagaacatatattctttaaaagaggcatgaaaaaatattttagtgtgtgtactcaaattttatctactgaaatgcatgtagtaggtaggtgaaggaacaagagaaagaaaagaactggatagttcattttctttaaatataaactgtagcaaatgggtttgagatactcctttagtgctccatttgcccttatcccaccacatgcaaagacttgatttggggtagctatatgaagctgaaatctctagccttcaacagtgttctgcagaaggactttgtttcagcccagcaccgttcatcatgcctttaggggtctgggtacccacagctgactttgacctaggactaaaacccagcaatcttttggctcctttctgctttgtttaatgtgtttcaagggcctcgatgcaaggaggcagtgctttaagagtcttcccatttagttcctgcatgcctgtttcgttcccatcaatgtgcgaatggcctagattccaagttatgagggagggtgtgggtcagggttcttacctggtatttaaaaaatgtttgggagtgccctgggcctatttgaaaagtttgaatctgtgatcactgtcagctcctccaagacttctcctctcaacagacaattgcattgtagggcaccccagaccccccttagcctacatggcagcaaataccactgtgccagttatatctggactctagggtagtcttggccaactccaagactggccaactccaagacttgtccactgtgtgcagagtattttaagtatgttatctcatacaatccataaaaacaaccctatagtgttgggtattgctatttcttttatacacatgagaaaatggaggcagtaagaggaagaggaacttgttcaaagtcacacaactgttaggcagaaatgaggtcattcaaatccttaatcttctcctccagaccacactgcctcccaggaagagatgtgggcacctcctgttcttgccaggcaggaaaccgctccttatcaatgtctacggggtctgctctcacacccaggaaggactgtgacaagcatggactaacctgcggctccactcagcctgctgtcagcaccctcctgttcagcaggatgcaacatctgatgttctgccaggaggctgtagagctgcacatagaagtagccagtgtttcttcccattccaaaatggaaatatcactcagccttttttaaaattgacttcctatgttcattttgattgtaggtgatgcagcaagcctcagggctggggattttcaaaatcttgttggctgactattatagatggccttggaatttgctcttgggggtctgaatataacgtaggaaaatgtcctttctcagggagtggggctttaaagttcgtttgtttgtcactccaattttagctgtgcactgcacctttctttgcacccctactctcttcatcttgtctcatagccacagctattgaatttggcctgtgatcataagttgggtttctgatctgatctcttgcattctggtgggtactgggggcagaatcagctttgttaatgattttctgggcagaaggtaaattcagctgcatctgaaggggcttcacagtccaatagccgtccttttgttttacataacagagagtgatggtcaaggccacccacatctttagtggtagagccaggacaaaaagtcaggttttctgcctcttaagtctcatgctgcctcacatagcacctccagagctctagggaaaggaggctcagagagatgaagtgacttgtctgaagtcctgtggctagtggcagagaagttggaattagacctgcattggacctcaattcgctgagcagttgcagggaaatctggaaatccttttttttttttttttgagacagagtcttactctgtcacccaggctggagtgcaatggcgtgatctcagctcactgcaacaccgcctcccgggttcaagcgattctcctgcctcagcctcctgagtagctgggattacagacgcacgccaccatgcccggctaatttttgtatttttagtagagacaaggtttccccatattggtcaggctggtcttgaactcctgaccttgtgatccgcccgccttgacctcccaaagtgctgggatgacaggcgtgatccaccgtgcccagccgggaaatccattttttaaaataaattcaattatgtcttgaatgtactcagaaaacgagctgtttaaaatgtcccattgtgactgtaatgtgaacaatgacctctaacttgtattttatttggcaaggatgggggatgtgcatcaaatcttcacctctgggatttcctgaggcttggtctacttggctcaccctccacctgcatccccaccccactcctagatattaatacaaatctagccttgacaccgcctactgctccaccaccgcctacgtttttggccatcagagccttggagtttacagagcagaggccatgacattggggagcttgtttaaaaatcaatgatcagaaccccacattttagtttccttttggggagaaagaggagggccgtggaagaaaaggggtgtgcagctggagcgttattatgtctttctcagcggcaggcatgcccgcctctccaccttctccccgccaggcacaggagccagcagctggagcgtgctctgagtttcaggggaccccccacccagactgactggggcttctgggacttctcataggaagagtcaagacctcctgcgcttctttaaaaggtgatgggctcagtgttcccagtggcatctggaggtgaagccggtactgtctcaggagtggaaggcaatggcccactggcctttttctcccccacgtcacagtccccatttgctggagcccttgagggggccaccgaaactgtggctctcattcagcctcccaaagtgttgcactactgaatactcctttctgtttacaccagcagtgaatagagtcatgaaaagaacatattatatgcaatggcttgatgcttagtgtggcaatcaaaagcttgcctgggcagatgtaggcaggggctagacaatagtcatggagttgtcaccaggtcactgtctctctccttccccttccaggtctctactgtcccctgcagccaccacaagggctaagctgttgaatgagccccttggtttttccttataaacgcaatgacttacttgtgattcttggtctaatcccaggctaagaaacaaaacaaaagcttgtgatctgacccattcctttgctgccttccttctctttcaggcacctggacgtatttagtattctgccctgtgccttgcccaggggagggagaagtttctagcaaatgtgactttctgtctgctgcctggtgcttttatagtacttcatctgctttttattgttgttgttgtgttttttaaccaaaatggcatttgtttggctgtcattgtcgagtatatatttattgtgttttacaaacatgagtatatatgtatgtatatgtataaaaccaaacttatatatataagaagtcaaggcatgtatactagatattttaaagagttatttatcaagggaaaaagatgtgtgttataaagtaaacagagtctatattttctatataatgtagatagtcaaacatagcttataaattataggaggttttggttttcttttttattattaaaggaaaaaaagaagaaaaaaaaagacaatgaatgcaactgttcttagtgtttttaaggccaaactactgtggaagctgggaggcggccctccctgcgggcctccagcagccctgtgcctgccgctaggagctccagagctgatgcccgttgtgatctctgcgatgctcgatgctcggagccagcggtcagcatcactcagccagctggcctgtgccgctctgacgtggcttccagctgttctccgcaatttgcattggtgggataaaggaatgaaaaggataaataaagatttaaaagaaaatacaa

SEQ ID NO: 883 - DNA, 8751 bp, Homo sapiens
  source 1..8751: mol_type = genomic DNA
gagcgaacatggcagcagaatgaggaggctggcgccgggtcgtggccgccgctgccgcgctgcagctcgggatcccagtccggcgcgctccgggccgcatccttagccggcctcctggcggccgcgggattatttcattcccaacggagagctaggaagaaaggagactcccccgcggagcggttccgtgctctggcagggtgtagacgtttgtctgtgcgattcgccggctgcgcaaacgacgcgggagagagccggtcccgggctgcggcggcgcggccgcggggatgagccggccatggagcggccttggcggggcgcacgcagcggactggcgctgccgcgggagcgcagcctgagccggggctccagggggcttcgaagcctccggcgccctgggggggtccctgccgccgactccgggaaggacgcgagccccgcgtggcggacactgccgcagtcaccgttctgaggcgccccgagcttgctccgcctgcagctcggtgcgctctgggcacccgggcgccttgcccggtgcacggcggctggcgcaccgcggctagattggctacaggagcggggtgcaggactggctagaggtgggtgtgtgcgcgcgttggactggagatccgagcagaagcagaaccaggcggctctgagcagccatgcttcccggggtgggcgtgttcggcaccagcctcacggcccgtgtcatcatcccgctgctgaaagacgagggcttcgcggtgaaggcgctgtggggccgcacgcaggaagaagcggaggagctggccaaggagatgagtgtccccttctacactagccgcattgatgaggtgctgctgcatcaggacgtggacttggtgtgcattaacctgccgccgcccctcaccagacagatcgctgtcaaaaccctaggcatcggcaagaacgtcatctgcgaccgcacggccacgccgctggacgctttccgcatgacctcggccgcccactactaccccaagctcatgagcatcatgggcaacgtgctgcgcttcctgccggctttcgtgcgcatgaagcagctgatcgaggagggctacgtgggcgagccgctggtgtgtgaggtgcaggtgcacggcggcagcctgctgggcaagaagtacaactggagctgcgacgacttgatgggcggcggcggcctgcactccgtgggcacctacatcatcgacctgctcaccttcctcaccggccaaaaggccgtcaaggtccacgggctgctcaagaccttcgtgaagcagactgaccacatcaagggcatccgacagatcaccagcgatgacttctgcaccttccagatggtgctggagggcggggtgtgctgcaccgtcaccctcaacttcaacgtgcccggcgagttcaagcaggatgtcactgtggtgggctcagccgggcgcctgctggccgtgggcaccgacctgtacgggcagcgcaacagcgccccggagcaggagctgctggtgcaggacgccacgccggtgagcaactccctgcttccggagaaggccttcagcgacatcccctcgccctacctgcgcggcaccatcaagatgatgcaggcggtgcgccaggccttccaggaccaggacgaccggcgcacgtgggatgggcggcccctcaccatggccgccaccttcgacgactgcctgtatgccttgtgcgtggtggacaccatcaagaggtccagccagacgggcgagtggcagaacattgccatcatgaccgaggagccggagctgagccccgcctacctgatcagcgaggccatgcgccgcagcaggatgtccctctactgttagcacagattgagaacctcggggacttgagccttctgcaggggatgtccacagagagggaagggccgaggggagagggtgaccatggggaatgtggggatcagggaggtggagggacagtgtgaataaatggcatctaggaaggtaaactccaatcccggtgaccgaccccaaaccagactgttggtgggctgagctcctagcctggaagcattcaggagagcctgccattcctgggatgatccctgctgggtatttgcacgagagtggtttggtttagctgcctctgctgccctttactgtgacaagcaaggaggggttgcttccctccctacctcatccatcccacacaccttggccttctgcaagccaagtggttctgcaaggtcaaggcactagtatcagatggcaagctcagtgcccgggatacccactgctggcaggagaaggcccattttcacagtccacagaagcgtgttaggctggggttgggggtgggatgggctggtgagaaagttcaaattccaggaagccactttttattggatataaggtatctaacggcaaaagtacttagtagcaaagtggccaccttttgattgattgggcttcctcataggaagcactgagggtgtgtctttgtacttggttcattgcccttcacctggtagagaaagagaggtcagaaatagcaagcaaaaagcaggactcccaggagccacaagaaaagagcacaggctgcaccaaagcaggggcagcagagaataaaatatccctttgaacttgtcaacaattaaaaaactgcaaggagtcaccttataacactatttccagtaaaggtggaattgagtatcagagggattactgcggtgttaaggtagccctgccacgtggctctccaggcagggccaagaagacagcacaaagtatgggtttggccataagctcatatgctgcccccaaagactggggagagctgtgtgcctcagtgttgcagtgtgaattcctaaatagagggtaaagtgagcctagccaggaggtgtttggggctctatcgcgcatctctcctaccaagctgggcaagagcttttaggagattcatccagctttgtggatttagaaaggaagccttcagttccaatcagaatcctctttccttacaaaaaaaaaaaaaaaaaaaaaaaaaaaaaggattttccttagctccagcatttgctttcaggattctgacacctgagaatttgggggtaggtactaaacgaaacaaaacaaaaggacaacaaggaacattatttctagtgtttctaaaatgggggtttagaaccccttaaggggccatacttaggcttgaaaaggctaatgttggaaaaaacatgttcttctaattggtctgctgtctgtcttgtccttgcacactctgcttacagagttttgttagagatgctgaactgcaggctgggagcaggcagtgccaaaagggaacagacacacacacacatgcacgtgcacacacacacacacacacacacacacagatttttgaatggttgctaccgacaaatgtcgctgaaaccattctttaaaaattcagatctggtcttgaaagaaagagccaatcaagtgcattcagagaacagggaattatcctttgttatctttgtttaattcttcaccccacgtaagacatttgtcaagtgtggacgtggaagccattcctcataagtctacgtagcttttgttcacaggctcactgaagtccaacaggtgtctttacatgcaactgaggtttagagttcttttcagatagctgccattggaactagaagggaatctaagaggactggagtccacctccagcctgtgtaggcaaaatctgagaatgaacagcccaatcagttgcatccttcattgtcctccctagggtcaatattctttgaagcccaggctactcataggtgcaagtgtggtgtgtccaaacacgaggggaatgctgggcattttctagaacagagaagtaagtactgccttcctggaaagagtcgccctgcttcccgaggctttgctacagcactgcagggtgggtaagctgaaattccatgcgtggtttgttgtggtccctgacctgttgctgacagacttcatggtcagcattccagctcttgcagctatcagttccaaaccagagatttgctggaatggaagtctcccaataatagtttgaacagaggcccatgtcatggactgctttggttcacattcttcttctttttttttttttttttttgaaatggagtctcgctctgtcacccaagctggagtgcagtggtgtgatctcagctcactgcaacctctgcctcccaggttcaagcgattctcctgtctcagcctcccgagcagcagggactacgggtggctgccaccacagccggctaattttttgtatttttagtagagacggggtttcactgtattagccagcatggtctcgatctcctgacctcttgatccacctgccttggccttgcaaagtgctggggttgcaggcgtgagccaccacacccagctgattctggttcttctaaattgctccctgggaaagtagtttttggggaaacattggaattattattattattattttctagctagcctgaagggctccgattaaggatgaagggaaagtaaacaaaatgattcaatgggtttcatttttctaagtcattcataacctaaatagggatattcctggggtttcaattgtatgtttctgtactaaaccataatactcgcgaaatcttttcccaaaacttcgggttttggagagaggtccccacaaaggcctctaagctctgtaatacatatttaatgtctaaaacaaaaaatctcatttgaagctggggtattagaaagaacatatattctttaaaagaggcatgaaaaaatattttagtgtgtgtactcaaattttatctactgaaatgcatgtagtaggtaggtgaaggaacaagagaaagaaaagaactggatagttcattttctttaaatataaactgtagcaaatgggtttgagatactcctttagtgctccatttgcccttatcccaccacatgcaaagacttgatttggggtagctatatgaagctgaaatctctagccttcaacagtgttctgcagaaggactttgtttcagcccagcaccgttcatcatgcctttaggggtctgggtacccacagctgactttgacctaggactaaaacccagcaatcttttggctcctttctgctttgtttaatgtgtttcaagggcctcgatgcaaggaggcagtgctttaagagtcttcccatttagttcctgcatgcctgtttcgttcccatcaatgtgcgaatggcctagattccaagttatgagggagggtgtgggtcagggttcttacctggtatttaaaaaatgtttgggagtgccctgggcctatttgaaaagtttgaatctgtgatcactgtcagctcctccaagacttctcctctcaacagacaattgcattgtagggcaccccagaccccccttagcctacatggcagcaaataccactgtgccagttatatctggactctagggtagtcttggccaactccaagactggccaactccaagacttgtccactgtgtgcagagtattttaagtatgttatctcatacaatccataaaaacaaccctatagtgttgggtattgctatttcttttatacacatgagaaaatggaggcagtaagaggaagaggaacttgttcaaagtcacacaactgttaggcagaaatgaggtcattcaaatccttaatcttctcctccagaccacactgcctcccaggaagagatgtgggcacctcctgttcttgccaggcaggaaaccgctccttatcaatgtctacggggtctgctctcacacccaggaaggactgtgacaagcatggactaacctgcggctccactcagcctgctgtcagcaccctcctgttcagcaggatgcaacatctgatgttctgccaggaggctgtagagctgcacatagaagtagccagtgtttcttcccattccaaaatggaaatatcactcagccttttttaaaattgacttcctatgttcattttgattgtaggtgatgcagcaagcctcagggctggggattttcaaaatcttgttggctgactattatagatggccttggaatttgctcttgggggtctgaatataacgtaggaaaatgtcctttctcagggagtggggctttaaagttcgtttgtttgtcactccaattttagctgtgcactgcacctttctttgcacccctactctcttcatcttgtctcatagccacagctattgaatttggcctgtgatcataagttgggtttctgatctgatctcttgcattctggtgggtactgggggcagaatcagctttgttaatgattttctgggcagaaggtaaattcagctgcatctgaaggggcttcacagtccaatagccgtccttttgttttacataacagagagtgatggtcaaggccacccacatctttagtggtagagccaggacaaaaagtcaggttttctgcctcttaagtctcatgctgcctcacatagcacctccagagctctagggaaaggaggctcagagagatgaagtgacttgtctgaagtcctgtggctagtggcagagaagttggaattagacctgcattggacctcaattcgctgagcagttgcagggaaatctggaaatccttttttttttttttttgagacagagtcttactctgtcacccaggctggagtgcaatggcgtgatctcagctcactgcaacaccgcctcccgggttcaagcgattctcctgcctcagcctcctgagtagctgggattacagacgcacgccaccatgcccggctaatttttgtatttttagtagagacaaggtttccccatattggtcaggctggtcttgaactcctgaccttgtgatccgcccgccttgacctcccaaagtgctgggatgacaggcgtgatccaccgtgcccagccgggaaatccattttttaaaataaattcaattatgtcttgaatgtactcagaaaacgagctgtttaaaatgtcccattgtgactgtaatgtgaacaatgacctctaacttgtattttatttggcaaggatgggggatgtgcatcaaatcttcacctctgggatttcctgaggcttggtctacttggctcaccctccacctgcatccccaccccactcctagatattaatacaaatctagccttgacaccgcctactgctccaccaccgcctacgtttttggccatcagagccttggagtttacagagcagaggccatgacattggggagcttgtttaaaaatcaatgatcagaaccccacattttagtttccttttggggagaaagaggagggccgtggaagaaaaggggtgtgcagctggagcgttattatgtctttctcagcggcaggcatgcccgcctctccaccttctccccgccaggcacaggagccagcagctggagcgtgctctgagtttcaggggaccccccacccagactgactggggcttctgggacttctcataggaagagtcaagacctcctgcgcttctttaaaaggtgatgggctcagtgttcccagtggcatctggaggtgaagccggtactgtctcaggagtggaaggcaatggcccactggcctttttctcccccacgtcacagtccccatttgctggagcccttgagggggccaccgaaactgtggctctcattcagcctcccaaagtgttgcactactgaatactcctttctgtttacaccagcagtgaatagagtcatgaaaagaacatattatatgcaatggcttgatgcttagtgtggcaatcaaaagcttgcctgggcagatgtaggcaggggctagacaatagtcatggagttgtcaccaggtcactgtctctctccttccccttccaggtctctactgtcccctgcagccaccacaagggctaagctgttgaatgagccccttggtttttccttataaacgcaatgacttacttgtgattcttggtctaatcccaggctaagaaacaaaacaaaagcttgtgatctgacccattcctttgctgccttccttctctttcaggcacctggacgtatttagtattctgccctgtgccttgcccaggggagggagaagtttctagcaaatgtgactttctgtctgctgcctggtgcttttatagtacttcatctgctttttattgttgttgttgtgttttttaaccaaaatggcatttgtttggctgtcattgtcgagtatatatttattgtgttttacaaacatgagtatatatgtatgtatatgtataaaaccaaacttatatatataagaagtcaaggcatgtatactagatattttaaagagttatttatcaagggaaaaagatgtgtgttataaagtaaacagagtctatattttctatataatgtagatagtcaaacatagcttataaattataggaggttttggttttcttttttattattaaaggaaaaaaagaagaaaaaaaaagacaatgaatgcaactgttcttagtgtttttaaggccaaactactgtggaagctgggaggcggccctccctgcgggcctccagcagccctgtgcctgccgctaggagctccagagctgatgcccgttgtgatctctgcgatgctcgatgctcggagccagcggtcagcatcactcagccagctggcctgtgccgctctgacgtggcttccagctgttctccgcaatttgcattggtgggataaaggaatgaaaaggataaataaagatttaaaagaaaatacaa

SEQ ID NO: 884 - DNA, 7147 bp, Homo sapiens
  source 1..7147: mol_type = genomic DNA
acggtgcctgcacgggacgccgctcgatccccgagccccctcgccgtccccgacagcccccccggcgccatgcaatcccggcttctactcctcggggcacccggaggccacggcggcccggcctcgcggcgcatgcggctgctcctgcggcaggtggtgcagcgcaggccgggtggcgacaggcagcggccggaggtcagactgttgcacgccggctcgggggccgacacaggtgatacagttaatattggagatgtatcctacaagttgaaaattcctaagaatccagaacttgtgccacagaactacatttcagactctctggctcaatctgtagttcagcatctaagatggataatgcagaaggatcttttggggcaagatgtttttctaataggacctcctgggcctcttcgacgctctattgctatgcagtacttggagctgaccaaacgggaggtcgaatacattgccctgtcaagggacaccactgaaactgatctcaaacagcgacgagagatccgtgcaggcacagccttttacattgatcagtgtgcagttcgtgcagccacagaaggcagaactctcattttggaaggtttggaaaaggcagagaggaatgttttgcctgttttgaacaacttgctggaaaacagagagatgcagcttgaagatggacgcttcctgatgtctgctgagcgttacgacaaacttctccgagatcataccaaaaaagagttggattcttggaaaattgtccgagttagtgaaaatttccgagtgattgccttgggcttgccagtgccaaggtattctgggaatccattagacccccctcttcgttctcgatttcaagccagggatatttattatttacccttcaaggaccaacttaagttgttatattcaattggagccaatgtttctgctgagaaagtttctcagctcttgtcctttgccacaactctgtgttcccaagaatcttctactcttggacttccagactttcctttagatagtttagcagctgcggttcaaatcttggattcctttcctatgatgccaatcaaacatgcaatccagtggctttatccatatagtattttactaggtcatgaagggaagatggctgtggaaggtgttttaaagcgctttgaacttcaagattcaggaagctctctacttcctaaagagattgtaaaagtagagaagatgatggaaaaccatgtgtcccaagcttctgtgaccatccggattgcagataaagaggtgaccattaaggtgccagccgggaccaggctattaagtcaaccttgtgcgtcagaccgtttcatacagactttgagccataagcagctacaggctgaaatgatgcagtctcacatggttaaagatatatgtttaattggaggaaagggttgtggaaaaacagtgatcgctaagaactttgccgataccttaggatacaacatagaacctattatgctctatcaggatatgacagcgcgtgatctgctacagcagagatacacccttccaaatggagacactgcctggcggtcctcaccccttgtgaatgctgctctggaaggcaagctggtcctgctggatggcattcaccgggtgaatgcgggcacgcttgctgtattgcaaaggttaatccatgatcgagagctaagcctctatgatggttctaggctgctgagagaagacaggtatatgcgtttaaaggaggagctgcaactgtctgatgaacagctacagaagagatccatttttcctatccatccctccttcagaatcattgccttggcagaaccccctgttattggaagcacagcacaccagtggctgggaccagaattcttaaccatgttctttttccattacatgaaaccacttgtgaaaagtgaagaaatccaagtgattaaggaaaaggtcccaaatgtacctcaggaagctctggataagttattatcatttacacacaaactcagagaaacacaggatccaacggcacaatcattagcggcatcactttctaccagacaactgttgcgaatttctcgtcggctgtcacagtatcctaatgaaaatcttcacagtgctgttactaaagcctgcctttccaggtttttacccagtcttgctaggtcagcattagaaaaaaatctggcagatgctacaatagaaataaatactgatgacaatttggagccagaactgaaggattacaaatgtgaagtaacatctggaactctgaggattggtgctgttagtgcaccgatctataatgcacatgagaaaatgaaagtgcctgatgttcttttctatgacaacattcagcatgtgatagtgatggaagatatgctgaaagactttctccttggagaacacttattattggttggcaaccagggtgtaggaaaaaacaagattgttgacagattccttcacctgctcaacagaccccgagaatatattcagctacacagggataccacagtacaaactcttacgcttcagccttcggttaaagacggacttattgtatatgaagactcacctttggttaaagcagtaaagttgggtcatattctggtagtagatgaggctgacaaagctccaacaaatgtcacgtgtattttaaaaactctagtagaaaatggagaaatgattctagcagatggaagacgcattgttgcaaattctgctaatgtgaatggaagagaaaatgttgtagtgattcatcctgattttaggatgattgttctggcaaatagacctggatttcctttcctaggcaatgatttcttcggtaccttaggtgatatttttagctgccatgcagttgataaccccaaaccccactcggagctcgagatgctcagacagtatggaccaaatgtgcctgagcccatccttcagaagcttgtggctgcctttggagagctgaggagtttggctgaccaagggattattaactatccttattctaccagagaagttgtcaacatagtcaaacatttacagaaatttccgactgaaggtctctccagtgtagttcgaaatgtgtttgactttgattcctacaacaatgacatgagggagatattgattaacactttacacaaatacgggatacctatcggagcaaagcctaccagtgtgcagctggcaaaggagttgactctgccagaacaaacgttcatgggctactggacaattggtcaggcaagaagtgggatgcaaaaactcttgtgtccagtggaaactcatcatatagacataaagggtccagcacttataaatatacaggagtatccaatagaaagacatgaagaaagatccctaaactttactgaagaatgtgcctcatggagaataccattggatgaaattaatataatctgtgacattgctacatcacatgaaaatgagcaaaatactctctatgtagttacatgcaatcccgcttccctgtactttatgaatatgactgggaaaagtggcttctttgtggacttttttgatatcttcccaagaacagccaatggcgtttggcacccttttgtgacagtggcaccgctgggaagtcctctcaaaggtcaagtggttctccatgagcagcagagtaatgttatcctgttgttagatactactggccgggcccttcatcgtctcatcctcccttccgagaagtttacatctaagaaacctttctggtggaacaaagaagaagctgaaacttataaaatgtgtaaagaattttcacacaaaaactggctggtgttctacaaagaaaaagggaacagcctgactgtgctggatgttctagaagggcgaactcacaccatctcacttcccatcaacctcaagacagttttccttgtagcagaggacaaatggcttctggtggagagcaaaacaaatcagaaatatcttttaactaagcctgcacacatcgaatctgagggtagtggggtttgccagttgtatgtgctgaaagaggagccgcccagcacagggtttggagttacacaagaaacagagttcagcatacctcataaaatttccagtgatcaactatcatctgaacatctaagttcagctgtggaacaaaagattgcctctcccaacagaattctctcagatgagaaaaattatgctacaatagttgttggttttccagatctcatgtcacccagtgaagtttattcttggaagagaccatcatctttgcataaacgaagtggcactgatacatcattctatagaggaaagaagaaaagggggactccaaaacaaagcaattgtgtgactcttttagatacgaatcaggtagtgaggattttacccccaggagaagtccctctaaaagatatctacccaaaagatgttactcctccacaaacatctggttatatagaagtcactgatcttcaatcaaagaaactccgatatatccctattcccagatcagaatctctctcgccgtataccacatggctgtcgaccatttcagacacagatgcactgctggctgagtgggacaaaagcggtgttgttactgttgatatgggaggtcacatcaggctttgggaaactggacttgaacgtctgcagcgatcactcatggaatggagaaacatgattggacaagatgacagaaatatgcagataacaatcaacagagacagtggtgaagatgtaagctcccccaaacacgggaaggaggacccagacaacatgcctcacgtgggcggcaacacttgggctggcggaacagggggaagagacacggcaggcctgggtggcaaaggaggcccttaccggctggatgcaggccatacggtgtaccaggtctctcaggctgagaaagatgcagttcccgaagaggtcaagagagctgctagagagatgggccagagagcattccagcagaggctaaaggagatccaaatgagtgaatacgatgctgcaacctatgaaaggttttcaggtgctgttcggcgacaggtgcactccctccgaatcatcctggataatttacaggctaaaggtaaagaaagacaatggctaagacatcaagctactggagaattagatgatgccaagatcattgatgggctgactggagaaaaagccatctacaaacgtcggggtgagctggagccacaacttggcagcccacaacagaaacccaagcgtctgcgcctggtggtagatgtgtctggtagcatgtaccgtttcaacaggatggatggccggcttgagcgcacaatggaggctgtgtgtatggtcatggaagccttcgagaactatgaggagaagttccagtatgacatcgttggacactctggagatggctacaacattggtctggttccaatgaacaaaatccccaaggacaataagcaaagactagaaattctgaagacaatgcatgcccactctcagttctgcatgagtggggaccacacgttagaagggacagaacatgccatcaaggaaattgtcaaagaagaagctgatgagtactttgtcatagtcttgagtgatgcaaatctgtcacgatatggaatacatcctgctaagtttgctcaaatcctcacaagagaccctcaagtaaatgcttttgccatttttattggctctttaggtgatcaagcaaccaggcttcagagaactttaccagctggtcggtctttcgttgccatggataccaaggatatccctcagattttacaacagatcttcacctccaccatgttgtcgagtgtctaagaagtgcccttcatcaccctgatgacaccaggatttgaaataagacaggaataaagagtattctgaaaaaaagaagatatggatgaagtgaacccatgcagtgactggatgattccggcattcctgggtcttcctacacttgctccgtaatgagaattcagagaagcagccagaaggagacttaaacatggaaagatactccactgatgagtttagaagtgattagggcaagctagttgacctgcactttatcaaaggttggggttaaaggaaggtggttttgagaactatgtgtttggtctatttccaaaaacctgagggggagaaaatactttgcttttgccttaacacatcatctggtcacgttagaaaagtgaccccatcaaactgagcctttgatgtcacattctgacacaagatgcaagtctgtgcaaaacccaccaaaatgctcctatccaacaattatttttattttctccctgctctgtattgaccagaaaacaatgattttataatatttaacccaccaaaaagtccctccaacagcaatatcttatgaaagtctggctgttctcaataatttcattttcttggccaaagccaaaaggaatcaaaaaatccttggagtgcttgcctttccacgtgacttttaaaaggctcttaaagagcaaatgtcctcttctccttgctgctagagtgggaggagaaagatgtcttgccttaaaagtttactgtttcttctgttcttctagcatctctcaaaaaattcacagtactccattttggggtccaaactgtaatgctcaaaataataaatgcttacacgaaaattatttattgagaatattcatataaaaattacctaaagcaaagtaaaaaaagtaaaatcaaggtggtatatttgaagtgaatggtgattggaaatttttagctgtaacaaaaagaaagaaaacaactttttttaaagcctcattctcttttctttcaaaatgtaccttattcccacacactcttgggctgacctttattttatcaataagctcaatattactttgtttaaaataagatgcttcagcaaaagtcattctctctttaaccatataatttaaaaactcctcttcacgattgatagcaaaatcagaaacgttagggcaccagtgagttgaaaaaactggtcttaagttggaaaaactattattaataatattatcctatccatccatatctattgaaattgtacaggtccataatttcattttaattaattataggaaagaagaaaagataatacccatttgttctatcacccctctccctatcattaactatcaaataaataaataaaagcaatctgatttcc

SEQ ID NO: 885 - DNA, 852 bp, Homo sapiens
  source 1..852: mol_type = genomic DNA
gtttctgcgctcgcgtggtcatggaggcgctgccgctgctagccgcgacaactccggaccacggccgccaccgaaggctgcttctgctgccgctactgctgttcctgctgccggctggagctgtgcagggctgggagacagaggagaggccccggactcgcgaagaggagtgccacttctacgcgggtggacaagtgtacccgggagaggcatcccgggtatcggtcgccgaccactccctgcacctaagcaaagcgaagatttccaagccagcgccctactgggaaggaacagctgtgatcgatggagaatttaaggagctgaagttaactgattatcgtgggaaatacttggttttcttcttctacccacttgatttcacatttgtgtgtccaactgaaattatcgcttttggcgacagacttgaagaattcagatctataaatactgaagtggtagcatgctctgttgattcacagtttacccatttggcctggtcagtatcttacacttatattcgtagaaaaaaaagaatggatttactcttaaagcatggacagataactcttgatatgatataagaatatagtcatttatcagacaattcaggaatagctttatctaagagtaatacatgtaactacacattttccaggttaaaaaaagagagaagagtaatataatcagctgctataataaaaatgcttaaggattttataggacatttcaaaataaggggaaaagttaaatgcaatagatgtgatttctatagcgaaaaccactgaattatatgcttatgataaattgggttaccataatctggaggaaaaaaatctttaaaatatgccattt

SEQ ID NO: 886 - DNA, 1005 bp, Homo sapiens
  source 1..1005: mol_type = genomic DNA
gggaggagctggtctcgcgaggccgcgccccggttcgcgcgggcgtcgtgcacgcggttgtagctgcccggcggcggcagaagcggcgctcgcgccaagggacgtgtttctgcgctcgcgtggtcatggaggcgctgccgctgctagccgcgacaactccggaccacggccgccaccgaaggctgcttctgctgccgctactgctgttcctgctgccggctggagctgtgcagggctgggagacagaggagaggccccggactcgcgaagaggagtgccacttctacgcgggtggacaagtgtacccgggagaggcatcccgggtatcggtcgccgaccactccctgcacctaagcaaagcgaagatttccaagccagcgccctactgggaaggaacagctgtgatcgatggagaatttaaggagctgaagttaactgattatcgtgggaaatacttggttttcttcttctacccacttgatttcacatttgtgtgtccaactgaaattatcgcttttggcgacagacttgaagaattcagatctataaatactgaagtggtagcatgctctgttgattcacagtttacccatttggcctggattaatacccctcgaagacaaggaggacttgggccaataaggattccacttctttcagatttgacccatcagatctcaaaggactatggtgtatacctagaggactcaggccacactcttagaggtctcttcattattgatgacaaaggaatcctaagacaaattactctgaatgatcttcctgtgggtagatcagtggatgagacactacgtttggttcaagcattccagtacactgacaaacacggagaagtctgccctgctggctggaaacctggtagtgaaacaataatcccagatccagctggaaagctgaagtatttcgataaactgaattgagaaatacttcttcaagttatgatgcttgaaagttctcaataaagttcacggtttcattaccaca

SEQ ID NO: 887 - DNA, 815 bp, Homo sapiens
  source 1..815: mol_type = genomic DNA
agggagctccaacagaactgagggacgaacagtaggtgcctgagagctggccgatctggtcactctctccagtgggccacaggggcccacttggtgggcagtctctgctgccagctagggcatctcagctcagcccagagcaaagacgtgtagggacataacgctttcctcaagcttcctttcccaggtccaaacttagaggcccagttttgggcctagaattcactgaggtttgtggctgtttgtccaacagtcaccatggatcaccgaagccgactacggggcacaggcctgaaccgaatccctgggactcagtcccgagccccccgagtcccactccccttccacgtgcaacaggaggccagggaaggagaagactgggagcgagagccacctcgtcagaggcctcctatctatgagccaccagaaagtgaagagctgccagataatgttatggtttccaagccagcgccctactgggaaggaacagctgtgatcgatggagaatttaaggagctgaagttaactgattatcgtgggaaatacttggttttcttcttctacccacttgatttcacatttgtgtgtccaactgaaattatcgcttttggcgacagacttgaagaattcagatctataaatactgaagtggtagcatgctctgttgattcacagtttacccatttggcctggattaatacccctcgaagacaaggaggacttgggccaataaggattccacttctttcagatttgacccatcagatctcaaaggactatggtgtatacctagaggactcaggccacactcttag

SEQ ID NO: 888 - DNA, 3275 bp, Homo sapiens
  source 1..3275: mol_type = genomic DNA
acctgacatgagggcggggaccccgaaatgcacacgaagtccggaactggtcttctgtgattttcattcgccctggtctctgttccctttcgtactcaaagctcgtgcatccagggaggggaaaccggagatagggtcttcgggccccgggcagaccctctgtgccgctgcaaaccgttgcagcctgaggctgtcaggtcctcccccagacacctgcggaccctccctctcctggcttcccgtctggtcatggcgagattctgggtctgcgtagccggtgctggcttctttcttgcatttttggttttgcattcgcgtttttgtggctctccagttttgaggaactttacttttgcagtttcctggagaactgagaaaattctttaccggctggatgtgggttggcctaagcacccagaatattttaccggaacaacattttgtgttgcagttgactccctcaatggattggtttacataggtcaaagaggggataacatcccaaagatattagtgttcacagaggatggatatttcctacgagcctggaattatacagttgacacacctcatggtatatttgcagccagtactctatatgaacaatccgtctggatcacggatgtaggaagtgatttcatgatcctttggctgcatggagaaaatgggacagggcctgctaagttcaacatacctcacagtgttacacttgattcagctggtcgggtgtgggttgctgaccgaggaaataaaagaatccaagtatttgataaagacactggggagtggttaggagcatggaataattgtttcacagaagagggaccttcttcagtcaggtttactcctgatgggaagtacttgattgtggcccagctgaatcttagcaggctctcagtcgtagcagcacccccagtgggaagcattggggagtgttctgtgatcagcacaatccaactagcagatcaagttttgccacatctcctagaagtcgacagaaagactggagcagtctatgtagcagaaattggagcaaaacaagtacaaaaatatgtccctttgaatagctatgttccttcatttggttcataatgtttctttcctgggaatatttcaagtggcagttcagattctcaattcactaagtgcttaaaaatgatgttcaagcacaagaatttatttttctagtataaaagatctagtatcagaaagatttgtttttgtatcattaagaatcttatattttgttgccctcttgggacttagttttatttgtaagtgcataaggatattttaatgaaaggaaagtaactaaaaaatggggttgggaagagggactaaggtggtaacctcattatttgccctggtagactgattctccctgggtaaaaaaaatgggaataaaaatgagcttgcatgataatttattaaatttcatgtgaagaactccagacctccagattgtgcaactaacataaaatgagctgcttgagagattgtaaataagatgaactattgattaatttgagtacccacagagtgctgtgtcttgacgacttaaaaatgaaaaagcaggattgccttttgagtagcttgcagtctagtggggagacaagcaggcaaacagtcacaacacagcaaaagcgaccttggagcatagtgggacttttggagtaggagtgctgcatttgactgagggaatcatggatacttcgcaggagaagtgaatttgagctcagacttgaaaactgaggaggagcttaccaagggacaaggaggagaaaacaataatttccaagtaaagaaggtataaaaagttagaagtgtactgtaaactttgataggcttttaggccttttttaaagcccaacttggcttctgtccattacctataagatatttaatgtcagtcagcctttaaatgtaggaataaaatggctggcatctaagcactttagtaaaagaggtttttacaaataactaaggattgtagagcttccttctctttttttttctttttctttcttttgttttacatgaactcaacttattcctaacatttgtctacctcaaagaaatttcaagattatttagataacatggatatgtgccaaatcctttgagctgttaagatgataatttcctgctttcctcctacatcttctcctcccactccctcctttggtgtgaatattggcttcccaattaagacctttttttttttttttccagtttgttttagcttattataggttttggaggaactttgccattttgtaatctttcaaatcattcttcacccttcctcacatcagcttcctgcttttcccagtgttttactgtaaattgtgtagcatatgacaaatcttgagctgactttcctcttcacctgttatggctggagtattttccagacctgaagggactcacacttgttttgatacttggatcacatctccgtgaggttaggaaggtaaatctaccaacaggaagccctgtactctgtattccaaggccattggtaaatgtgttggtgccactgatcggactgtatgaccttaaacaagtcaccttagttttcagtgaaatgggaatatcattgtctcctctttcatgaatgctgtgagaatcagatgtgcaacaggtacagacttgccctttgaaatctatacctctggatacattagaggcattttattaacaaaggcccttctaaatgtgctatttatttgacaataactatcagatttgccttaattttgtgtttatagcatttatcaaaacgtatcctcatagactttatgcagattaatatggtcaattgatttggataaaagaaagtaatttcagggtttgtttttaagccaggacaagaagtgcaaatgcctctttgaagcaatttaggctaaactgattttgaaatttcaaaatgttttattttactttgttttattaagccaggacaagaagtgcaaatgcctctttgaagcaattcaggctaggtaaaccgattttgccatttcaaaacgttttattttactttgttttatatcagagtcttataaaacctgctgcaaatatttctgaatgtctttgtaaaagtgtttgttagtgtacctgtgattatagtacttcacttttttcctttggattaattggttaaatgaatgagaaatgtgttatgttttttactaaaaagtataaattaaaattttggaaagaaaaggcaatattatctggctccccaattaaagtttgattttattgtcacaaaa

SEQ ID NO: 889 - DNA, 3549 bp, Homo sapiens
  source 1..3549: mol_type = genomic DNA
ggtggccactgaaagtcagcggcgcggactgccctgagggcgggaaagggtggtcactgggtcagcccgaagcacctgacatgagggcggggaccccgaaatgcacacgaagtccggaactggtcttctgtgattttcattcgccctggtctctgttccctttcgtactcaaagctcgtgcatccagggaggggaaaccggagatagggtcttcgggccccgggcagaccctctgtgccgctgcaaaccgttgcagcctgaggctgtcaggtcctcccccagacacctgcggaccctccctctcctggcttcccgtctggtcatggcgagattctgggtctgcgtagccggtgctggcttctttcttgcatttttggttttgcattcgcgtttttgtggctctccagttttgaggaactttacttttgcagtttcctggagaactgagaaaattctttaccggctggatgtgggttggcctaagcacccagaatattttaccggaacaacattttgtgttgcagttgactccctcaatggattggtttacataggtcaaagaggggataacatcccaaagatattagtgttcacagaggatggatatttcctacgagcctggaattatacagttgacacacctcatggtatatttgcagccagtactctatatgaacaatccgtctggatcacggatgtaggaagtggattctttggtcatactgttaaaaaatacagttcttttggtgatcttgttcaagtcttgggtactccaggcaaaaaaggcactagtttgaatcctttgcagtttgataacccagcagaattatatgtagaggacacaggagatatttacattgtggatggagatggaggattgaataacagattgatcaaactgtcccaagatttcatgatcctttggctgcatggagaaaatgggacagggcctgctaagttcaacatacctcacagtgttacacttgattcagctggtcgggtgtgggttgctgaccgaggaaataaaagaatccaagtatttgataaagacactggggagtggttaggagcatggaataattgtttcacagaagagggaccttcttcagtcaggtttactcctgatgggaagtacttgattgtggcccagctgaatcttagcaggctctcagtcgtagcagcacccccagtgggaagcattggggagtgttctgtgatcagcacaatccaactagcagatcaagttttgccacatctcctagaagtcgacagaaagactggagcagtctatgtagcagaaattggagcaaaacaagtacaaaaatatgtccctttgaatagctatgttccttcatttggttcataatgtttctttcctgggaatatttcaagtggcagttcagattctcaattcactaagtgcttaaaaatgatgttcaagcacaagaatttatttttctagtataaaagatctagtatcagaaagatttgtttttgtatcattaagaatcttatattttgttgccctcttgggacttagttttatttgtaagtgcataaggatattttaatgaaaggaaagtaactaaaaaatggggttgggaagagggactaaggtggtaacctcattatttgccctggtagactgattctccctgggtaaaaaaaatgggaataaaaatgagcttgcatgataatttattaaatttcatgtgaagaactccagacctccagattgtgcaactaacataaaatgagctgcttgagagattgtaaataagatgaactattgattaatttgagtacccacagagtgctgtgtcttgacgacttaaaaatgaaaaagcaggattgccttttgagtagcttgcagtctagtggggagacaagcaggcaaacagtcacaacacagcaaaagcgaccttggagcatagtgggacttttggagtaggagtgctgcatttgactgagggaatcatggatacttcgcaggagaagtgaatttgagctcagacttgaaaactgaggaggagcttaccaagggacaaggaggagaaaacaataatttccaagtaaagaaggtataaaaagttagaagtgtactgtaaactttgataggcttttaggccttttttaaagcccaacttggcttctgtccattacctataagatatttaatgtcagtcagcctttaaatgtaggaataaaatggctggcatctaagcactttagtaaaagaggtttttacaaataactaaggattgtagagcttccttctctttttttttctttttctttcttttgttttacatgaactcaacttattcctaacatttgtctacctcaaagaaatttcaagattatttagataacatggatatgtgccaaatcctttgagctgttaagatgataatttcctgctttcctcctacatcttctcctcccactccctcctttggtgtgaatattggcttcccaattaagacctttttttttttttttccagtttgttttagcttattataggttttggaggaactttgccattttgtaatctttcaaatcattcttcacccttcctcacatcagcttcctgcttttcccagtgttttactgtaaattgtgtagcatatgacaaatcttgagctgactttcctcttcacctgttatggctggagtattttccagacctgaagggactcacacttgttttgatacttggatcacatctccgtgaggttaggaaggtaaatctaccaacaggaagccctgtactctgtattccaaggccattggtaaatgtgttggtgccactgatcggactgtatgaccttaaacaagtcaccttagttttcagtgaaatgggaatatcattgtctcctctttcatgaatgctgtgagaatcagatgtgcaacaggtacagacttgccctttgaaatctatacctctggatacattagaggcattttattaacaaaggcccttctaaatgtgctatttatttgacaataactatcagatttgccttaattttgtgtttatagcatttatcaaaacgtatcctcatagactttatgcagattaatatggtcaattgatttggataaaagaaagtaatttcagggtttgtttttaagccaggacaagaagtgcaaatgcctctttgaagcaatttaggctaaactgattttgaaatttcaaaatgttttattttactttgttttattaagccaggacaagaagtgcaaatgcctctttgaagcaattcaggctaggtaaaccgattttgccatttcaaaacgttttattttactttgttttatatcagagtcttataaaacctgctgcaaatatttctgaatgtctttgtaaaagtgtttgttagtgtacctgtgattatagtacttcacttttttcctttggattaattggttaaatgaatgagaaatgtgttatgttttttactaaaaagtataaattaaaattttggaaagaaaaggcaatattatctggctccccaattaaagtttgattttattgtcacaaaa

SEQ ID NO: 890 - DNA, 2885 bp, Homo sapiens
  source 1..2885: mol_type = genomic DNA
ccgcgagagagtggagctaactgagcagcgcacccgccacggccgctgccgccccgtgcgcccggctctcccagcaccccgcgcggcgctccagccaggcgcctgtgcgactagcggcggccggcgaagcccgcgccagccccgcgggtcgctgcggcatcctcccgccgcccagcccccgcacgctccctgcagtttaaaaggacctcccgccgcttctcggcgctgccccgggattccccagccccgcgcggctccctactccacttcgcagcaacttcggcgaccgcgcgccgcccgccctcgcccgcctttgaagtttgctgtgccgaccgcaaagttgggacacttcagcggattgaatttttctcttttatctgcctccgtccccgccctccaggcttctcgttcctggatattggtgcttagcatcttggcagggtccggggacgtggactatttcgcacaccacaccacggggagggatttttttctattttccctacgaaaaacagatctttttaaggatggtgctgctccactggtgcctgctgtggctcctgtttccactcagctcaaggacccagaagttacccacccgggatgaggaactttttcagatgcagatccgggacaaggcattttttcatgattcgtcagtaattccagatggagctgaaattagcagttatctctttagagatacacctaagaggtatttctttgtggttgaagaagacaatactccattatcagtcacagtgacgccctgtgatgcgcctttggagtggaagctgagcctccaggagctgccagaggacaggagcggggaaggctcaggtgatctggaacctcttgagcagcagaagcagcagatcattaatgaggaaggcactgagttattctcctacaaaggcaatgatgttgagtattttatatcgtctagttccccatccggtttatatcagttggatcttctttcaacagagaaagacacacatttcaaagtatatgccaccacaactccagaatctgatcagccataccctgagttaccctatgacccaagagtagatgtgacctcactggggcgcaccacggtcactttggcctggaaaccaagccccactgcctctttgctgaaacaacccattcagtactgtgtggtcatcaacaaagagcacaatttcaaaagtctctgtgcagtggaagcaaaactgagtgcagatgatgcttttatgatggcaccgaaacctggtctggacttcagcccctttgactttgcccactttggatttccttctgataattcaggtaaagaacgcagtttccaggcaaagccttctccaaaactggggcgtcatgtctactccaggcccaaggttgatattcagaaaatctgcataggaaacaagaacatcttcaccgtctctgatctgaaacccgacacgcagtactactttgatgtatttgtggtcaacatcaacagcaacatgagcaccgcttatgtaggtacctttgccaggaccaaggaagaagccaaacagaagacagtcgagctaaaagatgggaagataacagatgtatttgttaaaaggaagggagcaaagtttctacggtttgctccagtctcttctcaccaaaaagtcaccttctttattcactcttgtctggatgctgtccaaatccaagtgagaagagatgggaaacttcttctgtctcagaatgtggaaggcattcagcagtttcagcttagaggaaaacctaaagctaaatacctcgttcgactgaaaggaaacaagaaaggagcatctatgttgaaaattctagctaccacaaggcctactaagcagtcatttccctctcttcctgaagacacaagaatcaaagcctttgacaagctccgtacctgttcctcagccaccgtggcttggctaggcactcaggaaaggaacaagttttgcatctacaaaaaagaagtggatgataactacaatgaagaccagaagaaaagagagcaaaaccaatgtctaggaccagatataaggaagaagtcagaaaaggtcctctgtaaatatttccacagtcaaaacctgcagaaagcagtgaccacagaaacaattaaaggtcttcagcctggcaaatcttacctgctggatgtttatgtcataggacatggggggcactctgtaaagtatcagagtaaggttgtgaaaactagaaagttctgttagttaccttcttatagagatatattatgtagaactccaggagggacattaaatcactttaagtataaactgactactcccacagttgagagaagttgtgacctgtacttgtactatggaaggaaggatatcaacgtgtgtatattgatgtttatataagtaactcttgaaggagacttgttctagcgtgccccatggtacctagtgtgtgtctgatgccggttggtgtcaaagatagagggcttcttgaaggaacttgccattccttgctttgaccactgcatgaactgcttctaaattattttattacctaaaaatttaaaatatgccattcattgcacacacccacaaatgcaaatcattcctctctgtagatgctaggatatatataaattattttataaattcttgttttaaatgtcagtgtttctatgattgtaaactattaaattcttttcctattaaagtacagatctaatctaagtattattaagttgatagccctctagtcagttatattgctattgtaaattcttgtttgttgagtaaaatgtttaaatactatatgtatctcatgtacaaagttgacatacattatattcatgtacataaaattaaagagattagattatatactgttcattttcccaagca

SEQ ID NO: 891 - DNA, 1208 bp, Homo sapiens
  source 1..1208: mol_type = genomic DNA
tccagagaccacatctgcagctcccaaaacaaggtctgttctgcagctggacaattcactgctaaaatcccaaacctaagagcagagccaaagccagaggagaggaaagtgacaatagggccaaagcctcattccagattccaaatgtcattctgtagccctcgtgctatcaactgctgcctgctggctgcagccaggtccctgggtccatacacagcctgcatcaagagcctgcagagactcgggggctggagatgggaaacagatggtggcctgcgctttgtctttcccaagtttacagcctcacctgggggtggaggctgttctgaggggcccccaagaggtcccatacaggcccccaccatgaagggtttcacagccactctcttcctctggactctgatttttcccagctgcagtggaggcggcggtgggaaagcctggcccacacacgtggtctgtagcgacagcggcttggaagtgctctaccagagttgcgatccattacaagattttggcttttctgttgaaaagtgttccaagcaattaaaatcaaatatcaacattagatttggaattattctgagagaggacatcaaagagctttttcttgacctagctctcatgtctcaaggctcatctgttttgaatttctcctatcccatctgtgaggcggctctgcccaagttttctttctgtggaagaaggaaaggagagcagatttactatgctgggcctgtcaataatcctgaatttactattcctcagggagaataccaggttttgctggaactgtacactgaaaaacggtccaccgtggcctgtgccaatgctactatcatgtgctcctgactgtggcctgtagcaaaaatcacagccagctgcatctcgtgggacctccaagctcctctgactgaacctactgtgggaggagaagcagctgatgacagagagaggctctacaaagaagcgcccccaaagagtgcagctgctaattttagtcccaggaccagacatccccagactccacagatgtaatgaagtccccgaatgtatctgtttctaaggagcctcttggcagtccttaagcagtcttgagggtccatcctttttctctaattggtcgcctcccaccagactcacctgcttttcaactttttaggagtgcttcctcacagttaccaagaataaagaaagctggccaccat

SEQ ID NO: 892 - DNA, 4598 bp, Homo sapiens
  source 1..4598: mol_type = genomic DNA
agctagaagggagcgggagggggctccgggcgccgcgcagcagacctgctccggccgcgcgcctcgccgctgtcctccgggagcggcagcagtagcccgggcggcgagggctgggggttcctcgagactctcagaggggcgcctcccatcggcgcccaccaccccaacctgttcctcgcgcgccactgcgctgcgccccaggacccgctgcccaacatggattttctcctggcgctggtgctggtatcctcgctctacctgcaggcggccgccgagttcgacgggaggtggcccaggcaaatagtgtcatcgattggcctatgtcgttatggtgggaggattgactgctgctggggctgggctcgccagtcttggggacagtgtcagcctgtgtgccaaccacgatgcaaacatggtgaatgtatcgggccaaacaagtgcaagtgtcatcctggttatgctggaaaaacctgtaatcaagatctaaatgagtgtggcctgaagccccggccctgtaagcacaggtgcatgaacacttacggcagctacaagtgctactgtctcaacggatatatgctcatgccggatggttcctgctcaagtgccctgacctgctccatggcaaactgtcagtatggctgtgatgttgttaaaggacaaatacggtgccagtgcccatcccctggcctgcagctggctcctgatgggaggacctgtgtagatgttgatgaatgtgctacaggaagagcctcctgccctagatttaggcaatgtgtcaacacttttgggagctacatctgcaagtgtcataaaggcttcgatctcatgtatattggaggcaaatatcaatgtcatgacatagacgaatgctcacttggtcagtatcagtgcagcagctttgctcgatgttataacatacgtgggtcctacaagtgcaaatgtaaagaaggataccagggtgatggactgacttgtgtgtatatcccaaaagttatgattgaaccttcaggtccaattcatgtaccaaagggaaatggtaccattttaaagggtgacacaggaaataataattggattcctgatgttggaagtacttggtggcctccgaagacaccatatattcctcctatcattaccaacaggcctacttctaagccaacaacaagacctacaccaaagccaacaccaattcctactccaccaccaccaccacccctgccaacagagctcagaacacctctaccacctacaaccccagaaaggccaaccaccggactgacaactatagcaccagctgccagtacacctccaggagggattacagttgacaacagggtacagacagaccctcagaaacccagaggagatgtgttcattccacggcaaccttcaaatgacttgtttgaaatatttgaaatagaaagaggagtcagtgcagacgatgaagcaaaggatgatccaggtgttctggtacacagttgtaattttgaccatggactttgtggatggatcagggagaaagacaatgacttgcactgggaaccaatcagggacccagcaggtggacaatatctgacagtgtcggcagccaaagccccagggggaaaagctgcacgcttggtgctacctctcggccgcctcatgcattcaggggacctgtgcctgtcattcaggcacaaggtgacggggctgcactctggcacactccaggtgtttgtgagaaaacacggtgcccacggagcagccctgtggggaagaaatggtggccatggctggaggcaaacacagatcaccttgcgaggggctgacatcaagagcgtcgtcttcaaaggtgaaaaaaggcgtggtcacactggggagattggattagatgatgtgagcttgaaaaaaggccactgctctgaagaacgctaacaactccagaactaacaatgaactcctatgttgctctatcctctttttccaattctcatcttctctcctcttctcccttttatcaggcctaggagaagagtgggtcagtgggtcagaaggaagtctatttggtgacccaggtttttctggcctgcttttgtgcaatcccaatgaacagtgataccctccttgaaatacaggggcatcgcagacacatcaaagccatctgtgggtgttgccttccatcctgtgtctctttcaggaaggcattcagcatgcgtgagccataccatcctccatcctgattacaaggtgctccttgtagcaaattatgagagtgagttacgggagcagtttttaaaagaaatctttgcagatggctatgatgttatgtgttcggtgttgtaccatgagtagtattgacttcccttgagatatgatgtacaatgtgcttgtgaaattgacttaccctcttcacttaagttagttctggcctgacctgaactctgacttttactgccattcactttataaaataagggtgtgtaacatatcaagatacatttatttttatctgttttttttttcctgttaaagacaattatgtagagtgggcacgtaatccctccttagtagtattgtgttttgtgtaaatgtgctattgatattaagtatttacatgttccaaatatttacagactctagttgcaaggtaaagggcagcttgtgatctcaaaaaaatacatggtgaaatgtcatccagttccatgaccttatattggcagcagtaggaaattggcagaagtgttgggttgtggtaacggagtgatgaatttttttttaatggccttgagtttgatctctgcaaaggataggaaacctttaggaagacaagaaactgcagttaatttagaactgtcactgtttcaagttacactttaaaaccacagcttttaccatcataacatggctctggtaatatgtaggaagctttataaaagttttggttgattcagaaaaaggatcctgttgcagagtgagaggaagcatagggggaaactccattggaacagattttcacacaacgttttaaattgatataagtttaggcagttgtagttcataacttatgttgctcatgttgtgctgtgtcaggatgggataggaagcaagtcccatgcttagaggcatgggatgtgttggaacgggatttacacacactggaggagcagggcaagttggaattctaagatccatgaacccccaactgtatttcctccctgcatattttaccaatatattaaaaaacaatgtaacttttaaaaggcatcattcctgaggtttgtcttaatttctgattaagtaatcagaatattttctgctatttttgccaggaatcacaaagatgattaaagggttggaaaaaaagatctatgatggaaaattaaaggaactgggattattgagcctggagaagagaagactgaggggcaaaccattgatggttttcaagtatatgaagggttggcacagagagggtggcgaccagctgttctccatatgcactaagaatagaacaagaggaaactggcttagactagagtataagggagcatttcttggcaggggccattgttagaatacttcataaaaaaagaagtgtgaaaatctcagtatctctctctctttctaaaaaattagataaaaatttgtctatttaagatggttaaagatgttcttacccaaggaaaagtaacaaattatagaatttcccaaaagatgttttgatcctactagtagtatgcagtgaaaatctttagaactaaataatttggacaaggcttaatttaggcatttccctcttgacctcctaatggagagggattgaaaggggaagagcccaccaaatgctgagctcactgaaatatctctcccttatggcaatcctagcagtattaaagaaaaaaggaaactatttattccaaatgagagtatgatggacagatattttagtatctcagtaatgtcctagtgtggcggtggttttcaatgtttcttcatgttaaaggtataagcctttcatttgttcaatggatgatgtttcagatttttttttttttaagagatccttcaaggaacacagttcagagagattttcatcgggtgcattctctctgcttcgtgtgtgacaagttatcttggctgctgagaaagagtgccctgccccacaccggcagacctttccttcacctcatcagtatgattcagtttctcttatcaattggactctcccaggttccacagaacagtaatattttttgaacaataggtacaatagaaggtcttctgtcatttaacctggtaaaggcagggctggagggggaaaataaatcattaagcctttgagtaacggcagaatatatggctgtagatccatttttaatggttcatttcctttatggtcatataactgcacagctgaagatgaaaggggaaaataaatgaaaattttacttttcgatgccaatgatacattgcactaaactgatggaagaagttatccaaagtactgtataacatcttgtttattatttaatgttttctaaaataaaaaatgttagtggttttccaaatggcctaataaaaacaattatttgtaaataaaaacactgttagtaatacca

SEQ ID NO: 893 - DNA, 4244 bp, Homo sapiens
  source 1..4244: mol_type = genomic DNA
ggagacgggatcatgaagcgctcggtagccgtctggctcttggtcgggctcagcctcggtgtcccccagttcggcaaaggtgatatttgtgatcccaatccatgtgaaaatggaggtatctgtttgccaggattggctgatggttccttttcctgtgagtgtccagatggcttcacagaccccaactgttctagtgttgtggaggttggtccctgcactcctaatccatgccataatggaggaacctgtgaaataagtgaagcataccgaggggatacattcataggctatgtttgtaaatgtccccgaggatttaatgggattcactgtcagcacaacataaatgaatgcgaagttgagccttgcaaaaatggtggaatatgtacagatcttgttgctaactattcctgtgagtgcccaggcgaatttatgggaagaaattgtcaatacaaatgctcaggcccactgggaattgaaggtggaattatatcaaaccagcaaatcacagcttcctctactcaccgagctctttttggactccaaaaatggtatccctactatgcacgtcttaataagaaggggcttataaatgcgtggacagctgcagaaaatgacagatggccgtggattcagataaatttgcaaaggaaaatgagagttactggtgtgattacccaaggagccaagaggattggaagcccagagtatataaaatcctacaaaattgcctacagtaatgatggaaagacttgggcaatgtacaaagtgaaaggcaccaatgaagacatggtgtttcgtggaaacattgataacaacactccatatgctaactctttcacaccccccataaaagctcagtatgtaagactctatccccaagtttgtcgaagacattgcactttgcgaatggaacttcttggctgtgaactgtcgggttgttctgagcctctgggtatgaaatcaggacatatacaagactatcagatcactgcctccagcatcttcagaacgctcaacatggacatgttcacttgggaaccaaggaaagctcggctggacaagcaaggcaaagtgaatgcctggacctctggccacaatgaccagtcacaatggttacaggtggatcttcttgttccaaccaaagtgactggcatcattacacaaggagctaaagattttggtcatgtacagtttgttggctcctacaaactggcttacagcaatgatggagaacactggactgtataccaggatgaaaagcaaagaaaagataaggttttccagggaaattttgacaatgacactcacagaaaaaatgtcatcgaccctcccatctatgcacgacacataagaatccttccttggtcctggtacgggaggatcacattgcggtcagagctgctgggctgcacagaggaggaatgaggggaggctacatttcacaaccctcttccctatttccctaaaagtatctccatggaatgaactgtgcaaaatctgtaggaaactgaatggtttttttttttttttcatgaaaaagtgctcaaattatggtaggcaactaacggtgtttttaagggggtctaagcctgccttttcaatgatttaatttgattttattttatccgtcaaatctcttaagtaacaacacattaagtgtgaattacttttctctcattgtttcctgaattattcgcattggtagaaatatattagggaaagaaagtagccttctttttatagcaagagtaaaaaagtctcaaagtcatcaaataagagcaagagttgatagagcttttacaatcaatactcacctaattctgataaaaggaatactgcaatgttagcaataagtttttttcttctgtaatgactctacgttatcctgtttccctgtgcctaccaaacactgtcaatgtttattacaaaattttaaagaagaatatgtaacatgcagtactgatattataattctcattttactttcattatttctaataagagattatgtgacttctttttcttttagttctattctacattcttaatattgtatattacctgaataattcaatttttttctaattgaatttcctattagttgactaaaagaagtgtcatgtttactcatatatgtagaacatgactgcctatcagtagattgatctgtatttaatattcgttaattaaatctgcagttttatttttgaaggaagccataactatttaatttccaaataattgcttcataaagaatcccatactctcagtttgcacaaaagaacaaaaaatatatatgtctctttaaatttaaatcttcatttagatggtaattacatatccttatatttactttaaaaaatcggcttatttgtttattttataaaaaatttagcaaagaaatattaatatagtgctgcatagtttggccaagcatactcatcatttctttgttcagctccacatttcctgtgaaactaacatcttattgagatttgaaactggtggtagtttcccaggaaggcacaggtggagttatttgtgagaagcaaagtgtttactaatgacaaagtagtaaaccattttcaagatgaaaactgatttctatttattttgcttcaaaggtcctgaaaaaataagcaattatcataacaatttgttattgatactggaggtttcattgacatgtctctcaaattaaagctcacactgcctccataaaagtcttcaacatctaatttataagctttacaagtatttattttataaggcttagacagaattattggagttttaaattaagtgtattggaaaagaaaggatggtatgtgtatgaaatgttaagatcctacgcaacactgctatttttttcctttaatatttgtgctgcataacaaaagccactagactgttactgtcttgtctgtccatgtgttaacagcatttcttaatgatgtatatatggagtggtcttcaatcatagtgaagaatttaaagagaaagtcaattgtattggcatttttaataagaacaaaattagttcgtctaaggggactggctggccacatatttgttccttgcccatatgctttctacttcttgttcttattatgaaattatgaatttgaagcctctgaaatggtgatcagttttcaacatctttcaaaaacaaaattactatttcctccatattgccttttttagataactttaaagttaggattttaaaatatttgtaactggctaaattttaaagtcgtgacaaataattacttaggttcagaaatatacacacacttactctttagccagtttctttcaaggtttactgtcccatcagatatctagccattttcctttgcaaattacataccttcttaagagtgtatttttaagattattacttacgctttatgatgatatagtttttcaaaattatttatagcttcatatgatgttttgtaattttttctattgatacctgttttaaaaatattttccaaggaagttgattaaaattatatttgttaccttttagaaaaagcattgaaatgagtttctcttgctttttcattttccctctgctttatatgctcttcgcaatacatcatgtccaacgggatacctattgttctcatgacacccaaaattgatgagagcaaaggggtcgcaccatatggaaatgttgaaaactattgtaaagtagtattatgaagtagcttttgtgtcattcatgtcgatgacatgaaagtgaagtaaatttattctatgtaaattcacactaaaaccagtacagtaccataagtagaatacatgtaagaatcacctagtcttcactatattgagtaaatataacatgctaattttacaattaatgaaactaaacttttaaacatctccattatatctacatccttttgaaggtatttatcatagttgccaattttaattttaggattgactttctctttctgaatgacttcataaagtttggtgtgaattttgaagacttgggttactaatgattgtatctttgctagtcaacaacttatgaaatatactcaatgcgtctgatgtgtcattaagtgcagaaataactaagacacaaataacctttgcaaaccttcaagctgtgtaatattccaatgttgtttttttctttgtatatatacttatatcacgtaggatgtaaaaccagtatgaccttgtctagtctccaaacttaaaataaacttttgaaaagc

SEQ ID NO: 894 - DNA, 1333 bp, Homo sapiens
  source 1..1333: mol_type = genomic DNA
tctgggtcacatttttgtggatacagaagccaggctggagtggaccagtgagtgagttggagacatattttgttccaaaatggcatcttacctttatggagtactctttgctgttggcctctgtgctccaatctactgtgtgtccccggccaatgcccccagtgcatacccccgcccttcctccacaaagagcacccctgcctcacaggtgtattccctcaacaccgactttgccttccgcctataccgcaggctggttttggagaccccgagtcagaacatcttcttctcccctgtgagtgtctccacttccctggccatgctctcccttggggcccactcagtcaccaagacccagattctccagggcctgggcttcaacctcacacacacaccagagtctgccatccaccagggcttccagcacctggttcactcactgactgttcccagcaaagacctgaccttgaagatgggaagtgccctcttcgtcaagaaggagctgcagctgcaggcaaatttcttgggcaatgtcaagaggctgtatgaagcagaagtcttttctacagatttctccaacccctccattgcccaggcgaggatcaacagccatgtgaaaaagaagacccaagggaaggttgtagacataatccaaggccttgaccttctgacggccatggttctggtgaaccacattttctttaaagccaagtgggagaagccctttcaccctgaatatacaagaaagaacttcccattcctggtgggcgagcaggtcactgtgcatgtccccatgatgcaccagaaagagcagttcgcttttggggtggatacagagctgaactgctttgtgctgcagatggattacaagggagatgccgtggccttctttgtcctccctagcaagggcaagatgaggcaactggaacaggccttgtcagccagaacactgagaaagtggagccactcactccagaaaaggtggatagaggtgttcatccccagattttccatttctgcctcctacaatctggaaaccatcctcccgaagatgggcatccaaaatgtctttgacaaaaatgctgatttttctggaattgcaaagagagactccctgcaggtttctaaagcaacccacaaggctgtgctggatgtcagtgaagagggcactgaggccacagcagctaccaccaccaagttcatagtccgatcgaaggatggcccctcttacttcactgtctccttcaataggaccttcctgatgatgattacaaataaagccacagacggtattctctttctagggaaagtggaaaatcccactaaatcctag

SEQ ID NO: 895 - DNA, 714 bp, Homo sapiens
  source 1..714: mol_type = genomic DNA
gatccaccctgtgatctgtcacttttatatacacacaggggaggggaccgtttccatagagagggaatatcacagcccacttaggaacaataccggagaagcaggagccgagaccccggagcagccacaagttcatggggacgtgcacggggccgccctcctggccctgaagctgcgccggcctccctgagcgtttcgctgcggagggaagtccactctcggggagagatgctgatgccggtccacttcctgctgctcctgctgctgctcctggggggccccaggacaggcctcccccacaagttctacaaagccaagcccatcttcagctgcctcaacaccgccctgtctgaggctgagaagggccagtgggaggatgcatccctgctgagcaagaggagcttccactacctgcgcagcagagacgcctcttcgggagaggaggaggagggcaaagagaaaaagactttccccatctctggggccaggggtggagccagaggcacccggtacagatacgtgtcccaagcacagcccaggggaaagccacgccaggacacggccaagagtccccaccgcaccaagttcaccctgtccctcgacgtccccaccaacatcatgaacctcctcttcaacatcgccaaggccaagaacctgcgtgcccaggcggccgccaatgcccacctgatggcgcaaattgggaggaagaagtag

SEQ ID NO: 896 - DNA, 6345 bp, Homo sapiens
  source 1..6345: mol_type = genomic DNA
gctcgcgcccctgttccgcaggtgtgcggggcttgcgcccagcccgggccgcggccgccgcgcgtttcctccccgcttgcccgcccagaggcccccggccacgctcctcgccgggctccgaccccgccgcgccccctccacgcccccagcgcgctgtggccgcagccagcgcgtgtcctgagtccgccgttccggcccggggctgccggggaagttggggcgaggcgggccggggatgcgccatggccatggcccggctgggctcgtggctcggggaggcgcagtggctcgcgctggtgtcgctcttcgtcgcggccctggccacggtaggcctgtacctggcgcagtgggcgctggccagggcgcgaccccagccccagcggcgggcggtggagcctggagaggggccgcgcccggggtccgacgcgctgctctcctggatcctgacgctgggcagctggaggagccagtggcaggcggcctgggtgaccgccctgaacgaggaggccgagaggaaagggggcccacctttcctgtcctttgaggaggacccgcggcagcaggcactggagctggtggtgcaggaggtctccagcgtgctcaggtcggcggaggagaaggtggtggtctgtcacgtggtgggccaggctattcagttcttggtcagcgagacgcctgccttgggtgctggatgccggctgtacgacatgcggctctcccctttccatttacagctggagttccacatgaaggagaagagagaggacctccagattagctggtctttcatcagtgtgccggaaatggccgttaatatccagcccaaagcactgggggaggaccaggtggctgagacaagtgcgatgtctgacgttctcaaggacatcttgaagcatttggctggttctgcctctccatcagtggttctgattaccaagcccacgactgtaaaggaagctcagaacttacagtgtgctgcatctactgctcaggaatcctgtcctcctaaacctccaagggctcacgagctgaagctactggtgaggaacatccacgtcttgctgctcagcgagcccggtgcctcaggccacattaatgcagtgtgcgtcgtgcagctgaacgatcctgttcagaggttctccagcaccctgacgaaaaacactccggacctcatgtgggaagaggaattcaccttcgagttgaatgccaagtcgaaggagttacacctgcagatttcagaggctgggcgatcctcagaaggtctgctggcgacggcgacagttcctctggacttatttaagaagcagccttctgggccacagagcttcacgctgaccagcgggtctgcctgcggcagctcggtgctgggctcggtcacggcagagttctcttacatggaacctggtgaattgaaatcctggcccatccctccccctgttcctgctgcaaaaatagaaaaggaccgcacggtgatgccctgtgggactgtggtcactactgtcactgctgtgaagaccaagcctcgcgtcgacgtggggagggcgtccccgctgagctctgattctccggtgaagactcccatcaaggtgaaggtgatcgagaaggacatctctgtccaggccatcgcctgccgcagcgcccccgtcagcaaaacactctcttcttcagacacagaattgttggtgttgaatggttcggatccagtggctgaagtggccattcgacagctcagtgaatcttcaaagctgaaactcaagtcgccacggaagaaaagcactattatcatatcagggatctccaagacctcactatctcaggaccacgacgctgccctgatgcagggctacacggcctctgtggacagcacccaccaggaggacgccccatcccatccggagagggcggcagcctctgccccgccagaggaagccgagtcagcccaggcatcccttgcccccaagccccaggaggacgagctagactcctgggacttggagaaggagccacaggccgcggcatggagcagccaggtcctgctggaccccgacggtgatgagctgtcagagagctccatgagtgtcttggagccgggcactgccaaaaagcataaaggaggaattctaaggaaaggtgcaaagctgttcttccgccggcggcatcaacagaaagacccaggcatgagtcagtcacacaatgaccttgtgttcctggagcagccagagggttcccggaggaaaggcatcaccctcaccaggatcctgaacaagaagctgctctccaggcacagaaacaagaacaccatgaacggtgcccccgtggagccctgcacgtagggcctgaggtcatcacctccaagccagaagacgtgcacccatgttaactaccctcaccaggacgcagccagtgtgtccgccggatgtccagatgccccgcttgtcttgctgggtttcttccaaccatctcgtcatttaaagggaaaacaaaatctgagtctccagccaggaggcttctcccagagaggacaaaaaagcccaacttgccaccagatgctaaatgagacttgacagctgcagagcttgggctgtgctcatagctaagggttagggttcaatattagaaggagattaacattataagtgaaataatatgctctaatagattgtggagggcaggtttgagggacttagtttacctattctacactaacaagtgttgttttgggtccatgcctggaccatgtcacaaaaaggaggtgcccccctgtgctgtcactgtgaatggaaaggatgggtcacctctcttcatctgctgcttggaataaaaaatgcagctggccctgagtacagggaagtggaacataggcaggattttggattaatagagaaattttgataagaatggagacgctacgacagatgtaggaagtcatctacctttgatattagccatagaacttgaacactaactatatcctatgcatagtatgcagaacacttttctaagtttactttgagcctacttgcaagtggaagatatatatattctcacatggtttttacatttttctctatcgtgttaaaagctctaataatgctagtggagcagttgacatccagggttttttttcctgcctgtcatacttgctaaacaagagcacagcgggcctgtcagatgaagtcaggagccatacgtgaccgctcgtagaacacagtaaccaaacacatacatggattttgccaagtgctgccagtagccaaaacaaagtctttttagggcaatagaggaaattattttgtgtctcaggtgtcagtcttaggaatggaagtttaataacaaatgggccaaactcgcaggacattccttctatgagcgcttcagaattttgctgtgaacagtcctcttggacacaggttggggtgcccttgtttgggtttgttttggtggaaaacatcacaaacctggcacaccatttgaatatccctaatatcattccagtcgctttcctcatcagttgcctttctatttcagttcattcacagatctcacttctgaatgtgccacttccagtagacatgctggtcaaagagcagtcatcattggggtgaagtgttcttgacagtttaatatgattcacttttctccaaagacatgtaaaaggctgttacgaaagcttggcttctgtcatggagacggaaatgggcaagcttccttccgtagcctcttgttaatccttaaacattaaatatttcgggggtaatagagccactggtgagtaaaaacctatataaaaaccaaaattataggattttttcttttttagtaaaaaccggtatcaaaaccaaaattataggatttttttcttttttagtaaaaacctatataaaaaccaaaattataggattttttcttttttagtaaaaacctatatgaaaaccaaaattataggatttttttcttttttagtaaaaacctgtataaaaaccaaaattataggatttttttttcttcttttttagagagagagattagaaaacgacattaggaatttcactttaaaatgcgcattacaaacttcttaggtgttccaggaattatcaagtgactttaaaatgacttttccaacctgctttgtttttaaaaattatattccagttttaatcattgtaaaaaaagcacctggagtttcaaaacatgtgaatactaccaagtttctgtccccaaagtcaggcatcactgttagtcttttgggacagatgggacagatgttcactttaatgttttacttgaagttttactgctctttgccatgtggtaaaaagaggctgagacatatttaagaattccaagaggatattatgtgtcagaatttcagacactgatgagaagtttttaattgttcttttttatttgattttggaattcaggtgcactctattcaagtgcaaggatatcagaagtttttttttatttaaaaaatttttttttcgagatggagtttcactctgttgcccaggctggagtgcaatggcagcttactgcaacctccacctcctggttcaagcgattctcctgcctcagcctcccaagtagctgggattacaggcacgcgccaccacacctggctaattctatttagtagaaatggagtctcaccatgttggtcaggctggtctcgaactcctgacctcaggtgatccacccaccttggcctcccagcgtgctgggattataggcatgagccaccaggccggccccaggattttatattaagccttcttgctctcaaaaaaaaaaaaaggttttaactattccatttccagatgaatcccatgagcgctgcttactgttgaataccaaggtctagggctctgcttcctgtagacacgcacacgttgtctccatccaatggccttttctgaagttacagaaaacaccaacatgggagggagtttatgaagcaaaggcaaaggcaacacgtcggctagcttcagggtagcaccgtgagaaatgggctgtattgatactgtgaatgtttgttttccaagctgttttatacaggtttgttttttcatggtgtagggtatttatgacaaagtaaatgttgtgaaggttaaagataaattaagattatccaccaaatgctaaaaatactgatgtgtaaatcacctttatcgcctcacctcttctacaagcttttgtggcttgagggcttttgtttttggcttttgtctggatgaaagttttgcccagttgtgttttaaaaacaattcctcatgaacactaagattaattgtgtctgtatctctggaactgggtgctcatgttggttttaatgagcttgcaacccttccccgtttgctttgtttaaggaggtgcctctgttctttgtggaggagtgaaatggagctttaagtgtgtgtgtgtgttatgtgtgtttgcacacacgcgtgtgttattgtagcaataacaaaaagtagccatctccttgttccagctgaaaacctgctgtgagagttttgacagagcactttattttcgtcaagtttcaagtctgagttcaaaaccagccctgatcccttatgaccaactgctactcgaccagtcgccactcagtggccacctggtgcccgtttagatttttgcttgggttttactggccacctctatagacgagagttgcaaagttgctttgagcagagagggaaagattaatttacactgctggccaccgaaggcaggtgtttcctgggtagtaatctcacggctcttgatctggaaacttcagagtacaaattggtggatggtggaaggcaggacacgtatctctgtctgacggaaaacagacctcggggctggcgtaaaccctgctgccaggccctctccccactgccccaaaccggcctagacacgaagaccaaagcagcctgcacagggcaaggcccccgcggaatcctgcagagcaaactcaggttaacttgggtccatgaccgtttgcattcgaaacacaatacactgcctcgttctctcagttagcagctgggcagcagcgcaccattcatcatttaggcttgtggtttgttgtttactctaccaatgttatgtcgaaactgcattgtaaaaagagaagaaagtggcaggttttccaggtccacggaaaggtttggcctgacgctggagtgcggtgatgaacttacgtgacaatgattgtattcctcagtagcactttaaacgccgaagacagccctgcagcaagcctgcacacgggcttgggtgggttcctttggagaagatgtggctggaacacaaacaatctttgaaagaaataaatgtgcacacagaacacta

SEQ ID NO: 897 - DNA, 1184 bp, Homo sapiens
  source 1..1184: mol_type = genomic DNA
agccctgtccttcctagagggactggaacctaattctcctgaggctgagggagggtggagggtctcaaggcaacgctggccccacgacggagtgccaggagcactaacagtacccttagcttgctttcctcctccctcctttttattttcaagttcctttttatttctccttgcgtaacaaccttcttcccttctgcaccactgcccgtacccttacccgccccgccacctccttgctaccccactcttgaaaccacagctgttggcagggtccccagctcatgccagcctcatctcctttcttgctagcccccaaagggcctccaggcaacatggggggcccagtcagagagccggcactctcagttgccctctggttgagttggggggcagctctgggggccgtggcttgtgccatggctctgctgacccaacaaacagagctgcagagcctcaggagagaggtgagccggctgcaggggacaggaggcccctcccagaatggggaagggtatccctggcagagtctcccggagcagcactctgtcctgcacctggttcccattaacgccacctccaaggatgactccgatgtgacagaggtgatgtggcaaccagctcttaggcgtgggagaggcctacaggcccaaggatatggtgtccgaatccaggatgctggagtttatctgctgtatagccaggtcctgtttcaagacgtgactttcaccatgggtcaggtggtgtctcgagaaggccaaggaaggcaggagactctattccgatgtataagaagtatgccctcccacccggaccgggcctacaacagctgctatagcgcaggtgtcttccatttacaccaaggggatattctgagtgtcataattccccgggcaagggcgaaacttaacctctctccacatggaaccttcctggggtttgtgaaactgtgattgtgttataaaaagtggctcccagcttggaagaccagggtgggtacatactggagacagccaagagctgagtatataaaggagagggaatgtgcaggaacagaggcgtcttcctgggtttggctccccgttcctcacttttcccttttcattcccaccccctagactttgattttacggatatcttgcttctgttccccatggagctccgaattcttgcgtgtgtgtagatga

SEQ ID NO: 898 - DNA, 2391 bp, Homo sapiens
  source 1..2391: mol_type = genomic DNA
tcggcaggaagagaccgacccgccacccgccgtagcccgcgcgcccctggcactcaatccccgccatgtgggggctcctgctcgccctggccgccttcgcgccggccgtcggcccggctctgggggcgcccaggaactcggtgctgggcctcgcgcagcccgggaccaccaaggtcccaggctcgaccccggccctgcatagcagcccggcacagccgccggcggagacagctaacgggacctcagaacagcatgtccggattcgagtcatcaagaagaaaaaggtcattatgaagaagcggaagaagctaactctaactcgccccaccccactggtgactgccgggccccttgtgacccccactccagcagggaccctcgaccccgctgagaaacaagaaacaggctgtcctcctttgggtctggagtccctgcgagtttcagatagccggcttgaggcatccagcagccagtcctttggtcttggaccacaccgaggacggctcaacattcagtcaggcctggaggacggcgatctatatgatggagcctggtgtgctgaggagcaggacgccgatccatggtttcaggtggacgctgggcaccccacccgcttctcgggtgttatcacacagggcaggaactctgtctggaggtatgactgggtcacatcatacaaggtccagttcagcaatgacagtcggacctggtggggaagtaggaaccacagcagtgggatggacgcagtatttcctgccaattcagacccagaaactccagtgctgaacctcctgccggagccccaggtggcccgcttcattcgcctgctgccccagacctggctccagggaggcgcgccttgcctccgggcagagatcctggcctgcccagtctcagaccccaatgacctattccttgaggcccctgcgtcgggatcctctgaccctctagactttcagcatcacaattacaaggccatgaggaagctgatgaagcaggtacaagagcaatgccccaacatcacccgcatctacagcattgggaagagctaccagggcctgaagctgtatgtgatggaaatgtcggacaagcctggggagcatgagctgggggagcctgaggtgcgctacgtggctggcatgcatgggaacgaggccctggggcgggagttgcttctgctcctgatgcagttcctgtgccatgagttcctgcgagggaacccacgggtgacccggctgctctctgagatgcgcattcacctgctgccctccatgaaccctgatggctatgagatcgcctaccaccggggttcagagctggtgggctgggccgagggccgctggaacaaccagagcatcgatcttaaccataattttgctgacctcaacacaccactgtgggaagcacaggacgatgggaaggtgccccacatcgtccccaaccatcacctgccattgcccacttactacaccctgcccaatgccaccgtggctcctgaaacgcgggcagtaatcaagtggatgaagcggatcccctttgtgctaagtgccaacctccacgggggtgagctcgtggtgtcctacccattcgacatgactcgcaccccgtgggctgcccgcgagctcacgcccacaccagatgatgctgtgtttcgctggctcagcactgtctatgctggcagtaatctggccatgcaggacaccagccgccgaccctgccacagccaggacttctccgtgcacggcaacatcatcaacggggctgactggcacacggtccccgggagcatgaatgacttcagctacctacacaccaactgctttgaggtcactgtggagctgtcctgtgacaagttccctcacgagaatgaattgccccaggagtgggagaacaacaaagacgccctcctcacctacctggagcaggtgcgcatgggcattgcaggagtggtgagggacaaggacacggagcttgggattgctgacgctgtcattgccgtggatgggattaaccatgacgtgaccacggcgtggggcggggattattggcgtctgctgaccccaggggactacatggtgactgccagtgccgagggctaccattcagtgacacggaactgtcgggtcacctttgaagagggccccttcccctgcaatttcgtgctcaccaagactcccaaacagaggctgcgcgagctgctggcagctggggccaaggtgcccccggaccttcgcaggcgcctggagcggctaaggggacagaaggattgatacctgcggtttaagagccctagggcaggctggacctgtcaagacgggaaggggaagagtagagagggagggacaaagtgaggaaaaggtgctcattaaagctaccgggcaccttagctca

SEQ ID NO: 899 - DNA, 1239 bp, Homo sapiens
  source 1..1239: mol_type = genomic DNA
agacgttcgcacacctgggtgccagcgccccagaggtcccgggacagcccgaggcgccgcgcccgccgccccgagctccccaagccttcgagagcggcgcacactcccggtctccactcgctcttccaacacccgctcgttttggcggcagctcgtgtcccagagaccgagttgccccagagaccgagacgccgccgctgcgaaggaccaatgagagccccgctgctaccgccggcgccagtggtgctgtcgctcttgatactcggctcaggccattatgctgctggattggacctcaatgacacctactctgggaagcgtgaaccattttctggggaccacagtgctgatggatttgaggttacctcaagaagtgagatgtcttcagggagtgagatttcccctgtgagtgaaatgccttctagtagtgaaccgtcctcgggagccgactatgactactcagaagagtatgataacgaaccacaaatacctggctatattgtcgatgattcagtcagagttgaacaggtagttaagcccccccaaaacaagacggaaagtgaaaatacttcagataaacccaaaagaaagaaaaagggaggcaaaaatggaaaaaatagaagaaacagaaagaagaaaaatccatgtaatgcagaatttcaaaatttctgcattcacggagaatgcaaatatatagagcacctggaagcagtaacatgcaaatgtcagcaagaatatttcggtgaacggtgtggggaaaagtccatgaaaactcacagcatgattgacagtagtttatcaaaaattgcattagcagccatagctgcctttatgtctgctgtgatcctcacagctgttgctgttattacagtccagcttagaagacaatacgtcaggaaatatgaaggagaagctgaggaacgaaagaaacttcgacaagagaatggaaatgtacatgctatagcataactgaagataaaattacaggatatcacattggagtcactgccaagtcatagccataaatgatgagtcggtcctctttccagtggatcataagacaatggaccctttttgttatgatggttttaaactttcaattgtcactttttatgctatttctgtatataaaggtgcacgaaggtaaaaagtattttttcaagttgtaaataatttatttaatatttaatggaagtgtatttattttacagctcattaaacttttttaaccaaacagat

SEQ ID NO: 900 - DNA, 9765 bp, Homo sapiens
  source 1..9765: mol_type = genomic DNA
gagctgcctcacccccggccccgggaagggcatggccccggcaaactcccggccgtgactcgcgcgccccggctcggtggatgctcccggcgcaccgctcccgtgtgcggcggcttcccaaggacagatgcccaagcgcgcgcactggggggccctctccgtggtgctgatcctgctttggggccatccgcgagtggcgctggcctgcccgcatccttgtgcctgctacgtccccagcgaggtccactgcacgttccgatccctggcttccgtgcccgctggcattgctaaacacgtggaaagaatcaatttggggtttaatagcatacaggccctgtcagaaacctcatttgcaggactgaccaagttggagctacttatgattcacggcaatgagatcccaagcatccccgatggagctttaagagacctcagctctcttcaggttttcaagttcagctacaacaagctgagagtgatcacaggacagaccctccagggtctctctaacttaatgaggctgcacattgaccacaacaagatcgagtttatccaccctcaagctttcaacggcttaacgtctctgaggctactccatttggaaggaaatctcctccaccagctgcaccccagcaccttctccacgttcacatttttggattatttcagactctccaccataaggcacctctacttagcagagaacatggttagaactcttcctgccagcatgcttcggaacatgccgcttctggagaatctttacttgcagggaaatccgtggacctgcgattgtgagatgagatggtttttggaatgggatgcaaaatccagaggaattctgaagtgtaaaaaggacaaagcttatgaaggcggtcagttgtgtgcaatgtgcttcagtccaaagaagttgtacaaacatgagatacacaagctgaaggacatgacttgtctgaagccttcaatagagtcccctctgagacagaacaggagcaggagtattgaggaggagcaagaacaggaagaggatggtggcagccagctcatcctggagaaattccaactgccccagtggagcatctctttgaatatgaccgacgagcacgggaacatggtgaacttggtctgtgacatcaagaaaccaatggatgtgtacaagattcacttgaaccaaacggatcctccagatattgacataaatgcaacagttgccttggactttgagtgtccaatgacccgagaaaactatgaaaagctatggaaattgatagcatactacagtgaagttcccgtgaagctacacagagagctcatgctcagcaaagaccccagagtcagctaccagtacaggcaggatgctgatgaggaagctctttactacacaggtgtgagagcccagattcttgcagaaccagaatgggtcatgcagccatccatagatatccagctgaaccgacgtcagagtacggccaagaaggtgctactttcctactacacccagtattctcaaacaatatccaccaaagatacaaggcaggctcggggcagaagctgggtaatgattgagcctagtggagctgtgcaaagagatcagactgtcctggaagggggtccatgccagttgagctgcaacgtgaaagcttctgagagtccatctatcttctgggtgcttccagatggctccatcctgaaagcgcccatggatgacccagacagcaagttctccattctcagcagtggctggctgaggatcaagtccatggagccatctgactcaggcttgtaccagtgcattgctcaagtgagggatgaaatggaccgcatggtatatagggtacttgtgcagtctccctccactcagccagccgagaaagacacagtgacaattggcaagaacccaggggagtcggtgacattgccttgcaatgctttagcaatacccgaagcccaccttagctggattcttccaaacagaaggataattaatgatttggctaacacatcacatgtatacatgttgccaaatggaactctttccatcccaaaggtccaagtcagtgacagtggttactacagatgtgtggctgtcaaccagcaaggggcagaccattttacggtgggaatcacagtgaccaagaaagggtctggcttgccatccaaaagaggcagacgcccaggtgcaaaggctctttccagagtcagagaagacatcgtggaggatgaagggggctcgggcatgggagatgaagagaacacttcaaggagacttctgcatccaaaggaccaagaggtgttcctcaaaacaaaggatgatgccatcaatggagacaagaaagccaagaaagggagaagaaagctgaaactctggaagcattcggaaaaagaaccagagaccaatgttgcagaaggtcgcagagtgtttgaatctagacgaaggataaacatggcaaacaaacagattaatccggagcgctgggctgatattttagccaaagtccgtgggaaaaatctccctaagggcacagaagtacccccattgattaaaaccacaagtcctccatccttgagtctagaagtcacaccaccttttcctgctatttctcccccctcagcatctcctgtgcagacagtaaccagtgctgaagaatcctcagcagatgtacctctacttggtgaagaagagcacgttttgggtaccatttcctcagccagcatggggctagaacacaaccacaatggagttattcttgttgaacctgaagtaacaagcacacctctggaggaagttgttgatgacctttccgagaagactgaggagataacttccactgaaggagacctgaaggggacagcagcccctacacttatatctgagccttatgaaccatctcctactctgcacacattagacacagtctatgaaaagcccacccatgaagagacggcaacagagggttggtctgcagcagatgttggatcgtcaccagagcccacatccagtgagtatgagcctccattggatgctgtctccttggctgagtctgagcccatgcaatactttgacccagatttggagactaagtcacaaccagatgaggataagatgaaagaagacacctttgcacaccttactccaacccccaccatctgggttaatgactccagtacatcacagttatttgaggattctactataggggaaccaggtgtcccaggccaatcacatctacaaggactgacagacaacatccaccttgtgaaaagtagtctaagcactcaagacaccttactgattaaaaagggtatgaaagagatgtctcagacactacagggaggaaatatgctagagggagaccccacacactccagaagttctgagagtgagggccaagagagcaaatccatcactttgcctgactccacactgggtataatgagcagtatgtctccagttaagaagcctgcggaaaccacagttggtaccctcctagacaaagacaccacaacagcaacaacaacaccaaggcaaaaagttgctccgtcatccaccatgagcactcacccttctcgaaggagacccaacgggagaaggagattacgccccaacaaattccgccaccggcacaagcaaaccccacccacaacttttgccccatcagagactttttctactcaaccaactcaagcacctgacattaagatttcaagtcaagtggagagttctctggttcctacagcttgggtggataacacagttaatacccccaaacagttggaaatggagaagaatgcagaacccacatccaagggaacaccacggagaaaacacgggaagaggccaaacaaacatcgatataccccttctacagtgagctcaagagcgtccggatccaagcccagcccttctccagaaaataaacatagaaacattgttactcccagttcagaaactatacttttgcctagaactgtttctctgaaaactgagggcccttatgattccttagattacatgacaaccaccagaaaaatatattcatcttaccctaaagtccaagagacacttccagtcacatataaacccacatcagatggaaaagaaattaaggatgatgttgccacaaatgttgacaaacataaaagtgacattttagtcactggtgaatcaattactaatgccataccaacttctcgctccttggtctccactatgggagaatttaaggaagaatcctctcctgtaggctttccaggaactccaacctggaatccctcaaggacggcccagcctgggaggctacagacaggcatacctgttaccacttctggggaaaatcttacagaccctccccttcttaaagagcttgaggatgtggatttcacttccgagtttttgtcctctttgacagtctccacaccatttcaccaggaagaagctggttcttccacaactctctcaagcataaaagtggaggtggcttcaagtcaggcagaaaccaccacccttgatcaagatcatcttgaaaccactgtggctattctcctttctgaaactagaccacagaatcacacccctactgctgcccggatgaaggagccagcatcctcgtccccatccacaattctcatgtctttgggacaaaccaccaccactaagccagcacttcccagtccaagaatatctcaagcatctagagattccaaggaaaatgttttcttgaattatgtggggaatccagaaacagaagcaaccccagtgaacaatgaaggaacacagcatatgtcagggccaaatgaattatcaacaccctcttccgaccaggatgcatttaacttgtctacaaagctggaattggaaaagcaagtatttggtagtaggagtctaccacgtggcccagatagccaacgccaggatggaagagttcatgcttctcatcaactaaccagagtccctgccaaacccatcctaccaacagcaacagtgaggctgcctgaaatgtccacacaaagcgcttccagatactttgtaacttcccagtcacctcgtcactggaccaacaaaccggaaataactacatatccttctggggctttgccagagaacaaacagtttacaactccaagattatcaagtacaacaattcctctcccattgcacatgtccaaacccagcattcctagtaagtttactgaccgaagaactgaccaattcaatggctactccaaagtgtttggaaataacaacatccctgaggcaagaaacccagttggaaagcctcccagtccaagaattcctcattattccaatggaagactccctttctttaccaacaagactctttcttttccacagttgggagtcacccggagaccccagatacccacttctcctgccccagtaatgagagagagaaaagttattccaggttcctacaacaggatacattcccatagcaccttccatctggactttggccctccggcacctccgttgttgcacactccgcagaccacgggatcaccctcaactaacttacagaatatccctatggtctcttccacccagagttctatctcctttataacatcttctgtccagtcctcaggaagcttccaccagagcagctcaaagttctttgcaggaggacctcctgcatccaaattctggtctcttggggaaaagccacaaatcctcaccaagtccccacagactgtgtccgtcaccgctgagacagacactgtgttcccctgtgaggcaacaggaaaaccaaagcctttcgttacttggacaaaggtttccacaggagctcttatgactccgaataccaggatacaacggtttgaggttctcaagaacggtaccttagtgatacggaaggttcaagtacaagatcgaggccagtatatgtgcaccgccagcaacctgcacggcctggacaggatggtggtcttgctttcggtcaccgtgcagcaacctcaaatcctagcctcccactaccaggacgtcactgtctacctgggagacaccattgcaatggagtgtctggccaaagggaccccagccccccaaatttcctggatcttccctgacaggagggtgtggcaaactgtgtcccccgtggagggccgcatcaccctgcacgaaaaccggaccctttccatcaaggaggcgtccttctcagacagaggcgtctataagtgcgtggccagcaatgcagccggggcggacagcctggccatccgcctgcacgtggcggcactgccccccgttatccaccaggagaagctggagaacatctcgctgcccccggggctcagcattcacattcactgcactgccaaggctgcgcccctgcccagcgtgcgctgggtgctcggggacggtacccagatccgcccctcgcagttcctccacgggaacttgtttgttttccccaacgggacgctctacatccgcaacctcgcgcccaaggacagcgggcgctatgagtgcgtggccgccaacctggtaggctccgcgcgcaggacggtgcagctgaacgtgcagcgtgcagcagccaacgcgcgcatcacgggcacctccccgcggaggacggacgtcaggtacggaggaaccctcaagctggactgcagcgcctcgggggacccctggccgcgcatcctctggaggctgccgtccaagaggatgatcgacgcgctcttcagttttgatagcagaatcaaggtgtttgccaatgggaccctggtggtgaaatcagtgacggacaaagatgccggagattacctgtgcgtagctcgaaataaggttggtgatgactacgtggtgctcaaagtggatgtggtgatgaaaccggccaagattgaacacaaggaggagaacgaccacaaagtcttctacgggggtgacctgaaagtggactgtgtggccaccgggcttcccaatcccgagatctcctggagcctcccagacgggagtctggtgaactccttcatgcagtcggatgacagcggtggacgcaccaagcgctatgtcgtcttcaacaatgggacactctactttaacgaagtggggatgagggaggaaggagactacacctgctttgctgaaaatcaggtcgggaaggacgagatgagagtcagagtcaaggtggtgacagcgcccgccaccatccggaacaagacttacttggcggttcaggtgccctatggagacgtggtcactgtagcctgtgaggccaaaggagaacccatgcccaaggtgacttggttgtccccaaccaacaaggtgatccccacctcctctgagaagtatcagatataccaagatggcactctccttattcagaaagcccagcgttctgacagcggcaactacacctgcttggtcaggaacagcgcgggagaggataggaagacggtgtggattcacgtcaacgtccagccacccaagatcaacggtaaccccaaccccatcaccactgtgcgggagatagcagccgggggcagtcggaaactgattgactgcaaagctgaaggcatccccaccccgagggtgttatgggcttttcccgagggtgtggttctgccagctccatactatggaaaccggatcactgtccatggcaacggttccctggacatcaggagtttgaggaagagcgactccgtccagctggtatgcatggcacgcaacgagggaggggaggccaggttgatcctgcagctcactgtcctggagcccatggagaaacccatcttccacgacccgatcagcgagaagatcacggccatggcgggccacaccatcagcctcaactgctctgccgcggggaccccgacacccagcctggtgtgggtccttcccaatggcaccgatctgcagagtggacagcagctgcagcgcttctaccacaaggctgacggcatgctacacattagcggtctctcctcggtggacgccggggcctaccgctgcgtggcccgcaatgccgctggccacacggagaggctggtctccctgaaggtgggactgaagccagaagcaaacaagcagtatcataacctggtcagcatcatcaatggtgagaccctgaagctcccctgcacccctcccggggctgggcagggacgtttctcctggacgctccccaatggcatgcatctggagggcccccaaaccctgggacgcgtttctcttctggacaatggcaccctcacggttcgtgaggcctcggtgtttgacaggggtacctatgtatgcaggatggagacggagtacggcccttcggtcaccagcatccccgtgattgtgatcgcctatcctccccggatcaccagcgagcccaccccggtcatctacacccggcccgggaacaccgtgaaactgaactgcatggctatggggattcccaaagctgacatcacgtgggagttaccggataagtcgcatctgaaggcaggggttcaggctcgtctgtatggaaacagatttcttcacccccagggatcactgaccatccagcatgccacacagagagatgccggcttctacaagtgcatggcaaaaaacattctcggcagtgactccaaaacaacttacatccacgtcttctgaaatgtggattccagaatgattgcttaggaactgacaacaaagcggggtttgtaagggaagccaggttggggaataggagctcttaaataatgtgtcacagtgcatggtggcctctggtgggtttcaagttgaggttgatcttgatctacaattgttgggaaaaggaagcaatgcagacacgagaaggagggctcagccttgctgagacactttcttttgtgtttacatcatgccaggggcttcattcagggtgtctgtgctctgactgcaatttttctttttttgcaaatgccactcgactgccttcataagcgtccataggatatctgaggaacattcatcaaaaataagccatagacatgaacaacacctcactaccccattgaagacgcatcacctagttaacctgctgcagtttttacatgatagactttgttccagattgacaagtcatctttcagttatttcctctgtcacttcaaaactccagcttgcccaataaggatttagaaccagagtgactgatatatatatatattttaattcagagttacatacatacagctaccattttatatgaaaaaagaaaaacatttcttcctggaactcactttttatataatgttttatatatatattttttcctttcaaatcagacgatgagactagaaggagaaatactttctgtcttattaaaattaataaattattggtctttacaagacttggatacattacagcagacatggaaatataattttaaaaaatttctctccaacctccttcaaattcagtcaccactgttatattaccttctccaggaaccctccagtggggaaggctgcgatattagatttccttgtatgcaaagtttttgttgaaagctgtgctcagaggaggtgagaggagaggaaggagaaaactgcatcataactttacagaattgaatctagagtcttccccgaaaagcccagaaacttctctgcagtatctggcttgtccatctggtctaaggtggctgcttcttccccagccatgagtcagtttgtgcccatgaataatacacgacctgttatttccatgactgctttactgtatttttaaggtcaatatactgtacatttgataataaaataatattctcccaaaaa

SEQ ID NO: 901 - DNA, 5508 bp, Homo sapiens
  source 1..5508: mol_type = genomic DNA
gcgttccttgcggcccggccgacctcgcgggcttgggcctgggcgggcaccgacggagcggccctggctgcagcctcccggcgccagcgaagacaggctgagatgcggctgctcctgctcgtgccgctgctgctggctccagcgcccgggtcctcggctcccaaggtgaggcggcagagtgacacctggggaccctggagccagtggagcccctgcagccggacctgtggagggggtgtcagcttccgggagcgcccctgctactcccagaggagagatggaggctccagctgcgtgggccccgcccggagccaccgctcttgtcgcacggagagctgccccgacggcgcccgggacttccgggccgagcagtgcgcggagttcgacggagcggagttccaggggcggcggtatcggtggctgccctactacagcgccccaaacaagtgtgaactgaactgcattcccaagggggagaacttctactacaagcacagggaggctgtggttgatgggacgccctgcgagcctggcaagagggatgtctgtgtggatggcagctgccgggttgtcggctgtgatcacgagctggactcgtccaagcaggaggacaagtgtctgcggtgtgggggtgacggcacgacctgctaccccgtcgcaggcacctttgacgctaatgacctcagccgaggctacaaccagatcctcatagttcccatgggtgccaccagcatcctcatcgacgaggctgctgccagcaggaacttcctggctgtgaagaatgttcgtggggaatactacctcaatgggcactggaccatcgaggcggcccgggccctgccagcagccagcaccatcctgcattacgagcggggtgctgagggggacctggcccctgagcgactccatgcccggggccccacctcggagcccctggtcatcgagctcatcagccaggagcccaaccccggtgtgcactatgagtaccacctgcccctgcgccgccccagccccggcttcagctggagccacggctcatggagtgactgcagcgcggagtgtggcggaggtcaccagtcccgcctggtgttctgcaccatcgaccatgaggcctaccccgaccacatgtgccagcgccagccacggccagctgaccggcgttcctgcaatcttcacccttgcccggagaccaagcgctggaaggcagggccatgggcaccctgctcagcctcctgtggaggaggctcccagtcccgctccgtgtactgcatctcgtctgacggggccggcatccaggaggccgtggaggaggctgagtgtgccgggctgcctgggaagccccctgccattcaggcctgtaacctgcagcgctgtgcagcctggagcccggagccctggggagagtgttctgtcagttgtggcgttggcgtccggaagcggagcgttacttgccggggtgaaaggggttctttgctccataccgcagcgtgctccttggaagaccggccacctctgactgagccctgtgtgcatgaggactgccccctcctcagtgaccaggcctggcatgttggcacctggggtctatgctccaagagctgcagctcgggcactcggaggcgacaggtcatctgtgccattgggccgcccagccactgcgggagcctgcagcactccaagcctgtggatgtggagccttgtaacacgcagccctgtcatctcccccaggaggtccccagcatgcaggatgtgcacacccctgccagcaacccctggatgccgttgggccctcaggagtcccctgcctcagactccagaggccagtggtgggcagcccaggaacacccctcagccaggggtgaccacaggggagaacgaggtgaccccaggggcgaccaaggcacccacctgtcagccctgggccccgctccctctctgcagcagcccccataccagcaacccctgcggtcgggctcagggccccacgactgcagacacagtcctcacgggtgctgccccgatggccacacggcatctctcgggcctcagtggcaaggctgccctggggccccctgtcagcagagcaggtacgggtgctgccctgacagggtatctgtcgctgaggggccccatcacgctggctgcacaaagtcgtatggtggtgacagcaccgggggcatgcccaggtcaagggcagtggcttctacagtccacaacacccaccagccccaggcccagcagaatgagcccagtgagtgccggggctcccagtttggctgttgctatgacaacgtggccactgcagccggtcctcttggggaaggctgtgtgggccagcccagccatgcctaccccgtgcggtgcctgctgcccagtgcccatggctcttgcgcagactgggctgcccgctggtacttcgttgcctctgtgggccaatgtaaccgcttctggtatggcggctgccatggcaatgccaataactttgcctcggagcaagagtgcatgagcagctgccagggatctctccatgggccccgtcgtccccagcctggggcttctggaaggagcacccacacggatggtggcggcagcagtcctgcaggcgagcaggaacccagccagcacaggacaggggccgcggtgcagagaaagccctggccttctggtggtctctggcggcaagaccaacagcctgggccaggggaggccccccacacccaggcctttggagaatggccatgggggcaggagcttgggtccagggcccctggactgggtggagatgccggatcaccagcgccacccttccacagctcctcctacaggattagcttggcaggtgtggagccctcgttggtgcaggcagccctggggcagttggtgcggctctcctgctcagacgacactgccccggaatcccaggctgcctggcagaaagatggccagcccatctcctctgacaggcacaggctgcagttcgacggatccctgatcatccaccccctgcaggcagaggacgcgggcacctacagctgtggcagcacccggccaggccgcgactcccagaagatccaacttcgcatcatagggggtgacatggccgtgctgtctgaggctgagctgagccgcttccctcagcccagggacccagctcaggactttggccaagcgggggctgctgggcccctgggggccatcccctcttcacacccacagcctgcaaacaggctgcgtttggaccagaaccagccccgggtggtggatgccagtccaggccagcggatccggatgacctgccgtgccgaaggcttcccgcccccagccatcgagtggcagagagatgggcagcctgtctcttctcccagcacccaccgcccagcccagggaccctggcagggactgcgtcgaccagccagagctggccaactgtgatttgatcctgcaggcccagctttgtggcaatgagtattactccagcttctgctgtgccagctgttcacgtttccagcctcacgctcagcccatctggcagtagggatgaaggctagttccagccccagtccaaaatagttcatagggctagggagaaaggaagatggactcttggcttcctctctctggctggcaaagggagttatcttctggaatacattagctctttcaaaaacccacccagtgtttagcctcaacggcagccagttaccagcttctctctgtagccttcagcagtgtttgcatctctgacataaccacaggctgctgttttcaagaagagcaatctgtttggataagaaaaacctttactttacagcttccctttataatttgttacacaggaatagttaaatgcatttgtttgtttgttttttgagacagagtttcactcttgttgcccaggctggagggcaatggcgcgatctcagctcactgcaacctccgtctcctgggttcttgattctcctgtgtcagccttctgagtagctaggattacagatgcctatcaccatgcctgggtaatttttgtatttttagttgagatggggtttcaccatgttggccaggctggtctcgaacttctgacctcagatgatctgcccgcctcagcctcccaaagtgctgggattacaggcatgagccaccacgcccagccatcaatgcattttttttattttttttttgagacagagtttcgcacttcttgcccaggctggagtacaatggtgcgatcttggctcactgcaacctccacctcctgggttcaagcgcttctccagcctcagcctcctgagtagctgggattacaggtatgtgccaccatgcctggctaattttgtatttttagtagagacggggtttctccatgttggtcagactggtcttgaactcccgacctcaggtaatccgcccgcctcggcctcccaaaatgctgggattagaggtgtgagccactgtgcccagcccatcaatgtgttttaaagctagctgtcagggttccacttaatttaaagctgggcagggagatgtgtaatgatttcaaagttaacacctgtttgttttctaaagggcatgccaagtcctgctgtatcagggaagtattctgtgctaaaatcagcgatggttcattgctctagtctctctcacccttctaggcagtgcatcagtcagctctaaatctggtgcagagggttaacagcataacccttgttggcaaaatggaatagatgttaagacctcaaatagggatttgggatgaaacagctgcagttagcactgttatctgagcatgaaagaactggaaacgctccttacgtcgagatgttggaccttgaagccctcctgaggccaacatgcaaatctggctgtgacggttcatctgacacctgtgtaaagctgaccagcctgctctgtacagtgacaatgaggagcccctctcttccttaagtaggaatctgtgaagcaaaatgtttgctgccaaagacaaatcagactgtcagtcattaaaaacagcattagcaggatgaggatagcaatggggaagggttgtgggcaatgcagtaacagggaaatggcttcagaaatggtttgagttggaagacaacattcttcatctctcaggacttctaattccttgatgctaaaagaagaggcatggattctatgagcttccaagtccctttccactttaaccttctacaaatctttcagaggactgcctagtagcaaaggttattcctggacacaggaaagacgggcattacagggaccaaagctctgaaaggtgacttttattaccaacacactggctggaaaagggacaaaccacatcacgggtgagtgatacttctcagtcttctctactcattcaacaaaggaaatgtgggctggggcagaggtcttttttcatttaatactggaaaaatattgaagagcatccatgttcacttatggctggttttgctatagaaattggaaaataaaggccacttttttgaaatccccagtttaatt

SEQ ID NO: 902 - DNA, 1326 bp, Homo sapiens
  source 1..1326: mol_type = genomic DNA
agctaccagtttggacggctgcttcccaccagcaaagaccacgactggagagccgagccggaggcagctgggaaacatgaagagcgtcttgctgctgaccacgctcctcgtgcctgcacacctggtggccgcctggagcaataattatgcggtggactgccctcaacactgtgacagcagtgagtgcaaaagcagcccgcgctgcaagaggacagtgctcgacgactgtggctgctgccgagtgtgcgctgcagggcggggagaaacttgctaccgcacagtctcaggcatggatggcatgaagtgtggcccggggctgaggtgtcagccttctaatggggaggatccttttggtgaagagtttggtatctgcaaagagcatgacatggcatctggagatggcaatattgtgagagaagaagttgtgaaagagaatgctgccgggtctcccgtaatgaggaaatggttaaatccacgctgatcccggctgtgatttctgagagaaggctctattttcgtgattgttcaacacacagccaacattttaggaactttctagattatagcataaggacatgtaatttttgaagaccaaatgtgatgcatggtggatccagaaaacaaaaagtaggatacttacaatccataacatccatatgactgaacacttgtatgtgtttgttaaatattcgaatgcatgtagatttgttaaatgtgtgtgtatagtaacactgaagaactaaaaatgcaatttaggtaatcttacgtggagacaggtcaaccaaagagggagctaggcaaagctgaagaccgcagtgagtcaaattagttctttgactttgatgtacattaatgttgggatatggaatgaagacttaagagcaggagaagatggggagggggtgggagtgggaaataaaatatttagcccttccttggtaggtagcttctctagaatttaattgtgcttttttttttttttttggctttgggaaaagtcaaaataaaacaaccagaaaacccctgaaggaagtaagatgtttgaagcttatggaaatttgagtaacaaacagctttgaactgagagcaatttcaaaaggctgctgatgtagttcccgggttacctgtatctgaaggacggttctggggcataggaaacacatacacttccataaatagctttaacgtatgccacctcagagataaatctaagaagtattttacccactggtggtttgtgtgtgtatgaaggtaaatatttatatatttttataaataaatgtgttagtgcaagtcatcttccctacccatatttatcatcctctt

SEQ ID NO: 903 - DNA, 2169 bp, Homo sapiens
  source 1..2169: mol_type = genomic DNA
ggaaattgatgacgggaaagcatgcgggcaacccagtgtataaaactcataaacgtgtaggcagaggctcagctaccagtttggacggctgcttcccaccagcaaagaccacgactggagagccgagccggaggcagctgggaaacatgaagagcgtcttgctgctgaccacgctcctcgtgcctgcacacctggtggccgcctggagcaataattatgcggtggactgccctcaacactgtgacagcagtgagtgcaaaagcagcccgcgctgcaagaggacagtgctcgacgactgtggctgctgccgagtgtgcgctgcagggcggggagaaacttgctaccgcacagtctcaggcatggatggcatgaagtgtggcccggggctgaggtgtcagccttctaatggggaggatccttttggtgaagagtttggtatctgcaaagactgtccctacggcaccttcgggatggattgcagagagacctgcaactgccagtcaggcatctgtgacagggggacgggaaaatgcctgaaattccccttcttccaatattcagtaaccaagtcttccaacagatttgtttctctcacggagcatgacatggcatctggagatggcaatattgtgagagaagaagttgtgaaagagaatgctgccgggtctcccgtaatgaggaaatggttaaatccacgctgatcccggctgtgatttctgagagaaggctctattttcgtgattgttcaacacacagccaacattttaggaactttctagattatagcataaggacatgtaatttttgaagaccaaatgtgatgcatggtggatccagaaaacaaaaagtaggatacttacaatccataacatccatatgactgaacacttgtatgtgtttgttaaatattcgaatgcatgtagatttgttaaatgtgtgtgtatagtaacactgaagaactaaaaatgcaatttaggtaatcttacgtggagacaggtcaaccaaagagggagctaggcaaagctgaagaccgcagtgagtcaaattagttctttgactttgatgtacattaatgttgggatatggaatgaagacttaagagcaggagaagatggggagggggtgggagtgggaaataaaatatttagcccttccttggtaggtagcttctctagaatttaattgtgcttttttttttttttttggctttgggaaaagtcaaaataaaacaaccagaaaacccctgaaggaagtaagatgtttgaagcttatggaaatttgagtaacaaacagctttgaactgagagcaatttcaaaaggctgctgatgtagttcccgggttacctgtatctgaaggacggttctggggcataggaaacacatacacttccataaatagctttaacgtatgccacctcagagataaatctaagaagtattttacccactggtggtttgtgtgtgtatgaaggtaaatatttatatatttttataaataaatgtgttagtgcaagtcatcttccctacccatatttatcatcctcttgaggaaagaaatctagtattatttgttgaaaatggttagaataaaactatgactctataaggttttcaaacatctgaggcatgataaatttattatccataattatagtaataataaccttaataagcataagaaaaacagagtcactctggatttcaaaaatgtcaaaaaatgagcaacagagggtccttatttaaacataagtgctgtgacttaggtgaattttcaatttaaggtagaaaataagtttttaggaggtttgtaaaagaagaatcaattttcagcagaaaacatgtcaactttaaaatatagtttattttcatatttttttcttttaaacttggttgataagtggaattaggagtatatttgaaagaatcttagcacaaacaggactgttgtactagatgttcttaggaaatatctcagaagtattttatttgaagtgaagaacttatttaagaattatttcagtatttacctgtattttattcttgaagttggccaacagagttgtgaatgtgtgtgggaaggcctttgaatgtaaagctgcataagctgttaggttttgttttaaaaggacatgtttattattgttcaataaaaaagaacaagatacagct

SEQ ID NO: 904 - DNA, 823 bp, Homo sapiens
  source 1..823: mol_type = genomic DNA
gggcatctccaggacaggcattcaggcagagcaagctccaggtttcaccacaatgcccatccctgcctccccactccacccacctctgccttccttactgctgtatctgctgcttgaactggcaggagtcacacatgtgttccatgtgcaacaaacggagatgtcacagactgtatcaactggggagtcaatcatcttgagttgcagcgtacccaataccttaccaaatggacctgtcttgtggttcaagggaacagggccaaaccggaaattaatctacaatttcaaacaaggtaactttcccagagtaaaagagattggagacaccaccaagcctggcaacacagacttttccacccgcatccgtgaaatctctcttgctgatgctggcacctattactgcgtgaagttcataaaaggaagagctatcaaggagtaccaatcaggtcggggcactcaggtgtttgttactgcagagcagaatccaagacctcccaagaacagacctgcaggcagagcaggctccagggcccaccatgatgcccatacctgcctctcggccctgcctgagagaaacagcacaaactatttcgtccaaccctgctgctgcctccggctgctgggactcacaggcttgctgtcaaaataatccaaacagggaaggaacgtacaagtaaataacaaaagcccccatactcttctgactccctggagacagctactttttaggagtttcatttgccttcttcaagagagctttcttccactgacataaaatgccagcttgatcgtacaataaatctgtctatttacctgggtccaa

SEQ ID NO: 905 - DNA, 1958 bp, Homo sapiens
  source 1..1958: mol_type = genomic DNA
atttcagaacaacgggataggatgatgacatcacaaggggatggggactcttgtcgtctcagagagaacgtgccagcctggctctgctttcttttcctagagggtctaacacctctcccggccctgacatctagctggttcctgaggaggaggcagaagtcatgaggaggcaatggggaaacagccatggcagccagtgcctgcctgtggatgcttggacattaaagggtcaccagctgagtgtgggctgagtgtccctgaacacaacatttgtgcttaggaagaacccattccagagctgagagagaaggatgccaacatgctgcttcctccctctttctgggggcatttcttctgcccctccaatcccatctctgagagctggtcccaggtccagcccaagcaggagaggcagccctcaccttcccaggtgtttgtaggcatgttactctccctcctagagagtgttccccgcagctccgccttccctgcaggcctcctccatcctctaaagcacaaatcatcaccacctgcacaactcgaatgtctttctcagccatgcctgattcctctgcaggaaggaaaaaggaagcagttcctggtagtgtatggagggacccacagaaaagccaagagcccacagcagatattgcttgttttttacctctaactactctggagtgcaagaaagggcatccattgtaaagtccaactcttaccaagtgggtgaggctatagacatcttgtctctttcttcagctgtgcagctcagacaggcccagatgttgagctcatgcaggagctagacccatacctgcgcatcatgtggatgaggcctttgtctagcctatgtgtctgaggctcctagataggcaaaggccatgaagttggggagaacctgtgagatgggatgaaactcaggaaggagtataaggctgtgggtgtcaagccccccagccccagcaaagctaaatacttccagcagcaacttcctagcttgaagcaaccttgtctgttcaattttataatcacaaaggaaaaagtgtcccagtcccctggcctttcctctcatcacaatccccttcctctgacatcacagaggcaagaactgtcttctctgctcggagcactgagtcgagggcatctccaggacaggcattcaggcagagcaagctccaggtttcaccacaatgcccatccctgcctccccactccacccacctctgccttccttactgctgtatctgctgcttgaactggcaggagtcacacatgtgttccatgtgcaacaaacggagatgtcacagactgtatcaactggggagtcaatcatcttgagttgcagcgtacccaataccttaccaaatggacctgtcttgtggttcaagggaacagggccaaaccggaaattaatctacaatttcaaacaaggtaactttcccagagtaaaagagattggagacaccaccaagcctggcaacacagacttttccacccgcatccgtgaaatctctcttgctgatgctggcacctattactgcgtgaagttcataaaaggaagagctatcaaggagtaccaatcaggtcggggcactcaggtgtttgttactgagcagaatccaagacctcccaagaacagacctgcaggcagagcaggctccagggcccaccatgatgcccatacctgcctctcggccctgcctgagagaaacagcacaaactatttcgtccaaccctgctgctgcctccggctgctgggactcacaggcttgctgtcaaaataatccaaacagggaaggaacgtacaagtaaataacaaaagcccccatactcttctgactccctggagacagctactttttaggagtttcatttgccttcttcaagagagctttcttccactgacataaaatgccagcttgatcgtacaataaatctgtctatttacctgggtccaa

SEQ ID NO: 906 - DNA, 2247 bp, Homo sapiens
  source 1..2247: mol_type = genomic DNA
accagatttgaagattgtaccaggagagccgcagtgttccagagctactgaggggctgggccgggatttgctgtattcgagaagacccccttggacccgagaggctgtgggcttggggagcatgaggaggtttcacagcagaaaggacaccccggggctcctggataagccagaaaatgtgccaggggaagtcgggctccaagggcaccactctgggcttccagctgtgtgggctggaccaagaaggctcagagaaatgatctcaggcttgaagtggggagaagaaactgtattatgaaggcagatgaacagttcctgcaaaagccccagcacccgcagagcagacactgcgatgacaacggacgacacagaagtgcccgctatgactctagcaccgggccacgccgctctggaaactcaaacgctgagcgctgagacctcttctagggcctcaaccccagccggccccattccagaagcagagaccaggggagccaagagaatttcccctgcaagagagaccaggagtttcacaaaaacatctcccaacttcatggtgctgatcgccacctccgtggagacatcagccgccagtggcagccccgagggagctggaatgaccacagttcagaccatcacaggcagtgatcccagggaagccatctttgacaccctttgcaccgatgacatctctgaagaggcaaagacactcacaatggacatattgacattggctcacacctccacagaagctaagggcctgtcctcagagagcagcgcctcttccgacggcccccatccagtcatcaccccgtcacgggcctcagagagcagcgcctcttccgacggcccccatccagtcatcaccccgtcacgggcctcagagagcagcgcctcttccgacggcccccatccagtcatcaccccgtcacgggcctcagagagcagcgcctcttccgacggcccccatccagtcatcaccccctcatggtccccgggatctgacgtcactctcctcgctgaagccctggtgactgtcacaaacatcgaggttattaattgcagcatcacagaaatagaaacaacgacttccagcatccctggggcctcagacacagatctcatccccacggaaggggtgaaggcctcgtccacctccgatccaccagctctgcctgactccactaacacaaaaccacacatcactgaggtcacagcctctgccgagaccctgtccacagccggcaccacagagtcagctgcacctgatgccacgattgggaccccactccccaccaacagcaccatagaaagagaagtgacagcacccggggccacgaccctcagtggagctctggccacagggaatcccctggaagaaacctcagccctctctgttgagacaccaagttacgtcaaagtctcaggagcagctccggtctccatagaggctgggtcagcagtgggcaaaacaacttcctttgctgggagctctgcttcctcctacagccccttggaagccgccctcaagaacttcaccccttcagagacactgaccacggacatcgcaaccaaggggcccttccccaccagcagggaccctcttccttctgtccctccgactacaaccaacagcagccgagggacgaacagcaccttagccaagatcacaacctcagcgaagaccacgatgaagcccccaacagccacgcccacgactgcccggacgaggccgaccacagacgtgagtgcaggtgaaaatggaggtttcctcctcctgcggctgagtgtggcttccccggaagacctcactgaccccagagtggcagaaaggctgatgcagcagctccaccgggaactccacgcccacgcgcctcacttccaggtctccttactgcgtgtcaggagaggctaacggacatcagctgcagccaggcatgtcccgtatgccaaaagagggtgctgcccctagcctgggcccccaccgacagactgcagctgcgttactgtgctgagaggtacccagaaggttcccatgaagggcagcatgtccaagcccctgaccccagatgtggcaacaggaccctcgctcacatccaccggagtgtatgtgtggggaggggcttcacctgttcccagaggtgtccttggactcaccttggcacatgttctgtgtttcagtaaagagagacctgatcacccatctgtgtgcttccatcctgcattaaaattcactcagtgtggccc

SEQ ID NO: 907 - DNA, 3408 bp, Homo sapiens
  source 1..3408: mol_type = genomic DNA
gctccagtcctggcatctgcccgaggagaccacgctcctggagctctgctgtcttctcagggagactctgaggctctgttgagaatcatgctttggaggcagctcatctattggcaactgctggctttgtttttcctccctttttgcctgtgtcaagatgaatacatggagtctccacaaaccggaggactacccccagactgcagtaagtgttgtcatcatggaaacaatggcaacaatggagccactggtcataaaggagagaagggctacccggggattccaccagaacttcagattgcattcatggcttctctggcaacccacttcagcaatcagaacagtgggattatcttcagcagtgttgagaccaacattggaaacttctttgatgtcatgactggtagatttggggccccagtatcaggtgtgtatttcttcaccttcagcatgatgaagcatgaggatgttgaggaagtgtatgtgtaccttatgcacaatggcaacacagtcttcagcatgtacagctatgaaatgaagggcaaatcagatacatccagcaatcatgctgtgctgaagctagccaaaggggatgaggtttggctgcgaatgggcaatggcgctctccatggggaccaccaacgcttctccacctttgcaggattcctgctctttgaaactaagtaaatatatgactagaatagctccactttggggaagacttgtagctgagctgatttgttacgatctgaggaacattaaagttgagggttttacattgctgtattcaaaaaattattggttgcaatgttgttcacgctacaggtacaccaataatgttggacaattcaggggctcagaagaatcaaccacaaaatagtcttctcagatgaccttgactaatatactcagcatctttatcactctttccttggcacctaaaagataattctcctctgacgcaggttggaaatatttttttctatcacagaagtcatttgcaaagaattttgactactctgcttttaatttaataccagttttcaggaacccctgaagttttaagttcattattctttataacatttgagagaatcggatgtagtgatatgacagggctggggcaagaacaggggcactagctgccttattagctaatttagtgccctccgtgttcagcttagcctttgaccctttccttttgatccacaaaatacattaaaactctgaattcacatacaatgctattttaaagtcaatagattttagctataaagtgcttgaccagtaatgtggttgtaattttgtgtatgttcccccacatcgcccccaacttcggatgtggggtcaggaggttgaggttcactattaacaaatgtcataaatatctcatagaggtacagtgccaatagatattcaaatgttgcatgttgaccagagggattttatatctgaagaacatacactattaataaataccttagagaaagattttgacctggctttagataaaactgtggcaagaaaaatgtaatgagcaatatatggaaataaacacacctttgttaaagatactttctaaacttgtgtttaataaactttaatagtcatagaattgtaaatcactatggttaacagaaagtgaaaatattttcatgcagatgatgtgaacagccatgtgaataggtgacttgggcacacagcagggtcatatgacttcagaaaacttcgcttttcagttattccattgttataatgtcaaccctttaagacattgatgtttagagggctcacaaataaaatctgaatacctgtaaggaaagaggttttttatcacataccttaagtctttgtaatgttcatgcttaaattctaagttttcaccttagtgacacacaaggtttggttgtaggcaacaagtcccaggtgtgtgggaaattgattcacaacagagatgggaaaaggtgcagataatttccaatgccttcacaatttacccatgaccagaaatatacttggaagactgatttcacaagtgtcccaaaactgagatgctaaaaaggaaacagtaggtaggtgtcataggaaatttacatgtaccatctaataaacaaacttgcaaattctaaatcttttttttttttgagacagtttcacgctgctgcccaggctggagtgcagtggcatgatctcagctcaccgcagcctccgcctcctgggttcaagtgactctcctacctcagcctcctgagtagctgggactacaggcgcccaccaccaggaccagctaatttttaatgtttctaatagagatggggtttcaccatgttgaccaggccggtctggaactcctgacctcaggtgatctgcctgcctcggtcttccaaagtgctgggattacaggcgtgagcccccgcacccagccgcaaattctaaatcttaaaacaactctgcaaacgaagcacttgagtttctgcttgcttcagggatgtaatatggtgtagaactgtttcacataatgatcagccttggtaattttccagtgtagaaaacattatatttgacccttggacaacaaagagattatattgaaggaattttattgattgtatcatgaataaaagctgaagtcaaaattaaaatgtaaaaaaataattcagaggatggaatatgcaaatgtaaactccaaatgatgtggctggaattcataaacatttactttatgcaagatactgtgctattccaggcactcctatggcatttaaagtacaattcttaccttccctaatttttcaacctagtagaggacaataggctaaagggaataagtacatggataacaaaacataaagtagaatgtttttacagccatagaaggcaaagggctaggaattcacaggagagagaaacagtatctagctgagagcataagaaaagcttgtggaaaagataatatctgatggccagagacaatttcttgctttggtatgtttgaagtgttatatttaaatatatatatttttatttaaaaaactcactatagaaaatttataaaattccccaaaatatttagtataaaattaatcatcccatcaaatattaaataatattactattttaaagtgtttatttcagtcttttcctgcatgtatttatggcttttatttttaaatatagtaataaaataatttgaaattagctttttatatatttttgtatcttgctctaatgggttggactaaacatattaagaacactctcaaatgctactaaggacaatttgaaaacataattttaatgactgcataatttatttaactttcctgttttggaaaatattattttttttttattacaaataatatgtcatgagcattctctttttaaaaaaataaactatgtgtgcat

SEQ ID NO: 908 - DNA, 2802 bp, Homo sapiens
  source 1..2802: mol_type = genomic DNA
ttttggcttttgggaagtcatggggaaaagaagtaaagctgagggtggcgaaatacctttgctaaacccagagacactgcacctgaatcctgctcagtgttttgtaggcaaccaactgccttctgccactggtatccggaaggggaaatgagttaccttaagtgggccaaagtggggaaatactaacagtacagctagaaaccaagagctgtcgtgaaagccctgaatgggttcccactgctatttcagacaaaactgatgcagttaagcctgaatttcctggcaagcacaagggtagatttttccaaaaggctttttagactgcaaatacacagcctttccatgtctaatcacaaaagcaaactgctggacacatgctctctgttcccagctggttgtgtatgttttcttcacacttcaacagaaacgtgccaaggtgtgacatttatgaatttcgccaactgggaactgtgcacacaaatcgttcttgcttgtggtgtgggaaaatgatgaatgggggctgttctgcctggggaggagggctgctgtcactctggcatgcctacagccttatttattacacaccaaagtataaaaccactccgccgctgcagctctcagctccagtcctggcatctgcccgaggagaccacgctcctggagctctgctgtcttctcagggagactctgaggctctgttgagaatcatgctttggaggcagctcatctattggcaactgctggctttgtttttcctccctttttgcctgtgtcaagatgaatacatggaggtgagcggaagaactaataaagtggtggcaagaatagtgcaaagccaccagcagactggccgtagcggctccaggagggagaaagtgagagagcggagccatcctaaaactgggactgtggataataacacttctacagacctaaaatccctgagaccagatgagctaccgcaccccgaggtagatgacctagcccagatcaccacattctggggccagtctccacaaaccggaggactacccccagactgcagtaagtgttgtcatggagactacagctttcgaggctaccaaggcccccctgggccaccgggccctcctggcattccaggaaaccatggaaacaatggcaacaatggagccactggtcatgaaggagccaaaggtgagaagggcgacaaaggtgacctggggcctcgaggggagcgggggcagcatggccccaaaggagagaagggctacccggggattccaccagaacttcagattgcattcatggcttctctggcaacccacttcagcaatcagaacagtgggattatcttcagcagtgttgagaccaacattggaaacttctttgatgtcatgactggtagatttggggccccagtatcaggtgtgtatttcttcaccttcagcatgatgaagcatgaggatgttgaggaagtgtatgtgtaccttatgcacaatggcaacacagtcttcagcatgtacagctatgaaatgaagggcaaatcagatacatccagcaatcatgctgtgctgaagctagccaaaggggatgaggtttggctgcgaatgggcaatggcgctctccatggggaccaccaacgcttctccacctttgcaggattcctgctctttgaaactaagtaaatatatgactagaatagctccactttggggaagacttgtagctgagctgatttgttacgatctgaggaacattaaagttgagggttttacattgctgtattcaaaaaattattggttgcaatgttgttcacgctacaggtacaccaataatgttggacaattcaggggctcagaagaatcaaccacaaaatagtcttctcagatgaccttgactaatatactcagcatctttatcactctttccttggcacctaaaagataattctcctctgacgcaggttggaaatatttttttctatcacagaagtcatttgcaaagaattttgactactctgcttttaatttaataccagttttcaggaacccctgaagttttaagttcattattctttataacatttgagagaatcggatgtagtgatatgacagggctggggcaagaacaggggcactagctgccttattagctaatttagtgccctccgtgttcagcttagcctttgaccctttccttttgatccacaaaatacattaaaactctgaattcacatacaatgctattttaaagtcaatagattttagctataaagtgcttgaccagtaatgtggttgtaattttgtgtatgttcccccacatcgcccccaacttcggatgtggggtcaggaggttgaggttcactattaacaaatgtcataaatatctcatagaggtacagtgccaatagatattcaaatgttgcatgttgaccagagggattttatatctgaagaacatacactattaataaataccttagagaaagattttgacctggctttagataaaactgtggcaagaaaaatgtaatgagcaatatatggaaataaacacacctttgttaaagatactttctaaacttgtgtttaataaactttaatagtcatagaattgtaaatcactatggttaacagaaagtgaaaatattttcatgcagatgatgtgaacagccatgtgaataggtgacttgggcacacagcagggtcatatgacttcagaaaacttcgcttttcagttattccattgttataatgtcaaccctttaagacattgatgtttagagggctcacaaataaaatctgaatacctgtaaggaaa

SEQ ID NO: 909 - DNA, 3424 bp, Homo sapiens
  source 1..3424: mol_type = genomic DNA
gtgagtagtgcctcctcccatctctcttgctcctggtctcatcgtgacgggcctggtcctgcctcactttctgccatgactaagagctccctgaggcctctccagaagcagtctccacaaaccggaggactacccccagactgcagtaagtgttgtcatggagactacagctttcgaggctaccaaggcccccctgggccaccgggccctcctggcattccaggaaaccatggaaacaatggcaacaatggagccactggtcatgaaggagccaaaggtgagaagggcgacaaaggtgacctggggcctcgaggggagcgggggcagcatggccccaaaggagagaagggctacccggggattccaccagaacttcagattgcattcatggcttctctggcaacccacttcagcaatcagaacagtgggattatcttcagcagtgttgagaccaacattggaaacttctttgatgtcatgactggtagatttggggccccagtatcaggtgtgtatttcttcaccttcagcatgatgaagcatgaggatgttgaggaagtgtatgtgtaccttatgcacaatggcaacacagtcttcagcatgtacagctatgaaatgaagggcaaatcagatacatccagcaatcatgctgtgctgaagctagccaaaggggatgaggtttggctgcgaatgggcaatggcgctctccatggggaccaccaacgcttctccacctttgcaggattcctgctctttgaaactaagtgtcatggagaaactccagctgggcccagagattctgcagcgggaaaatccaaggcttatttatgccaggctgagtggatttggccagtcaggaagcttctgccggttagctggccacgatatcaactatttggctttgtcaggtggaaggaacagcatatttaagttcttttctgtggaaaactcagaaattgagtctgtgggaagcacctcgaggacagaacatgttggatggtggagcacctttctatacgacttacaggacagcagatggggaattcatggctgttggagcaatagaaccccagttctacgagctgctgatcaaaggacttggactaaagtctgatgaacttcccaatcagatgagcatggatgattggccagaaatgaagaagaagtttgcagatgtatttgcagagaagacgaaggcagagtggtgtcaaatctttgacggcacagatgcctgtgtgactccggttctgacttttgaggaggttgttcatcatgatcacaacaaggaacggggctcgtttatcaccagtgaggagcaggacgtgagcccccgccctgcacctctgctgttaaacaccccagccatcccttctttcaaaagggatcctttcataggagaacacactgaggagatacttgaagaatttggattcagccgcgaagagatttatcagcttaactcagataaaatcattgaaagtaataaggtaaaagctagtctctaacttccaggcccacggctcaagtgaatttgaatactgcatttacagtgtagagtaacacataacattgtatgcatggaaacatggaggaacagtattacagtgtcctaccactctaatcaagaaaagaattacagactctgattctacagtgatgattgaattctaaaaatggttatcattagggcttttgatttataaaactttgggtacttatactaaattatggtagttattctgccttccagtttgcttgatatatttgttgatattaagattcttgacttatattttgaatgggttctagtgaaaaaggaatgatatattcttgaagacatcgatatacatttatttacactcttgattctacaatgtagaaaatgaggaaatgccacaaattgtatggtgataaaagtcacgtgaaacagagtgattggttgcatccaggccttttgtcttggtgttcatgatctccctctaagcacattccaaactttagcaacagttatcacactttgtaatttgcaaagaaaagtttcacctgtattgaatcagaatgccttcaactgaaaaaaacatatccaaaataatgaggaaatgtgttggctcactacgtagagtccagagggacagtcagttttagggttgcctgtatccagtaactcggggcctgtttccccgtgggtctctgggctgtcagctttcctttctccatgtgtttgatttctcctcaggctggtagcaagttctggatcttatacccaacacacagcaacatccagaaataaagatctcaggaccccccagcaagtcgttttgtgtctccttggactgagttaagttacaagcctttcttatacctgtctttgacaaagaagacgggattgtctttacataaaaccagcctgctcctggagcttccctggactcaacttcctaaaggcatgtgaggaaggggtagattccacaatctaatccgggtgccatcagagtagagggagtagagaatggatgttgggtaggccatcaataaggtccattctgcgcagtatctcaactgccgttcaacaatcgcaagaggaaggtggagcaggtttcttcatcttacagttgagaaaacagagactcagaagggcttcttagttcatgtttcccttagcgcctcagtgattttttcatggtggcttaggccaaaagaaatatctaaccattcaatttataaataattaggtccccaacgaattaaatattatgtcctaccaacttattagctgcttgaaaaatataatacacataaataaaaaaatatatttttcatttctatttcattgttaatcacaactacttactaaggagatgtatgcacctattggacactgtgcaacttctcacctggaatgagattggacactgctgccctcattttctgctccatgttggtgtccatatagtacttgattttttatcagatggcctggaaaacccagtctcacaaaaatatgaaattatcagaaggattatagtgcaatcttatgttgaaagaatgaactacctcactagtagttcacgtgatgtctgacagatgttgagtttcattgtgtttgtgtgttcaaatttttaaatattctgagatactcttgtgaggtcactctaatgccctgggtgccttggcacagttttagaaataccagttgaaaatatttgctcaggaatatgcaactaggaaggggcagaatcagaatttaagctttcatattctagccttcagtcttgttcttcaaccatttttaggaactttcccataaggttatgttttccagcccaggcatggaggatcacttgaggccaagagttcgagaccagcctggggaacttggctggacctccgtttctacgaaataaaaataaaaaaattatccagg

SEQ ID NO: 910 - DNA, 234 bp, Homo sapiens
  source 1..234: mol_type = genomic DNA
atggccacaaggagcgtcctcttggccctcgtggtccttaacttactcttctatgttccaccaggtagaagtggacccaatgtctacatacaaaaaatctttgcttcatgttggcgactgcaaggtacttgccggccaaaatgtctaaaaaacgaacaatatcgtattttgtgtgatactatacatttgtgctgtgtaaacccaaaatatttacctatactgactgggaaatag

SEQ ID NO: 911 - DNA, 237 bp, Homo sapiens
  source 1..237: mol_type = genomic DNA
atgaacctctgtctttctgcattactctttttcctggtgatcttactgccttcaggaaaaggtatgtttgggaatgatggagtcaaagttcgcacctgcactagccagaaagccgtatgtttcttcgggtgtccgccaggatacaggtggattgcgttctgccacaatattctgtcttgctgtaaaaatatgacacgttttcaacccccgcaagccaaagatccatgggttcattaa

SEQ ID NO: 912 - DNA, 831 bp, Homo sapiens
  source 1..831: mol_type = genomic DNA
ccctgggccttcccccaggaagagccccacggccagctccttcctgttcccctggcggcccctcgcttcttccttctggatgggggcccagggggcccaggagagtataaaggcgatgtggagggtgcccggcacaaccagacgcccagtcacaggcgagagccctgggatgcaccggccagaggccatgctgctgctgctcacgcttgccctcctggggggccccacctgggcagggaagatgtatggccctggaggaggcaagtatttcagcaccactgaagactacgaccatgaaatcacagggctgcgggtgtctgtaggtcttctcctggtgaaaagtgtccaggtgaaacttggagactcctgggacgtgaaactgggagccttaggtgggaatacccaggaagtcaccctgcagccaggcgaatacatcacaaaagtctttgtcgccttccaagctttcctccggggtatggtcatgtacaccagcaaggaccgctatttctattttgggaagcttgatggccagatctcctctgcctaccccagccaagaggggcaggtgctggtgggcatctatggccagtatcaactccttggcatcaagagcattggctttgaatggaattatccactagaggagccgaccactgagccaccagttaatctcacatactcagcaaactcacccgtgggtcgctagggtggggtatggggccatccgagctgaggccatctgggtggtggtggctgatggtactggagtaactgagtcgggacgctgaatctgaatccaccaataaataaaggttctgcagaatcagtgca

SEQ ID NO: 913 - DNA, 2121 bp, Homo sapiens
  source 1..2121: mol_type = genomic DNA
ctccattaaaccaccaccagctccccaagccaccccttcagccatgaagttcctgctcctggtcttggcagccctcggattcctgacccaggtgatcccagccagtgcaggtgggtcaaaatgtgtgagtaacaccccaggatactgcaggacatgttgccactggggggagacagcattgttcatgtgcaacgcttccagaaaatgctgcatcagctactccttcctgccgaagcctgacctaccacagctcatcggtaaccactggcaatcaaggagaagaaacacacaaaggaaagacaagaagcaacaaacgaccgtaacatcataataaccactgctatcgcctccaccaactcagagaaatatcatttccacagttccaattcctcctacattgctgagtactagccaaggctcctctttatggggcagatatctatagccaaccccaaaacttctgtcttctatcattctgtcattcatctagtaactaatttggagtttgtatctatcttacgagaacaatcatcatgcagattcgtccacaggggatctgtcagtttgggtcctccaaatgaaaaatgtcaagacagaattggacatgcaaaagattgactgggagaacacacctctgatggacaaaggtgagacagagcagccacaggcagggagagccttcagactgcaacgctggcctgatacgtgtcaaaggagagagggatagaggaggattgaatagaaggagactaagactgcagctctaagaaagtctcagccaaacagatggggaggcccaaagcaaggcttgcccctcagaggagctcacgcagggcaggaatagccaggttctcatatcccaggggttcagactttggctgagaacagcccctggagaacatggggtgactgctaccataggtctggaagtatgaggctgtccaccaactatccccttgaagcaagttctcttgaaaggaaatctaaacagtgcacccccatggctgccacggagtataaggagggagagaaaggagctgaaagtctaggtttggccagctaggtagactgacttgtgaggtatttatttattcatttgagtaacaaagcagacagaatacatagccaccattggtagtacaccccaaaagcaaggatggcatgatgctggtgactcaaacgtgcctactcatggtgtcaaattggcataatcctcttgggaagctgtgtggaaataagcacagagaagcagaactctaattgcttaatccactaaacattacttctgggaattggctcatcataaattatccaagagaagcacaaagttatgggcacaaaggttttccatataatattatttaaaatgctgagaaaatgaaaaaatctaaatggtgaaatatatactaatgccatctataaatacaaacaaatagaatgtttatagaataatggaacataataacattattcaaaattgcatttatgctatagttgtcaaaattgtctccttatatgatacaaaactcatgaaaattatgacttttttgtttggttggaaagcagaattatgcataaatttcctcttacagttcgatgcccattagttttatataacatttatttgacacgtactgacttctatctgagaagaacaaaccaaaacactcaggcctaaataattaaaaacggtcctaaaaactagcaaaccagataagaaaagatgttaatgcccattccctaacttatgtcttagaccaaaattaattctagatggttttaaaatgacagtgtaaaagtaaagtattaaaagattgtgtggtcaaatattcaatttaagagcaaggaaattcttataaatataacaatagaggcagaactcatgtaagaataaattgattaggtggtattaaatattaagttcttatgtatgtcaaaagatatcattttgaaattcatccatcttattgggtattgcaggagttcattcctttttgtttataaatactcttccgtcatatgaatagtattcatttgtatactggtttgttgatggacatttgggttgttcccagtttatggctattacaaataaagcttctatgaacatttatgtacaaa

SEQ ID NO: 914 - DNA, 566 bp, Homo sapiens
  source 1..566: mol_type = genomic DNA
cattgcacgccggggtccttgcccgctccctctctctgccaccgctcaaagcctgggagaacgcttttgaaagcgaatcaggaaattacttatcaatctgaagccccaaagaattatgaataatcctcgctgccaaagggaaggggattttgagcaaaagctccacatctgcgcacactagagttcaaagactccagctgttggaaggtcttgtgagcaatagccaaagatgtttgtcttgctctatgttacaagttttgccatttgtgccagtggacaaccccggggtaatcagttgaaaggagagaactactcccccaggtatatctgcagcattcctggcttgcctggacctccagggccccctggagcaaatggttcccctgggccccatggtcgcatcggccttccaggaagagatggtagagacggcaggaaaggagagaaaggtgaaaagggaactgcaggtttgagaggtaagactggaccgctaggtcttgccggtgagaaaggggaccaaggagagactgggaagaaaggacccataggaccagagggagagaaag

SEQ ID NO: 915 - DNA, 514 bp, Homo sapiens
  source 1..514: mol_type = genomic DNA
ctctgaggaaggtagcatagtgtgcagttcactggaccaaaagctttggctgcacctcttctggaaagcctggccatggggctcttcatgatcattgcaattctgctgttccagaaacccacagtaaccgaacaacttaagaagtgctggaataactatgtacaaggacattgcaggaaaatctgcagagtaaatgaagtgcctgaggcactatgtgaaaatgggagatactgttgcctcaatatcaaggaactggaagcatgtaaaaaaattacaaagccacctcgtccaaagccagcaacacttgcactgactcttcaagactatgttacaataatagaaaatttcccaagcctgaagacacagtctacataaatcaaatacaatttcgttttcacttgcttctcaacctagtctaataaactaaggtgatgagatatacatcttcttccttttggtttcttgatccttaaaatgaccttcgagcatattctaataaagtgcattgccagtt

SEQ ID NO: 916 - DNA, 655 bp, Homo sapiens
  source 1..655: mol_type = genomic DNA
gccatacacttcagcagagtttgcaacttctcttctaagtctttatccttcccccaaggcatgcctagcacaggactcttgaacagtgatgcctcaattagagttgctagccaatagattgaagctatgttggcacaatatcctacatcctcccgatctactggctgagcccaaccccacctaagaaggacaataaagatctgtgttcagagtcatactgaatagagacttctggactctatagaacccactgcctcctgatgaagtccctactgttcacccttgcagtttttatgctcctggcccaattggtctcaggtaattggtatgtgaaaaagtgtctaaacgacgttggaatttgcaagaagaagtgcaaacctgaagagatgcatgtaaagaatggttgggcaatgtgcggcaaacaaagggactgctgtgttccagctgacagacgtgctaattatcctgttttctgtgtccagacaaagactacaagaatttcaacagtaacagcaacaacagcaacaacaactttgatgatgactactgcttcgatgtcttcgatggctcctacccccgtttctcccactggttgaacattccagcctctgtctcctgctctaggatccccgactcattaaagcaaagaggctta

SEQ ID NO: 917 - DNA, 2500 bp, Homo sapiens
  source 1..2500: mol_type = genomic DNA
aaacccgcggcactaagctctctctgagaggcagaattgcgccggccgccggcgagaatctgcctagagccgtccagccctgtcggccggggacgacagccgcctcagcctgtcaggacagtgaggagagcaggggccgagtctctcggaagccctcgtgaggactcggacctattcggactgattcggcttcccacttcggggaacttcgaccctcctcggttcaggactcggtctcggctcggcggcttcgtgcaggttcggctcctactcgggcagcctctgttcgcctcggctccgctccgcgggcggactcggctcggctctgctcggcggctggctgccttttcggtccctattcgggcggcggcttcgggcggcctcggcccagctcgggcgtcctcttcgggccccgcttcgggctccgcgaccggcgcttcgggcggtcccggacggcgccttcgggaaggctcggcggagtccggatggaggactcggactcggcggcaaagcagctgggcctggctgaggcggcggcggtggcggccgcggccgctgtggcggcggcggccgcggccgcggcaggaggcgaggcggaggagccggtgctgagcagggacgaggactcggaggaggacgcagactcggaggcggagcgggagacgccgcgggtcacggcagtggcggtgatggcggcggagcccgggcacatggacatgggcgccgaggccctgcccggccccgacgaggccgccgctgccgcagccttcgcagaggtgaccacagtgacagtggccaacgtgggggctgctgcagacaatgtcttcaccacgtctgtggcgaacgcggcatccatctcaggacatgttctgtctggtaggacggcccttcagatcggggacagcctgaacaccgaaaaagcgacactgattgtcgtccacacagatgggagcatcgtggagaccaccgggctgaaaggcccggcagctcccctcaccccaggtcctcagtctcctccaacccctctggctcccggccaagaaaaaggtggaactaaatacaactgggacccttctgtgtacgacagtgagctgcccgtacggtgccggaacatcagcggcactctgtacaagaacaggctcggctcaggcggccggggacggtgcatcaagcagggggagaactggtacagtcccaccgagtttgaggccatggcaggaagagccagcagtaaggactggaaaagaagcattcgctacgcgggccgacccttgcagtgcctcatccaggatgggatcttaaaccctcacgctgcctcttgcacctgtgctgcctgctgcgacgacatgaccttaagtggcccagtcaggctttttgtgccttacaaaaggcgcaagaaggagaatgaactgcccacaactcccgtgaagaaggactcccccaagaacatcacattgcttccagccaccgcggctaccaccttcaccgtgaccccctcgggacagatcacgacctcgggggcactgacctttgaccgagcgtccacggtagaggccactgctgtcatatcagagagtccggcccagggcgacgtcttcgcaggggccacagtccaagaggccagcgtgcagcccccatgcagggccagccaccctgagcctcactaccccggctatcaggacagctgccagatcgcaccgtttccagaagctgcgttgccaacgtcacatcccaaaatagtgttgacatccctgcctgcgctggcggtcccacccccgactcccaccaaagcggcacctcccgcgttggtcaatgggctggagctgtcagagccgcggagctggctgtacctagaagagatggtcaactccttgctcaacacagcgcagcagctgaagacgctgtttgagcaagccaagcatgccagcacctaccgagaagctgccacaaaccaggccaagatccacgctgacgcagagcggaaggagcagtcctgcgttaactgcggccgggaggctatgagcgagtgcaccggctgccacaaggtcaactactgctccaccttctgccaacgcaaggactggaaggatcaccagcacatatgcggccagtcagcagctgtcaccgtccaggcagacgaagtccacgtggctgaaagcgtgatggagaaggtgaccgtgtgaggctccatcggccgccctgggagctggggcccctcgcactcctgtgaggcttttgcaggtcgaaggcccccctgaggactctggggggacgttgagaagaggggtgtgggaaggtaaagaaacttgctggacaagtcattaacacactttaagcgaatggtgccctgggaagcgcactccccctgcccgggccccctgcccgctcgcggacagattttttatccctgggatcatgagcgtccggtcttgcccacagggcctgtgctgcgacgcacatacatacgtgttgtgtctgtcaataaagtgtaaataaggtc

SEQ ID NO: 918 - DNA, 587 bp, Homo sapiens
  source 1..587: mol_type = genomic DNA
atgaatatcctgatgctgaccttcattatctgtgggttgctaactcgggtgaccaaaggtagctttgaaccccaaaaatgttggaagaataatgtaggacattgcagaagacgatgtttagatactgaaaggtacatacttctttgtaggaacaagctatcatgctgcatttctataatatcacatgaatatactcgacgaccagcatttcctgtgattcacctagaggatataacattggattatagtgatgtggactcttttactggttccccagtatctatgttgaatgatctgataacatttgacacaactaaatttggagaaaccatgacacctgagaccaatactcctgagactactatgccaccatctgaggccactactcccgagactactatgccaccatctgagactgctacttccgagactatgccaccaccttctcagacagctcttactcataattaattaacatttacttctggtatggaacaactagaaatactgctggaaataatatccaaagagctgattctaccaatccaatttcaccaggaaaattccatcagggattggatgaccat

SEQ ID NO: 919 - DNA, 1219 bp, Homo sapiens
  source 1..1219: mol_type = genomic DNA
gcggccgcggagggaaggggtgggtcggtgggtctgacagcgggtctgcgtaggcggcagcgtctgtccctcccagcctctcgctccgcgccatgggcgggccccgggctctgctggccgcactctgggcgctggaagccgccgggaccgccgcgcttcgcatcggagccttcaacattcagagcttcggtgacagcaaagtgtcggaccccgcttgcggcagcatcatcgcgaagatcctggctggctatgacctcgcgctggtgcaggaggtgcgagacccagacctcagcgccgtgtccgcgctcatggagcagatcaacagcgtgtccgagcacgagtacagctttgtgagcagccagcccctgggccgggaccagtacaaggagatgtacctgttcgtgtacaggaaagacgcggtgtcggtcgtggacacctacctgtacccagaccccgaggacgtcttcagccgcgagcccttcgtggtcaagttctcggcccccggcaccgcacagaacctggtgctgatcccgctgcacgcggcgccgcatcaagccgtggcggagatcgacgcgctctacgacgtgtacctggacgtgatcgacaagtggggcaccgacgacatgctgttcctgggcgacttcaacgccgactgcagctatgtgcgggcgcaggactgggccgccatccgtctgaggagcagtgaggtcttcaagtggctcatccctgacagcgccgacaccacggtgggcaactcagactgcgcctacgaccgcattgtggcctgtggcgcccgcctgcgccggagcctgaagccccagtcggccaccgtgcacgacttccaggaggaattcggcctggaccagactcaggctcttgccatcagcgaccactttccagtggaggtgaccctcaagttccaccgatgactcgaggcctggctggggcatgccacctgcagaccctggctctgaggaatggcccaacagtggccccttcagggtggcagccacccttcagtgaggccccaaggcagagtcggctgggcgtggaccaggggccatggacacgtgatgtgctgctctgtacctccgttccccatctgtgggacgggctgcatccagcgacctcatggggtgttgtgagccccatgaggggtgcagggggcactgcccggcagatgtctgctcaataaatgagctgctcccggtcgggcccc

SEQ ID NO: 920 - DNA, 3331 bp, Homo sapiens
  source 1..3331: mol_type = genomic DNA
gacgcagccatggcggaggcggctttggaagccgtgcggagcgagttacgagaattcccggccgctgcaagggagctctgcgtgcctcttgctgtgccctacctggacaaacccccaactccgctccacttctaccgggactgggtctgccccaacaggccgtgcattatccgcaacgctctgcagcactggccggccctccagaagtggtccctcccctatttcagagccacagtgggctccacagaggtgagtgtggccgtgaccccagatggttacgcggatgccgtgagaggggatcgcttcatgatgccagctgagcgccgcctgcccctgagcttcgtgctggatgtgctggagggccgggcccagcaccctggagtcctctatgtgcagaagcagtgctccaacctgcccagcgagctgccccagctgctgcctgatctggaatcccatgtgccctgggcctccgaagccctgggaaagatgcccgatgctgtgaacttctggctgggggaggcggctgcagtgacttctttgcacaaggaccactatgagaacctctactgcgtggtctcaggagagaagcatttcctgttccatccgcccagcgaccggcccttcatcccctatgagctgtacacgccggcaacctaccagctaactgaagagggcacctttaaggtggtggatgaagaggccatggagaaggcagaggtgtccaggacctgcctgctcacggttcgtgtcctgcaggcccatcgcctaccctctaaggacctagtgaccccctctgactgctacgtgactctctggctgcccacggcctgcagccacaggctccagacacgcacggtcaagaacagcagtagccctgtctggaaccagagctttcacttcaggatccacaggcagctcaagaatgtcatggaactgaaagtctttgaccaggacctggtgaccggagatgaccctgtgttgtcagtactgtttgatgcggggactctgcgggctggggagttccggcgcgagagcttctcactgagccctcagggtgaggggcgcctggaagttgaatttcgcctgcagagtctggctgaccgtggcgagtggctcgtcagcaatggcgttctggtggcccgggagctctcctgcttgcacgttcaactggaggagacaggagaccagaagtcctcagagcacagagttcagcttgtggttcctgggtcctgtgagggtccgcaggaggcctctgtgggcactggcaccttccgcttccactgcccagcctgctgggagcaggagctgagtattcgcctgcaggatgcccccgaggagcaactaaaggcgccactgagtgccctgccctctggtcaagtggtgaggcttgtcttccccacgtcccaggagcccctgatgagagtggagctgaaaaaagaagcaggactgagggagctggccgtgcgactgggcttcgggccctgtgcagaggagcaggccttcctgagcaggaggaagcaggtggtggccgcggccttgaggcaggccctgcagctggacggagacctgcaggaggatgagatcccagtggtagctattatggccactggtggtgggatccgggcaatgacttccctgtatgggcagctggctggcctgaaggagctgggcctcttggattgcgtctcctacatcaccggggcctcgggctccacctgggccttggccaacctttatgaggacccagagtggtctcagaaggacctggcagggcccactgagttgctgaagacccaggtgaccaagaacaagctgggtgtgctggcccccagccagctgcagcggtaccggcaggagctggccgagcgtgcccgcttgggctacccaagctgcttcaccaacctgtgggccctcatcaacgaggcgctgctgcatgatgagccccatgatcacaagctctcagatcaacgggaggccctgagtcatggccagaaccctctgcccatctactgtgccctcaacaccaaagggcagagcctgaccacttttgaatttggggagtggtgcgagttctctccctacgaggtcggcttccccaagtacggggccttcatcccctctgagctctttggctccgagttctttatggggcagctgatgaagaggcttcctgagtcccgcatctgcttcttagaaggtatctggagcaacctgtatgcagccaacctccaggacagcttatactgggcctcagagcccagccagttctgggaccgctgggtcaggaaccaggccaacctggacaaggagcaggtcccccttctgaagatagaagaaccaccctcaacagccggcaggatagctgagtttttcaccgatcttctgacgtggcgtccactggcccaggccacacataatttcctgcgtggcctccatttccacaaagactactttcagcatcctcacttctccacatggaaagctaccactctggatgggctccccaaccagctgacaccctcggagccccacctgtgcctgctggatgttggctacctcatcaataccagctgcctgcccctcctgcagcccactcgggacgtggacctcatcctgtcattggactacaacctccacggagccttccagcagttgcagctcctgggccggttctgccaggagcaggggatcccgttcccacccatctcgcccagccccgaagagcagctccagcctcgggagtgccacaccttctccgaccccacctgccccggagcccctgcggtgctgcactttcctctggtcagcgactccttccgggagtactcggcccctggggtccggcggacacccgaggaggcggcagctggggaggtgaacctgtcttcatcggactctccctaccactacacgaaggtgacctacagccaggaggacgtggacaagctgctgcacctgacacattacaatgtctgcaacaaccaggagcagctgctggaggctctgcgccaggcagtgcagcggaggcggcagcgcaggccccactgatggccggggcccctgccacccctaactctcattcattccctggctgctgagttgcaggtgggaactgtcatcacgcagtgcttcagagcctcgggctcaggtggcacggtcccagggtccaggctgagggctgggagctcccttgcgcctcagcagtttgcagtggggtaaggaggccaagcccatttgtgtaatcacccaaaaccccccggcctgtgcctgttttcccttctgcgctaccttgagtagttggagcacttgatacatcacagactcatacaaa

SEQ ID NO: 921 - DNA, 2492 bp, Homo sapiens
  source 1..2492: mol_type = genomic DNA
ccggcatttgcgtttggggcgccctccctgcgccgggggcgggagcccagcgagcgcagagccccggccccgcgcggcccgagtgccacatcactgcgctggccgtccaaggtccgccgccccaccatgccgcccccgctgccgctgctgctccttacagtcctggtcgtcgccgctgcccggccggggtgcgagtttgagcggaaccccgccggtgaatgccacaggccaccagctgcagacagcggtacagtaccgggacctccctggcttctgttctgtaggagggctgcagcccccacactgtcagagcactttaggcagctgaatccgtgatttcagaagctctgattcctgcacagtagctgttgtcctggtcctcccctgccagaccgtgggtgcccctccctgcaggccctggccctgcgtggggtcccctacgtaaatgtctgatgcgtgacggtcagggccactgcaggagggactgacctgccgaccctgcctccccagccacctgcgtggacctgcagctcaggacctgcagtgatgccgcctacaaccacaccaccttccccaacctgcttcagcaccggtcatgggaggtggtggaggccagctccgagtacatcctgctgagcgttctacaccagctcctggaaggccagtgcaacccggacctgcggctgctgggctgtgctgtgctggccccccggtgtgagggcggctgggtgcgcagaccctgccggcacatctgcgagggcctgcgggaggtctgccagcccgccttcgacgccattgacatggcctggccctacttccttgactgccaccgctacttcacgagagaggacgagggctgctatgacccgctggagaagcttcggggaggcctggaggctgacgaggcactgccctcagggctgccgcccaccttcatccgcttcagccaccactcctacgcccagatggtgcgtgtgctgaggcggacggcctcccgctgcgcccacgtggccaggacctacagcatcgggcgcagcttcgacggcagggagctgctggtcatcgagttctccagccgccccggccagcacgagctgatggagcccgaggtgaagctcatcggcaacattcatggcaacgaggtggcgggccgggagatgctcatctacctagcccagtacctgtgctctgagtacctgcttggtaacccccgcatccagcgcctgctcaacaccacccgcatccacctgctgccctccatgaaccctgacggctatgaggtggcagctgccgagggtgccggctacaacgggtggacgagcgggaggcagaacgcgcagaacctggatctgaaccgaaatttcccggacctgacgtccgagtactaccggctggcggagacccgcggcgcacgcagcgaccacatccccatcccccagcactactggtggggtaaggtggccccggagacaaaggcaatcatgaagtggatgcagaccataccctttgtgctctcagccagccttcatgggggcgacctggtggtgtcctaccccttcgacttctccaagcacccccaggaggagaagatgttttctcccacgcccgacgagaagatgttcaagctgctgtccagagcctacgctgacgtccaccccatgatgatggacaggtcggagaataggtgtggaggcaatttcctgaagagggggagcatcatcaacggggcggactggtacagcttcacgggaggcatgtccgatttcaactacctgcacaccaactgctttgagatcacggtagagctgggctgtgtgaagttcccccccgaggaggccctgtacatactctggcagcacaacaaggagtcactcctgaatttcgtggagacggtgcaccggggcatcaaaggtgtggtgacagataaattcggcaagccagtcaaaaacgcccggatctcagtcaaaggcattcgccacgacatcaccacagccccagatggtgactactggagactgctgcccccaggtatccacattgtcattgcccaagcccctggctacgccaaagtcatcaagaaagtcatcatccccgcccggatgaagagggctggccgtgtggacttcattctgcaacctctggggatgggacccaagaactttattcatgggctgcggaggactgggccccacgacccactgggaggtgccagctctttgggggaggccacggagcccgacccgctccgggcgcgcaggcagccctcggccgacgggagtaagccctggtggtggtcctacttcacatcgctgagcacccacaggccacgctggctgctcaagtactagccccggccccagcacccgccaggatgtggagaccgaggcccatctccgcatcccgggctcctggctcttgattttgtctgccacagacatcccacaaagccgctgccattttattaaagtgttttgatccactttgcactggaa

SEQ ID NO: 922 - DNA, 491 bp, Homo sapiens
  source 1..491: mol_type = genomic DNA
ccttgctatagaagacctgggacagaggactgctgtctgccctctctggtcaccctgcctagctagaggatctgtgaccccagccatgaggaccctcgccatccttgctgccattctcctggtggccctgcaggcccaggctgagccactccaggcaagagctgatgaggttgctgcagccccggagcagattgcagcggacatcccagaagtggttgtttcccttgcatgggacgaaagcttggctccaaagcatccaggctcaaggaaaaacatggcctgctattgcagaataccagcgtgcattgcaggagaacgtcgctatggaacctgcatctaccagggaagactctgggcattctgctgctgagcttgcagaaaaagaaaaatgagctcaaaatttgctttgagagctacagggaattgctattactcctgtaccttctgctcaatttcctttcctcatcccaaataaatgccttgttacaaga

SEQ ID NO: 923 - DNA, 464 bp, Homo sapiens
  source 1..464: mol_type = genomic DNA
atggggaacccgggcggggtcgggtcggagcgcatgcgcgttgcgcgccggacgcggaacgtctgccggtgtccccgcgctgctggtcccggggtccctgaaccgcgggcggccccgctccctctgctggccatggcccccccgcccgcgtgccggtccccgatgtcaccgccgccgccgccgctgctgctgctgctgctgagtctggcgctgctgggcgcccgggcccgcgccgagcccgccgggagtgccgtccccgcgcagagccgcccatgcgtggactgccacgccttcgagttcatgcagcgcgccctgcaggacctgcggaagacagcctgcagcctggacgcgcggacggagaccctactgctgcaggcagagcgccgtgccctgtgtgcctgctggccagcggggcactgaggaccacgctgctccgtgtgaataaatgcccagtggcacgcctg

SEQ ID NO: 924 - DNA, 1607 bp, Homo sapiens
  source 1..1607: mol_type = genomic DNA
atttttacctagaaacctttctagcctctcctcatctcttgactgtcttggccttggcaagaagaatacacgtccctacccagctatcttcagctcctgtccttcctcccagctgccagagaattgtcagcaggaggaatggcaccagctgtgacccggctccttttcctccagcttgttctggggccaactctggtcatggacatcaagatgcagattggcagcaggaacttctataccttaagcattgactatcccagggttaactacccaaagggtttccggggctattgtaatggtctgatgtcctatatgcgaggcaagatgcaaaattcagattgcccaaagatccattatgtgatacatgccccttggaaggccatccagaagttctgcaagtatagtgacagcttctgtgagaattacaatgaatactgcacactcacccaggattccctccccatcacggtctgctccctgagccaccaacagccacccactagctgctactacaatagcaccctaaccaaccagaagctctacctactctgctcccgcaagtatgaagctgatccaataggtatcgctggtctctattcgggaatttaattcctgagccactccccaacctctaccaccacaggccagctgtctccatttccaacactctgatccctgtaacaagacttccttcctgacttacgaggcaggcagggtcccctcccaagagaccaggtgggtgcgaaaatgtccagggctttgatcaccatgcaaagtggtgctatcttctaggttctttccagcttgtttaccccctcttcgcccccacctcctcatcatccttcctctcccagagacagtaaaacccacccaagaagttgactgtgtccagttggcagtgactgtccacccactgggccagatcctaagtcctggatggaggcccagggcctcagctcacaccatggcaacaggcaccagctccgagtctcacctccccatccccaccagccttctcatgtcagcctcccccagttcccttataattccctccactcacccacctactcaggggatatggctagctataggaacctccctgaggccctcagactcatgttagcctcacttccccacaacccccagtttccagcctgcttctctctgtgaaatcatggtttctcccttcatataactgtcctctcctgcttcctcttaccatggagcctaggactgtctcccccacactcccaacaaccgtagtcaccctgccttcctttttccaacctctttttcttccagtcttcttaccttggctcactggcatttcaaggtatcttctctcacccattccccagaggttcctgcttcccttctcttccagaagctcctcccaaatcccccagactccagagtctgcccctgaccaggcagcgaatgaggcaggcccggctctaatcgaacataaatttctaaaaccacatctgagtatgtaagatgtaaccattgggggaaactgggtgaagggcacacgagccccctctgtaccattttttgtaacttcctgtcaacccataatcaattcaaaataaaaagttaataacaca

SEQ ID NO: 925 - DNA, 444 bp, Homo sapiens
  source 1..444: mol_type = genomic DNA
atgataataatggtgataattttcttggtgcttctgttctgggaaaatgaggtgaatgatgaagcagtgatgtcaactttagaacacttgcatgtggactaccctcagaatgacgttcccgttcctgcaaggtactgcaaccacatgatcatacaaagagttatcagggaacctgaccacacttgtaaaaaggagcatgtcttcatccatgagaggcctcgaaaaatcaatggtatttgcatttctcccaagaaggttgcttgccaaaacctttcggccattttctgctttcagagtgagacaaagttcaaaatgacagtctgtcagctcattgaaggcacaagataccctgcctgcaggtaccactattcccccacagaggggtttgttcttgtcacttgtgatgacttgaggccagatagtttccttggctatgttaaataa

SEQ ID NO: 926 - DNA, 674 bp, Homo sapiens
  source 1..674: mol_type = genomic DNA
agtcatgcgttttatggcaggccctgcagggagccagagtctgggtcccctgtgcttccacagcagcccccaagccctctacacggtcctcttaatagtgctggtcatgatgagcttggtgtttggtaagtttgttcctgtcaattgggaaccccctcaaccacttccattccccaaatacctgcgctgctaccgatgcctcttggagaccaaggagttagggtgccttctgggatctgacatctgcctcaccccagctggcagcagctgcatcactctccacaaaaagaacagcagcggttctgacgtcatggtgagtgactgccgaagtaaggagcagatgagtgattgttcaaatacccgaacttctccggtgtctggcttctggatattctctcaatactgcttcctggatttctgcaatgaccctcaaaacagagggctctatactccttagtgtgactgcagcaaactttggtgtaaaattccaccagtttccagccaccttcctgacttctatctgggcttggccaggacttctagtccctcataccagccctccttgcctccctccagccactggaccccagccttggctcttcctcttggttgacgcccttcagcacacttactgctactctgtacccccagccctactgcccaccaggtttcct

SEQ ID NO: 927 - DNA, 3971 bp, Homo sapiens
  source 1..3971: mol_type = genomic DNA
gacgctcggacaaagccaggcagcgttggcagccccagacccgaccccaaaggcctgagactggggtgactgggacctaagagaatcctgagctggaggcccccgacagctgctctcgggagccgcctcccgacacccgagccccgccggcgcctcccgctcccggctcccggctcctggctccctccgcctcccccgcccctcgccccgccgccgaagaggccccgctcccgggtcggacgcctgggtctgccgggaagagcgatgagaggtgtctgaaggtggctattcactgagcgatggggttggacttgaaggaatgccaagagatgctgcccccacccccttaggcccgagggatcaggagctatgggaccagaggccctgtcatctttactgctgctgctcttggtggcaagtggagatgctgacatgaagggacattttgatcctgccaagtgccgctatgccctgggcatgcaggaccggaccatcccagacagtgacatctctgcttccagctcctggtcagattccactgccgcccgccacagcaggttggagagcagtgacggggatggggcctggtgccccgcagggtcggtgtttcccaaggaggaggagtacttgcaggtggatctacaacgactgcacctggtggctctggtgggcacccagggacggcatgccgggggcctgggcaaggagttctcccggagctaccggctgcgttactcccgggatggtcgccgctggatgggctggaaggaccgctggggtcaggaggtgatctcaggcaatgaggaccctgagggagtggtgctgaaggaccttgggccccccatggttgcccgactggttcgcttctacccccgggctgaccgggtcatgagcgtctgtctgcgggtagagctctatggctgcctctggagggatggactcctgtcttacaccgcccctgtggggcagacaatgtatttatctgaggccgtgtacctcaacgactccacctatgacggacataccgtgggcggactgcagtatgggggtctgggccagctggcagatggtgtggtggggctggatgactttaggaagagtcaggagctgcgggtctggccaggctatgactatgtgggatggagcaaccacagcttctccagtggctatgtggagatggagtttgagtttgaccggctgagggccttccaggctatgcaggtccactgtaacaacatgcacacgctgggagcccgtctgcctggcggggtggaatgtcgcttccggcgtggccctgccatggcctgggagggggagcccatgcgccacaacctagggggcaacctgggggaccccagagcccgggctgtctcagtgccccttggcggccgtgtggctcgctttctgcagtgccgcttcctctttgcggggccctggttactcttcagcgaaatctccttcatctctgatgtggtgaacaattcctctccggcactgggaggcaccttcccgccagccccctggtggccgcctggcccacctcccaccaacttcagcagcttggagctggagcccagaggccagcagcccgtggccaaggccgaggggagcccgaccgccatcctcatcggctgcctggtggccatcatcctgctcctgctgctcatcattgccctcatgctctggcggctgcactggcgcaggctcctcagcaaggctgaacggagggtgttggaagaggagctgacggttcacctctctgtccctggggacactatcctcatcaacaaccgcccaggtcctagagagccacccccgtaccaggagccccggcctcgtgggaatccgccccactctgctccctgtgtccccaatggctctgcgttgctgctctccaatccagcctaccgcctccttctggccacttacgcccgtccccctcgaggcccgggcccccccacacccgcctgggccaaacccaccaacacccaggcctacagtggggactatatggagcctgagaagccaggcgccccgcttctgcccccacctccccagaacagcgtcccccattatgccgaggctgacattgttaccctgcagggcgtcaccgggggcaacacctatgctgtgcctgcactgcccccaggggcagtcggggatgggccccccagagtggatttccctcgatctcgactccgcttcaaggagaagcttggcgagggccagtttggggaggtgcacctgtgtgaggtcgacagccctcaagatctggtcagtcttgatttcccccttaatgtgcgtaagggacaccctttgctggtagctgtcaagatcttacggccagatgccaccaagaatgccaggaatgatttcctgaaagaggtgaagatcatgtcgaggctcaaggacccaaacatcattcggctgctgggcgtgtgtgtgcaggacgaccccctctgcatgattactgactacatggagaacggcgacctcaaccagttcctcagtgcccaccagctggaggacaaggcagccgagggggcccctggggacgggcaggctgcgcaggggcccaccatcagctacccaatgctgctgcatgtggcagcccagatcgcctccggcatgcgctatctggccacactcaactttgtacatcgggacctggccacgcggaactgcctagttggggaaaatttcaccatcaaaatcgcagactttggcatgagccggaacctctatgctggggactattaccgtgtgcagggccgggcagtgctgcccatccgctggatggcctgggagtgcatcctcatggggaagttcacgactgcgagtgacgtgtgggcctttggtgtgaccctgtgggaggtgctgatgctctgtagggcccagccctttgggcagctcaccgacgagcaggtcatcgagaacgcgggggagttcttccgggaccagggccggcaggtgtacctgtcccggccgcctgcctgcccgcagggcctatatgagctgatgcttcggtgctggagccgggagtctgagcagcgaccacccttttcccagctgcatcggttcctggcagaggatgcactcaacacggtgtgaatcacacatccagctgcccctccctcagggagcgatccaggggaagccagtgacactaaaacaagaggacacaatggcacctctgcccttcccctcccgacagcccatcacctctaatagaggcagtgagactgcaggtgggctgggcccacccagggagctgatgccccttctccccttcctggacacactctcatgtccccttcctgttcttccttcctagaagcccctgtcgcccacccagctggtcctgtggatgggatcctctccaccctcctctagccatcccttggggaagggtggggagaaatataggatagacactggacatggcccattggagcacctgggccccactggacaacactgattcctggagaggtggctgcgcccccagcttctctctccctgtcacacactggaccccactggctgagaatctgggggtgaggaagacaagaaggagaggaaaatgtttccttgtgcctgctcctgtacttgtcctcagcttgggcttcttcctcctccatcacctgaaacactggacctgggggtagccccgccccagccctcagtcacccccacttcccacttgcagtcttgtagctagaacttctctaagcctatacgtttctgtggagtaaatattgggattggggggaaagagggagcaacggcccatagccttggggttggacatctctagtgtagctgccacattgatttttctataatcacttggggtttgtacatttttggggggagagacacagatttttacactaatatatggacctagcttgaggcaattttaatcccctgcactaggcaggtaataataaaggttgagttttccacaa

SEQ ID NO: 928 - DNA, 730 bp, Homo sapiens; identical to SEQ ID NO: 455
  source 1..730: mol_type = genomic DNA

SEQ ID NO: 929 - DNA, 761 bp, Homo sapiens
  source 1..761: mol_type = genomic DNA
agagtggactgagcagccagtaggggagagagcagttaaggcacacagagcaccagctccctcctgcctgaagatgttccaccaaatttgggcagctctgctctacttctatggtattatccttaactccatctaccagtgccctgagcacagtcaactgacaactctgggcgtggatgggaaggagttcccagaggtccacttgggccagtggtactttatcgcaggggcagctcccaccaaggaggagttggcaacttttgaccctgtggacaacattgtcttcaatatggctgctggctctgccccgatgcagctccaccttcgtgctaccatccgcatgaaagatgggctctgtgtgccccggaaatggatctaccacctgactgaagggagcacagatctcagaactgaaggccgccctgacatgaagactgagctcttttccagctcatgcccaggtggaatcatgctgaatgagacaggccagggttaccagcgctttctcctctacaatcgctcaccacatcctcccgaaaagtgtgtggaggaattcaagtccctgacttcctgcctggactccaaagccttcttattgactcctaggaatcaagaggcctgtgagctgtccaataactgacctgtaacttcatctaagtccccagatgggtacaatgggagctgagttgttggagggagaagctggagacttccagctccagctcccactcaagataataaagataatttttcaatcctca

SEQ ID NO: 930 - DNA, 4070 bp, Homo sapiens
  source 1..4070: mol_type = genomic DNA
agtcagtccgcgaggagagtccgcggtggcggcgacggtggcgagagccgcgggggccgtaggaagccaaccttccctgcttctccggggccctcgccccctcctccccacaaaatcagggatggaggcgcctccccggcaccctcttagcagccctccccaggaaaagtgtcccccctgagctcctaacgctccccaacagctacccctgccccccacgccatggggcccggggccccttttgcccgggtggggtggccactgccgcttctggttgtgatggcggcaggggtggctccggtgtgggcctcccactccccccatctcccgcggcctcactcgcgggtccccccgcacccctcctcagaacggcgcgcagtgtacatcggggcactgtttcccatgagcgggggctggccagggggccaggcctgccagcccgcggtggagatggcgctggaggacgtgaatagccgcagggacatcctgccggactatgagctcaagctcatccaccacgacagcaagtgtgatccaggccaagccaccaagtacctatatgagctgctctacaacgaccctatcaagatcatccttatgcctggctgcagctctgtctccacgctggtggctgaggctgctaggatgtggaacctcattgtgctttcctatggctccagctcaccagccctgtcaaaccggcagcgtttccccactttcttccgaacgcacccatcagccacactccacaaccctacccgcgtgaaactctttgaaaagtggggctggaagaagattgctaccatccagcagaccactgaggtcttcacttcgactctggacgacctggaggaacgagtgaaggaggctggaattgagattactttccgccagagtttcttctcagatccagctgtgcccgtcaaaaacctgaagcgccaggatgcccgaatcatcgtgggacttttctatgagactgaagcccggaaagttttttgtgaggtgtacaaggagcgtctctttgggaagaagtacgtctggttcctcattgggtggtatgctgacaattggttcaagatctacgacccttctatcaactgcacagtggatgagatgactgaggcggtggagggccacatcacaactgagattgtcatgctgaatcctgccaatacccgcagcatttccaacatgacatcccaggaatttgtggagaaactaaccaagcgactgaaaagacaccctgaggagacaggaggcttccaggaggcaccgctggcctatgatgccatctgggccttggcactggccctgaacaagacatctggaggaggcggccgttctggtgtgcgcctggaggacttcaactacaacaaccagaccattaccgaccaaatctaccgggcaatgaactcttcgtcctttgagggtgtctctggccatgtggtgtttgatgccagcggctctcggatggcatggacgcttatcgagcagcttcagggtggcagctacaagaagattggctactatgacagcaccaaggatgatctttcctggtccaaaacagataaatggattggagggtcccccccagctgaccagaccctggtcatcaagacattccgcttcctgtcacagaaactctttatctccgtctcagttctctccagcctgggcattgtcctagctgttgtctgtctgtcctttaacatctacaactcacatgtccgttatatccagaactcacagcccaacctgaacaacctgactgctgtgggctgctcactggctttagctgctgtcttccccctggggctcgatggttaccacattgggaggaaccagtttcctttcgtctgccaggcccgcctctggctcctgggcctgggctttagtctgggctacggttccatgttcaccaagatttggtgggtccacacggtcttcacaaagaaggaagaaaagaaggagtggaggaagactctggaaccctggaagctgtatgccacagtgggcctgctggtgggcatggatgtcctcactctcgccatctggcagatcgtggaccctctgcaccggaccattgagacatttgccaaggaggaacctaaggaagatattgacgtctctattctgccccagctggagcattgcagctccaggaagatgaatacatggcttggcattttctatggttacaaggggctgctgctgctgctgggaatcttccttgcttatgagaccaagagtgtgtccactgagaagatcaatgatcaccgggctgtgggcatggctatctacaatgtggcagtcctgtgcctcatcactgctcctgtcaccatgattctgtccagccagcaggatgcagcctttgcctttgcctctcttgccatagttttctcctcctatatcactcttgttgtgctctttgtgcccaagatgcgcaggctgatcacccgaggggaatggcagtcggaggcgcaggacaccatgaagacagggtcatcgaccaacaacaacgaggaggagaagtcccggctgttggagaaggagaaccgtgaactggaaaagatcattgctgagaaagaggagcgtgtctctgaactgcgccatcaactccagtctcggcagcagctccgctcccggcgccacccaccgacacccccagaaccctctgggggcctgcccaggggaccccctgagccccccgaccggcttagctgtgatgggagtcgagtgcatttgctttataagtgagggtagggtgagggaggacaggccagtagggggagggaaagggagaggggaagggcaggggactcaggaagcagggggtccccatccccagctgggaagaacatgctatccaatctcatctcttgtaaatacatgtccccctgtgagttctgggctgatttgggtctctcatacctctgggaaacagacctttttctctcttactgcttcatgtaattttgtatcacctcttcacaatttagttcgtacctggcttgaagctgctcactgctcacacgctgcctcctcagcagcctcactgcatctttctcttcccatgcaacaccctcttctagttaccacggcaacccctgcagctcctctgcctttgtgctctgttcctgtccagcaggggtctcccaacaagtgctctttccaccccaaaggggcctctccttttctccactgtcataatctctttccatcttacttgcccttctatactttctcacatgtggctccccctgaattttgcttcctttgggagctcattcttttcgccaaggctcacatgctccttgcctctgctctgtgcactcacgctcagcacacatgcatcctcccctctcctgcgtgtgcccactgaacatgctcatgtgtacacacgcttttcccgtatgctttcttcatgttcagtcacatgtgctctcgggtgccctgcattcacagctacgtgtgcccctctcatggtcatgggtctgcccttgagcgtgtttgggtaggcatgtgcaatttgtctagcatgctgagtcatgtctttcctatttgcacacgtccatgtttatccatgtactttccctgtgtaccctccatgtaccttgtgtactttcttcccttaaatcatggtattcttctgacagagccatatgtaccctaccctgcacattgttatgcacttttccccaattcatgtttggtggggccatccacaccctctccttgtcacagaatctccatttctgctcagattccccccatctccattgcattcatgtactaccctcagtctacactcacaatcatcttctcccaagactgctcccttttgttttgtgtttttttgaggggaattaaggaaaaataagtgggggcaggtttggagagctgcttccagtggatagttgatgagaatcctgaccaaaggaaggcacccttgactgttgggatagacagatggacctatggggtgggaggtggtgtccctttcacactgtggtgtctcttggggaaggatctccccgaatctcaataaaccagtgaacagtgtgactcgg

SEQ ID NO: 931 - DNA, 451 bp, Homo sapiens
  source 1..451: mol_type = genomic DNA
ggggtgtagaaacaggcctgttaaggagaggccaccgggacttcagtgtctcctccatcccaggagcgcagtggccactatggggtctgggctgccccttgtcctcctcttgaccctccttggcagctcacatggaacagggccgggtatgactttgcaactgaagctgaaggagtcttttctgacaaattcctcctatgagtccagcttcctggaattgcttgaaaagctctgcctcctcctccatctcccttcagggaccagcgtcaccctccaccatgcaagatctcaacaccatgttgtctgcaacacatgacagccattgaagcctgtgtccttcttggcccgggcttttgggccggggatgcaggaggcaggccccgaccctgtctttcagcaggcccccaccctcctgagtggcaataaataaaattcggtatgctgaattcaa

SEQ ID NO: 932 - DNA, 4299 bp, Homo sapiens; identical to SEQ ID NO: 841
  source 1..4299: mol_type = genomic DNA

SEQ ID NO: 933 - DNA, 4510 bp, Homo sapiens
  source 1..4510: mol_type = genomic DNA
cccttgcaccctccttcttccctccgcccgggagctctccctggtccccggcgccgcctccttccctcccggctccccgctccccgctcccgtggctgccgccgccccggggaagaagagacaggggtggggtttgggggaagcgagagaggaggggagagaccctggccaggctggagcctggattcgaggggaggagggacgggaggaggagaaaggtggaggagaagggaggggggagcggggaggagcggccgggcctggggccttgaggcccggggagagccggggagccgggcccgcgcgccgagatgttgctgctgctgctactggcgccactcttcctccgccccccgggcgcgggcggggcgcagacccccaacgccacctcagaaggttgccagatcatacacccgccctgggaagggggcatcaggtaccggggcctgactcgggaccaggtgaaggctatcaacttcctgccagtggactatgagattgagtatgtgtgccggggggagcgcgaggtggtggggcccaaggtccgcaagtgcctggccaacggctcctggacagatatggacacacccagccgctgtgtccgaatctgctccaagtcttatttgaccctggaaaatgggaaggttttcctgacgggtggggacctcccagctctggacggagcccgggtggatttccggtgtgaccccgacttccatctggtgggcagctcccggagcatctgtagtcagggccagtggagcacccccaagccccactgccaggtgaatcgaacgccacactcagaacggcgcgcagtgtacatcggggcactgtttcccatgagcgggggctggccagggggccaggcctgccagcccgcggtggagatggcgctggaggacgtgaatagccgcagggacatcctgccggactatgagctcaagctcatccaccacgacagcaagtgtgatccaggccaagccaccaagtacctatatgagctgctctacaacgaccctatcaagatcatccttatgcctggctgcagctctgtctccacgctggtggctgaggctgctaggatgtggaacctcattgtgctttcctatggctccagctcaccagccctgtcaaaccggcagcgtttccccactttcttccgaacgcacccatcagccacactccacaaccctacccgcgtgaaactctttgaaaagtggggctggaagaagattgctaccatccagcagaccactgaggtcttcacttcgactctggacgacctggaggaacgagtgaaggaggctggaattgagattactttccgccagagtttcttctcagatccagctgtgcccgtcaaaaacctgaagcgccaggatgcccgaatcatcgtgggacttttctatgagactgaagcccggaaagttttttgtgaggtgtacaaggagcgtctctttgggaagaagtacgtctggttcctcattgggtggtatgctgacaattggttcaagatctacgacccttctatcaactgcacagtggatgagatgactgaggcggtggagggccacatcacaactgagattgtcatgctgaatcctgccaatacccgcagcatttccaacatgacatcccaggaatttgtggagaaactaaccaagcgactgaaaagacaccctgaggagacaggaggcttccaggaggcaccgctggcctatgatgccatctgggccttggcactggccctgaacaagacatctggaggaggcggccgttctggtgtgcgcctggaggacttcaactacaacaaccagaccattaccgaccaaatctaccgggcaatgaactcttcgtcctttgagggtgtctctggccatgtggtgtttgatgccagcggctctcggatggcatggacgcttatcgagcagcttcagggtggcagctacaagaagattggctactatgacagcaccaaggatgatctttcctggtccaaaacagataaatggattggagggtcccccccagctgaccagaccctggtcatcaagacattccgcttcctgtcacagaaactctttatctccgtctcagttctctccagcctgggcattgtcctagctgttgtctgtctgtcctttaacatctacaactcacatgtccgttatatccagaactcacagcccaacctgaacaacctgactgctgtgggctgctcactggctttagctgctgtcttccccctggggctcgatggttaccacattgggaggaaccagtttcctttcgtctgccaggcccgcctctggctcctgggcctgggctttagtctgggctacggttccatgttcaccaagatttggtgggtccacacggtcttcacaaagaaggaagaaaagaaggagtggaggaagactctggaaccctggaagctgtatgccacagtgggcctgctggtgggcatggatgtcctcactctcgccatctggcagatcgtggaccctctgcaccggaccattgagacatttgccaaggaggaacctaaggaagatattgacgtctctattctgccccagctggagcattgcagctccaggaagatgaatacatggcttggcattttctatggttacaaggggctgctgctgctgctgggaatcttccttgcttatgagaccaagagtgtgtccactgagaagatcaatgatcaccgggctgtgggcatggctatctacaatgtggcagtcctgtgcctcatcactgctcctgtcaccatgattctgtccagccagcaggatgcagcctttgcctttgcctctcttgccatagttttctcctcctatatcactcttgttgtgctctttgtgcccaagatgcgcaggctgatcacccgaggggaatggcagtcggaggcgcaggacaccatgaagacagggtcatcgaccaacaacaacgaggaggagaagtcccggctgttggagaaggagaaccgtgaactggaaaagatcattgctgagaaagaggagcgtgtctctgaactgcgccatcaactccagtctcggcagcagctccgctcccggcgccacccaccgacacccccagaaccctctgggggcctgcccaggggaccccctgagccccccgaccggcttagctgtgatgggagtcgagtgcatttgctttataagtgagggtagggtgagggaggacaggccagtagggggagggaaagggagaggggaagggcaggggactcaggaagcagggggtccccatccccagctgggaagaacatgctatccaatctcatctcttgtaaatacatgtccccctgtgagttctgggctgatttgggtctctcatacctctgggaaacagacctttttctctcttactgcttcatgtaattttgtatcacctcttcacaatttagttcgtacctggcttgaagctgctcactgctcacacgctgcctcctcagcagcctcactgcatctttctcttcccatgcaacaccctcttctagttaccacggcaacccctgcagctcctctgcctttgtgctctgttcctgtccagcaggggtctcccaacaagtgctctttccaccccaaaggggcctctccttttctccactgtcataatctctttccatcttacttgcccttctatactttctcacatgtggctccccctgaattttgcttcctttgggagctcattcttttcgccaaggctcacatgctccttgcctctgctctgtgcactcacgctcagcacacatgcatcctcccctctcctgcgtgtgcccactgaacatgctcatgtgtacacacgcttttcccgtatgctttcttcatgttcagtcacatgtgctctcgggtgccctgcattcacagctacgtgtgcccctctcatggtcatgggtctgcccttgagcgtgtttgggtaggcatgtgcaatttgtctagcatgctgagtcatgtctttcctatttgcacacgtccatgtttatccatgtactttccctgtgtaccctccatgtaccttgtgtactttcttcccttaaatcatggtattcttctgacagagccatatgtaccctaccctgcacattgttatgcacttttccccaattcatgtttggtggggccatccacaccctctccttgtcacagaatctccatttctgctcagattccccccatctccattgcattcatgtactaccctcagtctacactcacaatcatcttctcccaagactgctcccttttgttttgtgtttttttgaggggaattaaggaaaaataagtgggggcaggtttggagagctgcttccagtggatagttgatgagaatcctgaccaaaggaaggcacccttgactgttgggatagacagatggacctatggggtgggaggtggtgtccctttcacactgtggtgtctcttggggaaggatctccccgaatctcaataaaccagtgaacagtgtgactcgg

SEQ ID NO: 934 - DNA, 3523 bp, Homo sapiens
  source 1..3523: mol_type = genomic DNA
ctcctcctcctcccctccgtcggtcagtcagtccgcgaggagagtccgcggtggcggcgacggtggcgagagccgcgggggccgtaggaagccaaccttccctgcttctccggggccctcgccccctcctccccacaaaatcagggatggaggcgcctccccggcaccctcttagcagccctccccaggaaaagtgtcccccctgagctcctaacgctccccaacagctacccctgccccccacgccatggggcccggggccccttttgcccgggtggggtggccactgccgcttctggttgtgatggcggcaggggtggctccggtgtgggcctcccactccccccatctcccgcggcctcactcgcgggtccccccgcacccctcctcagaacggcgcgcagtgtacatcggggcactgtttcccatgagcgggggctggccagggggccaggcctgccagcccgcggtggagatggcgctggaggacgtgaatagccgcagggacatcctgccggactatgagctcaagctcatccaccacgacagcaagtgtgatccaggccaagccaccaagtacctatatgagctgctctacaacgaccctatcaagatcatccttatgcctggctgcagctctgtctccacgctggtggctgaggctgctaggatgtggaacctcattgtgctttcctatggctccagctcaccagccctgtcaaaccggcagcgtttccccactttcttccgaacgcacccatcagccacactccacaaccctacccgcgtgaaactctttgaaaagtggggctggaagaagattgctaccatccagcagaccactgaggtcttcacttcgactctggacgacctggaggaacgagtgaaggaggctggaattgagattactttccgccagagtttcttctcagatccagctgtgcccgtcaaaaacctgaagcgccaggatgcccgaatcatcgtgggacttttctatgagactgaagcccggaaagttttttgtgaggtgtacaaggagcgtctctttgggaagaagtacgtctggttcctcattgggtggtatgctgacaattggttcaagatctacgacccttctatcaactgcacagtggatgagatgactgaggcggtggagggccacatcacaactgagattgtcatgctgaatcctgccaatacccgcagcatttccaacatgacatcccaggaatttgtggagaaactaaccaagcgactgaaaagacaccctgaggagacaggaggcttccaggaggcaccgctggcctatgatgccatctgggccttggcactggccctgaacaagacatctggaggaggcggccgttctggtgtgcgcctggaggacttcaactacaacaaccagaccattaccgaccaaatctaccgggcaatgaactcttcgtcctttgagggtgtctctggccatgtggtgtttgatgccagcggctctcggatggcatggacgcttatcgagcagcttcagggtggcagctacaagaagattggctactatgacagcaccaaggatgatctttcctggtccaaaacagataaatggattggagggtcccccccagctgaccagaccctggtcatcaagacattccgcttcctgtcacagaaactctttatctccgtctcagttctctccagcctgggcattgtcctagctgttgtctgtctgtcctttaacatctacaactcacatgtccgttatatccagaactcacagcccaacctgaacaacctgactgctgtgggctgctcactggctttagctgctgtcttccccctggggctcgatggttaccacattgggaggaaccagtttcctttcgtctgccaggcccgcctctggctcctgggcctgggctttagtctgggctacggttccatgttcaccaagatttggtgggtccacacggtcttcacaaagaaggaagaaaagaaggagtggaggaagactctggaaccctggaagctgtatgccacagtgggcctgctggtgggcatggatgtcctcactctcgccatctggcagatcgtggaccctctgcaccggaccattgagacatttgccaaggaggaacctaaggaagatattgacgtctctattctgccccagctggagcattgcagctccaggaagatgaatacatggcttggcattttctatggttacaaggggctgctgctgctgctgggaatcttccttgcttatgagaccaagagtgtgtccactgagaagatcaatgatcaccgggctgtgggcatggctatctacaatgtggcagtcctgtgcctcatcactgctcctgtcaccatgattctgtccagccagcaggatgcagcctttgcctttgcctctcttgccatagttttctcctcctatatcactcttgttgtgctctttgtgcccaagatgcgcaggctgatcacccgaggggaatggcagtcggaggcgcaggacaccatgaagacagggtcatcgaccaacaacaacgaggaggagaagtcccggctgttggagaaggagaaccgtgaactggaaaagatcattgctgagaaagaggagcgtgtctctgaactgcgccatcaactccagtctcggcagcagctccgctcccggcgccacccaccgacacccccagaaccctctgggggcctgcccaggggaccccctgagccccccgaccggcttagctgtgatgggagtcgagtgcatttgctttataagtgagggtgcatgtccgttccgaggaatgggatttaatgacctttgatgccaacccatatgacagcgtgaaaaaaatcaaagaacatgtccggtctaagaccaaggttcctgtgcaggaccaggttcttttgctgggctccaagatcttaaagccacggagaagcctctcatcttatggcattgacaaagagaagaccatccaccttaccctgaaagtggtgaagcccagtgatgaggagctgcccttgtttcttgtggagtcaggtgatgaggcaaagaggcacctcctccaggtgcgaaggtccagctcagtggcacaagtgaaagcaatgatcgagactaagacgggtataatccctgagacccagattgtgacttgcaatggaaagagactggaagatgggaagatgatggcagattacggcatcagaaagggcaacttactcttcctggcatcttattgtattggagggtgaccaccctggggatggggtgttggcaggggtcaaaaagcttatttcttttaatctcttactcaacgaacacatcttctgatgatttcccaaaattaatgagaatgagatgagtagagtaagatttgggtgggatgggtaggatgaagtatattgcccaactctatgtttctttgattctaacacaattaattaagtgacatgatttttactaatgtattactgagactagtaaataaatttttaaggcaaaatagagcattcaaagcca

SEQ ID NO: 935 - DNA, 4070 bp, Homo sapiens
  source 1..4070: mol_type = genomic DNA
agtcagtccgcgaggagagtccgcggtggcggcgacggtggcgagagccgcgggggccgtaggaagccaaccttccctgcttctccggggccctcgccccctcctccccacaaaatcagggatggaggcgcctccccggcaccctcttagcagccctccccaggaaaagtgtcccccctgagctcctaacgctccccaacagctacccctgccccccacgccatggggcccggggccccttttgcccgggtggggtggccactgccgcttctggttgtgatggcggcaggggtggctccggtgtgggcctcccactccccccatctcccgcggcctcactcgcgggtccccccgcacccctcctcagaacggcgcgcagtgtacatcggggcactgtttcccatgagcgggggctggccagggggccaggcctgccagcccgcggtggagatggcgctggaggacgtgaatagccgcagggacatcctgccggactatgagctcaagctcatccaccacgacagcaagtgtgatccaggccaagccaccaagtacctatatgagctgctctacaacgaccctatcaagatcatccttatgcctggctgcagctctgtctccacgctggtggctgaggctgctaggatgtggaacctcattgtgctttcctatggctccagctcaccagccctgtcaaaccggcagcgtttccccactttcttccgaacgcacccatcagccacactccacaaccctacccgcgtgaaactctttgaaaagtggggctggaagaagattgctaccatccagcagaccactgaggtcttcacttcgactctggacgacctggaggaacgagtgaaggaggctggaattgagattactttccgccagagtttcttctcagatccagctgtgcccgtcaaaaacctgaagcgccaggatgcccgaatcatcgtgggacttttctatgagactgaagcccggaaagttttttgtgaggtgtacaaggagcgtctctttgggaagaagtacgtctggttcctcattgggtggtatgctgacaattggttcaagatctacgacccttctatcaactgcacagtggatgagatgactgaggcggtggagggccacatcacaactgagattgtcatgctgaatcctgccaatacccgcagcatttccaacatgacatcccaggaatttgtggagaaactaaccaagcgactgaaaagacaccctgaggagacaggaggcttccaggaggcaccgctggcctatgatgccatctgggccttggcactggccctgaacaagacatctggaggaggcggccgttctggtgtgcgcctggaggacttcaactacaacaaccagaccattaccgaccaaatctaccgggcaatgaactcttcgtcctttgagggtgtctctggccatgtggtgtttgatgccagcggctctcggatggcatggacgcttatcgagcagcttcagggtggcagctacaagaagattggctactatgacagcaccaaggatgatctttcctggtccaaaacagataaatggattggagggtcccccccagctgaccagaccctggtcatcaagacattccgcttcctgtcacagaaactctttatctccgtctcagttctctccagcctgggcattgtcctagctgttgtctgtctgtcctttaacatctacaactcacatgtccgttatatccagaactcacagcccaacctgaacaacctgactgctgtgggctgctcactggctttagctgctgtcttccccctggggctcgatggttaccacattgggaggaaccagtttcctttcgtctgccaggcccgcctctggctcctgggcctgggctttagtctgggctacggttccatgttcaccaagatttggtgggtccacacggtcttcacaaagaaggaagaaaagaaggagtggaggaagactctggaaccctggaagctgtatgccacagtgggcctgctggtgggcatggatgtcctcactctcgccatctggcagatcgtggaccctctgcaccggaccattgagacatttgccaaggaggaacctaaggaagatattgacgtctctattctgccccagctggagcattgcagctccaggaagatgaatacatggcttggcattttctatggttacaaggggctgctgctgctgctgggaatcttccttgcttatgagaccaagagtgtgtccactgagaagatcaatgatcaccgggctgtgggcatggctatctacaatgtggcagtcctgtgcctcatcactgctcctgtcaccatgattctgtccagccagcaggatgcagcctttgcctttgcctctcttgccatagttttctcctcctatatcactcttgttgtgctctttgtgcccaagatgcgcaggctgatcacccgaggggaatggcagtcggaggcgcaggacaccatgaagacagggtcatcgaccaacaacaacgaggaggagaagtcccggctgttggagaaggagaaccgtgaactggaaaagatcattgctgagaaagaggagcgtgtctctgaactgcgccatcaactccagtctcggcagcagctccgctcccggcgccacccaccgacacccccagaaccctctgggggcctgcccaggggaccccctgagccccccgaccggcttagctgtgatgggagtcgagtgcatttgctttataagtgagggtagggtgagggaggacaggccagtagggggagggaaagggagaggggaagggcaggggactcaggaagcagggggtccccatccccagctgggaagaacatgctatccaatctcatctcttgtaaatacatgtccccctgtgagttctgggctgatttgggtctctcatacctctgggaaacagacctttttctctcttactgcttcatgtaattttgtatcacctcttcacaatttagttcgtacctggcttgaagctgctcactgctcacacactgcctcctcagcagcctcactgcatctttctcttcccatgcaacaccctcttctagttaccacggcaacccctgcagctcctctgcctttgtgctctgttcctgtccagcaggggtctcccaacaagtgctctttccaccccaaaggggcctctccttttctccactgtcataatctctttccatcttacttgcccttctatactttctcacatgtggctccccctgaattttgcttcctttgggagctcattcttttcgccaaggctcacatgctccttgcctctgctctgtgcactcacgctcagcacacatgcatcctcccctctcctgcgtgtgcccactgaacatgctcatgtgtacacacgcttttcccgtatgctttcttcatgttcagtcacatgtgctctcgggtgccctgcattcacagctacgtgtgcccctctcatggtcatgggtctgcccttgagcgtgtttgggtaggcatgtgcaatttgtctagcatgctgagtcatgtctttcctatttgcacacgtccatgtttatccatgtactttccctgtgtaccctccatgtaccttgtgtactttcttcccttaaatcatggtattcttctgacagagccatatgtaccctaccctgcacattgttatgcacttttccccaattcatgtttggtggggccatccacaccctctccttgtcacagaatctccatttctgctcagattccccccatctccattgcattcatgtactaccctcagtctacactcacaatcatcttctcccaagactgctcccttttgttttgtgtttttttgaggggaattaaggaaaaataagtgggggcaggtttggagagctgcttccagtggatagttgatgagaatcctgaccaaaggaaggcacccttgactgttgggatagacagatggacctatggggtgggaggtggtgtccctttcacactgtggtgtctcttggggaaggatctccccgaatctcaataaaccagtgaacagtgtgactcgg

SEQ ID NO: 936 - DNA, 4299 bp, Homo sapiens
  source 1..4299: mol_type = genomic DNA
gcccgggagctctccctggtccccggcgccgcctccttccctcccggctccccgctccccgctcccgtggctgccgccgccccggggaagaagagacaggggtggggtttgggggaagcgagagaggaggggagagaccctggccaggctggagcctggattcgaggggaggagggacgggaggaggagaaaggtggaggagaagggaggggggagcggggaggagcggccgggcctggggccttgaggcccggggagagccggggagccgggcccgcgcgccgagatgttgctgctgctgctactggcgccactcttcctccgccccccgggcgcgggcggggcgcagacccccaacgccacctcagaaggttgccagatcatacacccgccctgggaagggggcatcaggtaccggggcctgactcgggaccaggtgaaggctatcaacttcctgccagtggactatgagattgagtatgtgtgccggggggagcgcgaggtggtggggcccaaggtccgcaagtgcctggccaacggctcctggacagatatggacacacccagccgctgtgtgaatcgaacgccacactcagaacggcgcgcagtgtacatcggggcactgtttcccatgagcgggggctggccagggggccaggcctgccagcccgcggtggagatggcgctggaggacgtgaatagccgcagggacatcctgccggactatgagctcaagctcatccaccacgacagcaagtgtgatccaggccaagccaccaagtacctatatgagctgctctacaacgaccctatcaagatcatccttatgcctggctgcagctctgtctccacgctggtggctgaggctgctaggatgtggaacctcattgtgctttcctatggctccagctcaccagccctgtcaaaccggcagcgtttccccactttcttccgaacgcacccatcagccacactccacaaccctacccgcgtgaaactctttgaaaagtggggctggaagaagattgctaccatccagcagaccactgaggtcttcacttcgactctggacgacctggaggaacgagtgaaggaggctggaattgagattactttccgccagagtttcttctcagatccagctgtgcccgtcaaaaacctgaagcgccaggatgcccgaatcatcgtgggacttttctatgagactgaagcccggaaagttttttgtgaggtgtacaaggagcgtctctttgggaagaagtacgtctggttcctcattgggtggtatgctgacaattggttcaagatctacgacccttctatcaactgcacagtggatgagatgactgaggcggtggagggccacatcacaactgagattgtcatgctgaatcctgccaatacccgcagcatttccaacatgacatcccaggaatttgtggagaaactaaccaagcgactgaaaagacaccctgaggagacaggaggcttccaggaggcaccgctggcctatgatgccatctgggccttggcactggccctgaacaagacatctggaggaggcggccgttctggtgtgcgcctggaggacttcaactacaacaaccagaccattaccgaccaaatctaccgggcaatgaactcttcgtcctttgagggtgtctctggccatgtggtgtttgatgccagcggctctcggatggcatggacgcttatcgagcagcttcagggtggcagctacaagaagattggctactatgacagcaccaaggatgatctttcctggtccaaaacagataaatggattggagggtcccccccagctgaccagaccctggtcatcaagacattccgcttcctgtcacagaaactctttatctccgtctcagttctctccagcctgggcattgtcctagctgttgtctgtctgtcctttaacatctacaactcacatgtccgttatatccagaactcacagcccaacctgaacaacctgactgctgtgggctgctcactggctttagctgctgtcttccccctggggctcgatggttaccacattgggaggaaccagtttcctttcgtctgccaggcccgcctctggctcctgggcctgggctttagtctgggctacggttccatgttcaccaagatttggtgggtccacacggtcttcacaaagaaggaagaaaagaaggagtggaggaagactctggaaccctggaagctgtatgccacagtgggcctgctggtgggcatggatgtcctcactctcgccatctggcagatcgtggaccctctgcaccggaccattgagacatttgccaaggaggaacctaaggaagatattgacgtctctattctgccccagctggagcattgcagctccaggaagatgaatacatggcttggcattttctatggttacaaggggctgctgctgctgctgggaatcttccttgcttatgagaccaagagtgtgtccactgagaagatcaatgatcaccgggctgtgggcatggctatctacaatgtggcagtcctgtgcctcatcactgctcctgtcaccatgattctgtccagccagcaggatgcagcctttgcctttgcctctcttgccatagttttctcctcctatatcactcttgttgtgctctttgtgcccaagatgcgcaggctgatcacccgaggggaatggcagtcggaggcgcaggacaccatgaagacagggtcatcgaccaacaacaacgaggaggagaagtcccggctgttggagaaggagaaccgtgaactggaaaagatcattgctgagaaagaggagcgtgtctctgaactgcgccatcaactccagtctcggcagcagctccgctcccggcgccacccaccgacacccccagaaccctctgggggcctgcccaggggaccccctgagccccccgaccggcttagctgtgatgggagtcgagtgcatttgctttataagtgagggtagggtgagggaggacaggccagtagggggagggaaagggagaggggaagggcaggggactcaggaagcagggggtccccatccccagctgggaagaacatgctatccaatctcatctcttgtaaatacatgtccccctgtgagttctgggctgatttgggtctctcatacctctgggaaacagacctttttctctcttactgcttcatgtaattttgtatcacctcttcacaatttagttcgtacctggcttgaagctgctcactgctcacacactgcctcctcagcagcctcactgcatctttctcttcccatgcaacaccctcttctagttaccacggcaacccctgcagctcctctgcctttgtgctctgttcctgtccagcaggggtctcccaacaagtgctctttccaccccaaaggggcctctccttttctccactgtcataatctctttccatcttacttgcccttctatactttctcacatgtggctccccctgaattttgcttcctttgggagctcattcttttcgccaaggctcacatgctccttgcctctgctctgtgcactcacgctcagcacacatgcatcctcccctctcctgcgtgtgcccactgaacatgctcatgtgtacacacgcttttcccgtatgctttcttcatgttcagtcacatgtgctctcgggtgccctgcattcacagctacgtgtgcccctctcatggtcatgggtctgcccttgagcgtgtttgggtaggcatgtgcaatttgtctagcatgctgagtcatgtctttcctatttgcacacgtccatgtttatccatgtactttccctgtgtaccctccatgtaccttgtgtactttcttcccttaaatcatggtattcttctgacagagccatatgtaccctaccctgcacattgttatgcacttttccccaattcatgtttggtggggccatccacaccctctccttgtcacagaatctccatttctgctcagattccccccatctccattgcattcatgtactaccctcagtctacactcacaatcatcttctcccaagactgctcccttttgttttgtgtttttttgaggggaattaaggaaaaataagtgggggcaggtttggagagctgcttccagtggatagttgatgagaatcctgaccaaaggaaggcacccttgactgttgggatagacagatggacctatggggtgggaggtggtgtccctttcacactgtggtgtctcttggggaaggatctccccgaatctcaataaaccagtgaacagtgtgactcgg

SEQ ID NO: 937 - DNA, 4510 bp, Homo sapiens
  source 1..4510: mol_type = genomic DNA
cccttgcaccctccttcttccctccgcccgggagctctccctggtccccggcgccgcctccttccctcccggctccccgctccccgctcccgtggctgccgccgccccggggaagaagagacaggggtggggtttgggggaagcgagagaggaggggagagaccctggccaggctggagcctggattcgaggggaggagggacgggaggaggagaaaggtggaggagaagggaggggggagcggggaggagcggccgggcctggggccttgaggcccggggagagccggggagccgggcccgcgcgccgagatgttgctgctgctgctactggcgccactcttcctccgccccccgggcgcgggcggggcgcagacccccaacgccacctcagaaggttgccagatcatacacccgccctgggaagggggcatcaggtaccggggcctgactcgggaccaggtgaaggctatcaacttcctgccagtggactatgagattgagtatgtgtgccggggggagcgcgaggtggtggggcccaaggtccgcaagtgcctggccaacggctcctggacagatatggacacacccagccgctgtgtccgaatctgctccaagtcttatttgaccctggaaaatgggaaggttttcctgacgggtggggacctcccagctctggacggagcccgggtggatttccggtgtgaccccgacttccatctggtgggcagctcccggagcatctgtagtcagggccagtggagcacccccaagccccactgccaggtgaatcgaacgccacactcagaacggcgcgcagtgtacatcggggcactgtttcccatgagcgggggctggccagggggccaggcctgccagcccgcggtggagatggcgctggaggacgtgaatagccgcagggacatcctgccggactatgagctcaagctcatccaccacgacagcaagtgtgatccaggccaagccaccaagtacctatatgagctgctctacaacgaccctatcaagatcatccttatgcctggctgcagctctgtctccacgctggtggctgaggctgctaggatgtggaacctcattgtgctttcctatggctccagctcaccagccctgtcaaaccggcagcgtttccccactttcttccgaacgcacccatcagccacactccacaaccctacccgcgtgaaactctttgaaaagtggggctggaagaagattgctaccatccagcagaccactgaggtcttcacttcgactctggacgacctggaggaacgagtgaaggaggctggaattgagattactttccgccagagtttcttctcagatccagctgtgcccgtcaaaaacctgaagcgccaggatgcccgaatcatcgtgggacttttctatgagactgaagcccggaaagttttttgtgaggtgtacaaggagcgtctctttgggaagaagtacgtctggttcctcattgggtggtatgctgacaattggttcaagatctacgacccttctatcaactgcacagtggatgagatgactgaggcggtggagggccacatcacaactgagattgtcatgctgaatcctgccaatacccgcagcatttccaacatgacatcccaggaatttgtggagaaactaaccaagcgactgaaaagacaccctgaggagacaggaggcttccaggaggcaccgctggcctatgatgccatctgggccttggcactggccctgaacaagacatctggaggaggcggccgttctggtgtgcgcctggaggacttcaactacaacaaccagaccattaccgaccaaatctaccgggcaatgaactcttcgtcctttgagggtgtctctggccatgtggtgtttgatgccagcggctctcggatggcatggacgcttatcgagcagcttcagggtggcagctacaagaagattggctactatgacagcaccaaggatgatctttcctggtccaaaacagataaatggattggagggtcccccccagctgaccagaccctggtcatcaagacattccgcttcctgtcacagaaactctttatctccgtctcagttctctccagcctgggcattgtcctagctgttgtctgtctgtcctttaacatctacaactcacatgtccgttatatccagaactcacagcccaacctgaacaacctgactgctgtgggctgctcactggctttagctgctgtcttccccctggggctcgatggttaccacattgggaggaaccagtttcctttcgtctgccaggcccgcctctggctcctgggcctgggctttagtctgggctacggttccatgttcaccaagatttggtgggtccacacggtcttcacaaagaaggaagaaaagaaggagtggaggaagactctggaaccctggaagctgtatgccacagtgggcctgctggtgggcatggatgtcctcactctcgccatctggcagatcgtggaccctctgcaccggaccattgagacatttgccaaggaggaacctaaggaagatattgacgtctctattctgccccagctggagcattgcagctccaggaagatgaatacatggcttggcattttctatggttacaaggggctgctgctgctgctgggaatcttccttgcttatgagaccaagagtgtgtccactgagaagatcaatgatcaccgggctgtgggcatggctatctacaatgtggcagtcctgtgcctcatcactgctcctgtcaccatgattctgtccagccagcaggatgcagcctttgcctttgcctctcttgccatagttttctcctcctatatcactcttgttgtgctctttgtgcccaagatgcgcaggctgatcacccgaggggaatggcagtcggaggcgcaggacaccatgaagacagggtcatcgaccaacaacaacgaggaggagaagtcccggctgttggagaaggagaaccgtgaactggaaaagatcattgctgagaaagaggagcgtgtctctgaactgcgccatcaactccagtctcggcagcagctccgctcccggcgccacccaccgacacccccagaaccctctgggggcctgcccaggggaccccctgagccccccgaccggcttagctgtgatgggagtcgagtgcatttgctttataagtgagggtagggtgagggaggacaggccagtagggggagggaaagggagaggggaagggcaggggactcaggaagcagggggtccccatccccagctgggaagaacatgctatccaatctcatctcttgtaaatacatgtccccctgtgagttctgggctgatttgggtctctcatacctctgggaaacagacctttttctctcttactgcttcatgtaattttgtatcacctcttcacaatttagttcgtacctggcttgaagctgctcactgctcacacactgcctcctcagcagcctcactgcatctttctcttcccatgcaacaccctcttctagttaccacggcaacccctgcagctcctctgcctttgtgctctgttcctgtccagcaggggtctcccaacaagtgctctttccaccccaaaggggcctctccttttctccactgtcataatctctttccatcttacttgcccttctatactttctcacatgtggctccccctgaattttgcttcctttgggagctcattcttttcgccaaggctcacatgctccttgcctctgctctgtgcactcacgctcagcacacatgcatcctcccctctcctgcgtgtgcccactgaacatgctcatgtgtacacacgcttttcccgtatgctttcttcatgttcagtcacatgtgctctcgggtgccctgcattcacagctacgtgtgcccctctcatggtcatgggtctgcccttgagcgtgtttgggtaggcatgtgcaatttgtctagcatgctgagtcatgtctttcctatttgcacacgtccatgtttatccatgtactttccctgtgtaccctccatgtaccttgtgtactttcttcccttaaatcatggtattcttctgacagagccatatgtaccctaccctgcacattgttatgcacttttccccaattcatgtttggtggggccatccacaccctctccttgtcacagaatctccatttctgctcagattccccccatctccattgcattcatgtactaccctcagtctacactcacaatcatcttctcccaagactgctcccttttgttttgtgtttttttgaggggaattaaggaaaaataagtgggggcaggtttggagagctgcttccagtggatagttgatgagaatcctgaccaaaggaaggcacccttgactgttgggatagacagatggacctatggggtgggaggtggtgtccctttcacactgtggtgtctcttggggaaggatctccccgaatctcaataaaccagtgaacagtgtgactcgg

SEQ ID NO: 938 - DNA, 3523 bp, Homo sapiens
  source 1..3523: mol_type = genomic DNA
ctcctcctcctcccctccgtcggtcagtcagtccgcgaggagagtccgcggtggcggcgacggtggcgagagccgcgggggccgtaggaagccaaccttccctgcttctccggggccctcgccccctcctccccacaaaatcagggatggaggcgcctccccggcaccctcttagcagccctccccaggaaaagtgtcccccctgagctcctaacgctccccaacagctacccctgccccccacgccatggggcccggggccccttttgcccgggtggggtggccactgccgcttctggttgtgatggcggcaggggtggctccggtgtgggcctcccactccccccatctcccgcggcctcactcgcgggtccccccgcacccctcctcagaacggcgcgcagtgtacatcggggcactgtttcccatgagcgggggctggccagggggccaggcctgccagcccgcggtggagatggcgctggaggacgtgaatagccgcagggacatcctgccggactatgagctcaagctcatccaccacgacagcaagtgtgatccaggccaagccaccaagtacctatatgagctgctctacaacgaccctatcaagatcatccttatgcctggctgcagctctgtctccacgctggtggctgaggctgctaggatgtggaacctcattgtgctttcctatggctccagctcaccagccctgtcaaaccggcagcgtttccccactttcttccgaacgcacccatcagccacactccacaaccctacccgcgtgaaactctttgaaaagtggggctggaagaagattgctaccatccagcagaccactgaggtcttcacttcgactctggacgacctggaggaacgagtgaaggaggctggaattgagattactttccgccagagtttcttctcagatccagctgtgcccgtcaaaaacctgaagcgccaggatgcccgaatcatcgtgggacttttctatgagactgaagcccggaaagttttttgtgaggtgtacaaggagcgtctctttgggaagaagtacgtctggttcctcattgggtggtatgctgacaattggttcaagatctacgacccttctatcaactgcacagtggatgagatgactgaggcggtggagggccacatcacaactgagattgtcatgctgaatcctgccaatacccgcagcatttccaacatgacatcccaggaatttgtggagaaactaaccaagcgactgaaaagacaccctgaggagacaggaggcttccaggaggcaccgctggcctatgatgccatctgggccttggcactggccctgaacaagacatctggaggaggcggccgttctggtgtgcgcctggaggacttcaactacaacaaccagaccattaccgaccaaatctaccgggcaatgaactcttcgtcctttgagggtgtctctggccatgtggtgtttgatgccagcggctctcggatggcatggacgcttatcgagcagcttcagggtggcagctacaagaagattggctactatgacagcaccaaggatgatctttcctggtccaaaacagataaatggattggagggtcccccccagctgaccagaccctggtcatcaagacattccgcttcctgtcacagaaactctttatctccgtctcagttctctccagcctgggcattgtcctagctgttgtctgtctgtcctttaacatctacaactcacatgtccgttatatccagaactcacagcccaacctgaacaacctgactgctgtgggctgctcactggctttagctgctgtcttccccctggggctcgatggttaccacattgggaggaaccagtttcctttcgtctgccaggcccgcctctggctcctgggcctgggctttagtctgggctacggttccatgttcaccaagatttggtgggtccacacggtcttcacaaagaaggaagaaaagaaggagtggaggaagactctggaaccctggaagctgtatgccacagtgggcctgctggtgggcatggatgtcctcactctcgccatctggcagatcgtggaccctctgcaccggaccattgagacatttgccaaggaggaacctaaggaagatattgacgtctctattctgccccagctggagcattgcagctccaggaagatgaatacatggcttggcattttctatggttacaaggggctgctgctgctgctgggaatcttccttgcttatgagaccaagagtgtgtccactgagaagatcaatgatcaccgggctgtgggcatggctatctacaatgtggcagtcctgtgcctcatcactgctcctgtcaccatgattctgtccagccagcaggatgcagcctttgcctttgcctctcttgccatagttttctcctcctatatcactcttgttgtgctctttgtgcccaagatgcgcaggctgatcacccgaggggaatggcagtcggaggcgcaggacaccatgaagacagggtcatcgaccaacaacaacgaggaggagaagtcccggctgttggagaaggagaaccgtgaactggaaaagatcattgctgagaaagaggagcgtgtctctgaactgcgccatcaactccagtctcggcagcagctccgctcccggcgccacccaccgacacccccagaaccctctgggggcctgcccaggggaccccctgagccccccgaccggcttagctgtgatgggagtcgagtgcatttgctttataagtgagggtgcatgtccgttccgaggaatgggatttaatgacctttgatgccaacccatatgacagcgtgaaaaaaatcaaagaacatgtccggtctaagaccaaggttcctgtgcaggaccaggttcttttgctgggctccaagatcttaaagccacggagaagcctctcatcttatggcactgacaaagagaagaccatccaccttaccctgaaagtggtgaagcccagtgatgaggagctgcccttgtttcttgtggagtcaggtgatgaggcaaagaggcacctcctccaggtgcgaaggtccagctcagtggcacaagtgaaagcaatgatcgagactaagacgggtataatccctgagacccagattgtgacttgcaatggaaagagactggaagatgggaagatgatggcagattacggcatcagaaagggcaacttactcttcctggcatcttattgtattggagggtgaccaccctggggatggggtgttggcaggggtcaaaaagcttatttcttttaatctcttactcaacgaacacatcttctgatgatttcccaaaattaatgagaatgagatgagtagagtaagatttgggtgggatgggtaggatgaagtatattgcccaactctatgtttctttgattctaacacaattaattaagtgacatgatttttactaatgtattactgagactagtaaataaatttttaaggcaaaatagagcattcaaagcca

SEQ ID NO: 939 - DNA, 3650 bp, Homo sapiens
  source 1..3650: mol_type = genomic DNA
ttatttctctgaaacctaaaatccctctcagcccagaagtgacacacaccaaacctgccccagaacctcagactctactgccatcacagtcaacaataggacctgaaacaccaggaaccaaaccttcaacaacattagctctggaacctgccacgatacaaccggagcccttggtgcccacaactgcctcaaaaccatctgagagacctaaaaccacacacagaccagatgcacctcaaattcagcctggttcaaaaccaccaaaacaattacttcctaaaccccaaaccacagcagaaccagacatgccaccaactaaatccgtctctgagcctgttccatttgaaactgaagctccctcaatgaccatagttcccaccacagacattgagcctgtaactgtgagaactgaggctacagtgacaacattagctccaaaaacatcgcaacgaacaagaacacgtcgtccacgtcccaaacataaaaccacgccacgcccagagacactgcagaccaaactagactttggacctattactcctgggacatcttcagctccaacaacaacaacaaaaagaacccgtcgtccacatcccaaacctaaaaccacgccccatccagaagtacctcaaactaaactggttcctgccacaatcctcgaaccagttcttagaactgaggcttcagggacaacagcagttcctgctacaatctttgaaccagtttctcctataaaagaggctccagggacaacattcgttcctgttacagacctcgagcctgttacttttagaactgagatccctgcaacaaccttagctaccaaaacatcaaaaagaacccgccctccacgtcccagacctaaaactacaccgagccctcaggcacctgagaccaaacctgttcctgctacagtcctagaacctgtcactcttagacctgaggcctcaacaacattagcttccaaaacatcacaacggacacgtcgtccacgtctcagaacaaaaaccacaccacgtcctgaagcacctgaatccaaaccagttcctactgcggagctcaaacctgttacactcagaactgagacttgggtgacaacacaagctcctaaaacatcacaacgaactcgtcgtccacgtcccaaaactaaaaccacaccaagtcctgaggttcctcaaaccaaactggttccttctacagatcttgaacctggtactctcagaactgaagctccaaaaaccatggttgttactacagtccttgaacctgacacttttagaaccaagtttccagaaacaacgttagctcctaaaacacaacggacacgtcgtccccgtcccagacccaaaactacatcaagtcctgaagtacctcagaacaaatcggtttctgttacaggctttgaacctgttgttcatagtactgatgctccaggaacaacatttgctctgactgaactgcaaactcttattttgaaaccagtgacatcaccaagcctagaaatgacagaaagtcaacctgtttctgatgttctggaatcggttacacttagtactgagtcaccaaaggagaccatagcaccagccaaaacagactatgtatatcccactgccaaagcaccactctggccagaggagccaaagactgaagttgtggaatctattacatatgtatctgaaccacctgagaccacactagaaacgtcgcctctgccttctcaatctataaccctacccagcccagatgagcctcagactgaacctgctcccaagcagacaccacgtgctcctcctaagccaaaaacatcaccacgcccaagaatcccacaaacacaaccagttcctaaggtgccccagcgtgttactgcaaaaccaaaaacgtcaccaagtccagaagtgtcatacaccacacctgctccaaaagatgtgctccttcctcataaaccataccctgaggtctctcagagcgaacctgctcctctagagacacgaggcatcccttttatacccatgatttccccaagtcctagtcaagaggaactacagaccactctggaagaaacagaccaatccacccaagaacctttcacaactaagattccacgaacaactgaactagcaaagacaactcaggcgccacacagattttatactactgtgaggcccagaacatctgacaagccacacatcagacctggggtcaagcaagcacccaggccatcaggtgctgatagaaatgtatcagtggactctacccaccccactaaaaagccagggactcgccgcccacccttgccacccagacctacacacccacgaagaaaacctttaccaccaaataatgtcactggaaagccaggaagtgcaggaatcatttcatcaggcccaataactacaccacccctgaggtcaacacccaggcctactggaactcccttggagagaatagagacagatataaagcaaccaacagttcctgcctctggagaagaactggaaaatataactgactttagctcaagcccaacaagagaaactgatcctcttgggaagccaagattcaaaggacctcatgtgcgatacatccaaaagcctgacaacagtccctgctccattactgactctgtcaaacggttccccaaagaggaggccacagaggggaatgccaccagcccaccacagaacccacccaccaacctcactgtggtcaccgtggaagggtgcccctcatttgtcatcttggactgggaaaagccactaaatgacactgtcactgaatatgaagttatatccagagaaaatgggtcattcagtgggaagaacaagtccattcaaatgacaaatcagacattttccacagtagaaaatctgaaaccaaacacgagttatgaattccaggtgaaacccaaaaacccgcttggtgaaggcccggtcagcaacacagtggcattcagtactgaatcagcggacccaagagtgagtgagccagtttctgcaggaagagatgccatctggactgaaagaccctttaattcagactcttactcagagtgtaagggcaaacaatatgtcaaaaggacatggtataaaaaatttgtaggagtgcagctgtgcaactctctcagatacaagatttacttgagcgactccctcacaggaaaattttataacataggtgatcagaggggccatggagaagatcactgccagtttgtggattcatttttagatggacgcactgggcagcaactcacttctgaccagttaccaatcaaagaaggttatttcagagcagttcgccaggaacctgtccaatttggagaaataggtggtcacacccaaatcaattatgttcagtggtatgaatgtgggactacaattcctggaaaatggtagatgctgcacaaagttaccttctgtttcatcattgcaaacaaaaatcattgaaaatactatgccgcattcatttaaagctattttgtttactatgtataaaagtctacaatctaattaatagcaatactagatgtttattattagaaaagattgctgagagtatttatcaggttttacaaagtcattttaagaaagcaagatactgatgttaacagaataacatttttggggaagctggctccctattcatggtat

SEQ ID NO: 940 - DNA, 4272 bp, Homo sapiens
  source 1..4272: mol_type = genomic DNA
atggcagcaatgtatcaccaaaccagtacttccctcttcccgctgaagggaaattcacagaagctatagttgatgcagagccgaaatatctgatagttgtgcgacctgctccacctccaagtcaaaagaagtcatgttcaggtaaaactcgttctcgcaaacctctgcagctggtggttggcactctgacaccgagctcggtcttcctgtcctggggtttcctcatcaacccacaccatgactggacattgccaagtcactgtcccaatgacagattttatacaattcgctatcgagaaaaggataaagaaaagaagtggatttttcaaatctgtccagccactgaaacaattgtggaaaacctaaagcccaacacagtttatgaatttggagtgaaagacaatgtggaaggtggaatttggagtaagattttcaatcacaagactgttgttggaagtaaaaaagtaaatgggaaaatccaaagtacctatgaccaagaccacacagtgccagcatatgtcccaaggaaactaatcccaataacaatcatcaagcaagtgattcagaatgttacccacacctagtccagaagtgcccaagtccaaacccgctctggaacctgccacgatacaaccggagcccttggtgcccacaactgcctcaaaaccatctgagagacctaaaaccacacacagaccagatgcacctcaaattcagcctgtctctgagcctgttccatttgaaactgaagctccctcaatgaccatagttcccaccacagacattgagcctgtaactgtgagaactgaggctacagtgacaacattagctccaaaaacatcgcaacgaacaagaacacgtcgtccacgtcccaaacataaaaccacgccacgcccagagacactgcagaccaaactagactttggacctattactcctgggacatcttcagctccaacaacaacaacaaaaagaacccgtcgtccacatcccaaacctaaaaccacgccccatccagaagtacctcaaactaaactggctcccaaagtgcctcaacgaactcatcgtccacatcccaaacctaaaaccacactgagtcccgaagagcttcagactgaactggttcctgttacagacctcgagcctgttacttttagaactgagatccctgcaacaaccttagctaccaaaacatcaaaaagaacccgccctccacgtcccagacctaaaactacaccgagccctcaggcacctgagaccaaacctgttcctgctacagtcctagaacctgtcactcttagacctgaggcctcaacaacattagcttccaaaacatcacaacggacacgtcgtccacgtctcagaacaaaaaccacaccacgtcctgaagcacctgaatccaaaccagctcccaagcagacaccacgtgctcctcctaagccaaaaacatcaccacgcccaagaatcccacaaacacaaccagttcctaaggtgccccagcgtgttactgcaaaaccaaaaacgtcaccaagtccagaagtgtcatacaccacacctgctccaaaagatgtgctccttcctcataaaccataccctgaggtctctcagagcgaacctgctcctctagagacacgaggcatcccttttatacccatgatttccccaagtcctagtcaagaggaactacagaccactctggaagaaacagaccaatccacccaagaacctttcacaactaagattccacgaacaactgaactagcaaagacaactcaggcgccacacagattttatactactgtgaggcccagaacatctgacaagccacacatcagacctgttctgaataggacaactacaagacctactaggcccaaacccagtgggatgcccagtgggaatggagtgggaacaggggtcaagcaagcacccaggccatcaggtgctgatagaaatgtatcagtggactctacccaccccactaaaaagccagggactcgccgcccacccttgccacccagacctacacacccacgaagaaaacctttaccaccaaataatgtcactggaaagccaggaagtgcaggaatcatttcatcaggcccaataactacaccacccctgaggtcaacacccaggcctactggaactcccttggagagaatagagacagatataaagcaaccaacagttcctgcctctggagaagaactggaaaatataactgactttagctcaagcccaacaagagaaactgatcctcttgggaagccaagattcaaaggacctcatgtgcgatacatccaaaagcctgacaacagtccctgctccattactgactctgtcaaacggttccccaaagaggaggccacagaggggaatgccaccagcccaccacagaacccacccaccaacctcactgtggtcaccgtggaagggtgcccctcatttgtcatcttggactgggaaaagccactaaatgacactgtcactgaatatgaagttatatccagagaaaatgggtcattcagtgggaagaacaagtccattcaaatgacaaatcagacattttccacagtagaaaatctgaaaccaaacacgagttatgaattccaggtgaaacccaaaaacccgcttggtgaaggcccggtcagcaacacagtggcattcagtactgaatcagcggacccaagagtgagtgagccagtttctgcaggaagagatgccatctggactgaaagaccctttaattcagactcttactcagagtgtaagggcaaacaatatgtcaaaaggacatggtataaaaaatttgtaggagtgcagctgtgcaactctctcagatacaagatttacttgagcgactccctcacaggaaaattttataacataggtgatcagaggggccatggagaagatcactgccagtttgtggattcatttttagatggacgcactgggcagcaactcacttctgaccagttaccaatcaaagaaggttatttcagagcagttcgccaggaacctgtccaatttggagaaataggtggtcacacccaaatcaattatgttcagtggtatgaatgtgggactacaattcctggaaaatggtagatgctgcacaaagttaccttctgtttcatcattgcaaacaaaaatcattgaaaatactatgccgcattcatttaaagctattttgtttactatgtataaaagtctacaatctaattaatagcaatactagatgtttattattagaaaagattgctgagagtatttatcaggttttacaaagtcattttaagaaagcaagatactgatgttaacagaataacatttttggggaagctggctccctattcatggtattttaagagatcatttgtatattatttatcacactgttgtaatgatgttttgagatacttttataacaaaattaacatcaaaaaggtatatactttttaaaaaaaatttacttttattgatgtgtactcttcctattgatgagttaattccataaatctctacttagtttaacttattggatcaaattatcttcagcatgtatatctggggaaaaaaggtccgaattttcacatttatatttaaacttcaattttttatatttaaacttcaattttttagcaacagctgaatagctttgcggaggagtttaatagttacacattcatgctaatatacatttcctttaaacatccacaaattcttaaaaagattgaatcagtaaatttcatttcagctaaaaatggagtctaatatattgtttcaaaagatacatttttacccaccataaatgttacaatatctgaatatgctttgtcaaactatccctttatgcaatcgtcttcatattgtttttatgattctaatcaagctgtatgtagagactgaatgtgaagtcaagtctgagcacaaaaagataatgcacgatgagattgcctaccattttataggatatttactatgtatttatacgttaagacctctatgaatgaatgtatcagagaatgtctttgtaactgtttaattcaatctgtaataaaaatctaactaactaactcatttatttctattaaaaaggtattgtcctttaggcggggaatgggaatccttgctgcactgttgcagtcattctgaaaggacctttccctgtacttacctttcaacatgcttcaatcttatcaacgctacattttgtatttttcaaacaagtataaattctgcaataaagagatgtagttttttttt

SEQ ID NO: 941 - DNA, 4731 bp, Homo sapiens
  source 1..4731: mol_type = genomic DNA
ctttccggccctggtgagggagctggcggactcgcgcgaacgttcgcgggagaacgccaggaagggcagatggttcctcgactctgagcccctccctgctgcgctcgccgggtcgaggccgctcgccgggctgaagccgctccgagcgtcgggccccgcgccctggccctcctgggtgtagtcccggtcctgcctctgcggggcccgagcccgcccacggcgccggctggccaaggtgtcccagctgctccttggcgccccctggcccagctcccgcgcccgaggtttccggtgagcggcagtagccggttatgacgactccctcctctggaacagccgccgtctcctccgcctcctcctcggtagttcacggctgccccggctccaggcctgtggaaatcgaatcaagggtttctggagtggagtgattccagctgctttgagctgaaggaaaagtagcctggccagtaaagcgtccgtgtgctggaggagtgcagccacccatcccggcgggccttgcaggacgaccgacaccaggaaggctttgtgccaggcccagcagccacccccagccgccttatgcaagtgggtacatgccctcgccagacgccagctttctgatctgcgtctttagattttttccatcgcctaagcgttacttctccactgatcggttttagagacctgaaacatcacagaagcttctgagtggttctgaagattcaagaggtttgcaggttgctatgttaatgttgtttgtctttggagtcttacttcatgaagtctcactgagtggtcagaatgaagctcctcctaatactcacagcattccaggcgaacctctgtataactatgccagcatccgcttgccagaggagcacattcccttctttttgcacaacaataggcatattgccactgtctgtaggaaagactctctttgtccatataagaaacacctagagaagctaaagtactgctggggttatgagaaatcctgcaaaccagagttcaggtttggttacccagtttgcagctatgtcgacatgggatggacggacactcttgagtcagctgaggacatattttggaaacaagctgactttggatatgccagagagaggctggaggagatgcatgtgctctgtcagcctaaggaaacgagtgactcaagtctggtgtgttcccgttatcttcagtactgcagagcaaccaatctctatcttgatttaagaaacatcaagagaaatcatgacagatttaaggaggactttttccagagtggtgaaattggagggcactgtaaacttgacatccgtacattgacgtctgaaggtcagcgcaaaagccctctgcagtcatggtttgctgagctacaaagctatactcagctcaacttcagacctatagaagatgctaaatgtgacattgtcattgaaaaaccaacatatttcatgaaattagatgcaggtgttaacatgtatcaccacttctgtgatttcatcaatctttatattactcagcacgttaataactcattcagtactgacgtgtacatcgtgatgtgggacaccagttcttacggatatggtgacctattctccgacacatggaatgcatttactgattatgacgttatacatttgaaaacttatgattccaaaagggtatgttttaaagaagctgttttttcattactcccccgcatgaggtatgggctgttctataatactcctctgatatctggctgtcaaaatactggactattcagggcatttgcccagcatgtactacacagactaaacatcacacaagaaggacctaaggatggaaaaattcgagtcaccattcttgcacggagcacagaataccggaaaatccttaaccaaaatgagcttgtaaatgcactgaaaacagtatctacatttgaagtccagattgttgattacaagtatagagaacttgggtttttagatcaactaaggatcacacacaacacggacatatttattggaatgcatggagctggtctgacccatttacttttccttccagactgggctgctgtatttgaactgtacaactgtgaagatgaacgctgttacttagacttggccaggctgagaggcgttcactacatcacttggcgacggcagaacaaagtctttcctcaggataagggccaccatccaaccctgggggagcacccgaagttcaccaactactctttcgatgtagaagaatttatgtatcttgtccttcaggctgcagaccacgtattgcaacacccaaagtggccatttaagaagaaacatgatgagctataaatatgctgagtctgtttgcaaaaagagagtgtttaaacactccaacacccagacttagaattaaatcagtaaagcaatctgttatttcctatccccgaattaccttttctatgccaaaacataccttcaggatattgttatgtgttgtatagatgttaagtgtttcatgtggtttttgtgtcattgctatttatcaatagcaataattttgcactgaaaactttttatagttcaaaaattaagcatggactccccagtatactttaactttctttctttctttttttttttttggagacagagtctcactgtcacccaggctggagtgcagtggcatgatctcagtttatgcaacttctgcctccccaggttcaagcgattcttttgcctcagccacctgactagctgggattgcagcctgcaccaccacacctggctaaatttttgttgttgtcgttgagatacagtttcactctgtcacccaggctggagtgcagtggcatgatctcagctcactgcaacctctgccttctggattcaagtgattcttgtgccttagcctcccaagtagctgggattacaggcgtgcaccaccacgcccagttgatttttgtatttttgatagagacggagtttcaccatgttggccaggctggtctcgaactctgggttcaagaaatcctcccaccttgcctcccaaagtgctgggattacaggtgtgagccaccacgcatggccctgaactttctctttttaggaataccaaagttttcaactttttcagctttagaatttgtaaatatttttgtagaatatcatatgactgtaattccagagtgttccaacttgtttatgatatatttgggtaaatttacaactgttcttttatttgccataatctggttataacactgtttgtggtaggaaaggaaaacatgcaaaacatacacacacacacacacacacacacacacacgcagagttgtgattctcagtaccaagctataggaccatgttatagatcagcgtttagtcacctccaggttatatgcatcgagaacctgaataaatcatgccactatattaatttatattacatgtttcatatttaaatcatgttttcctaaaatgtagcaactacatgtgataaaagcaaattagaacattctgtaggactgtcttgcataccttctgtctggtttccactgattccttcttagccatggagagcatttgtgattaattaatttatatatgaaataatggtttccattttatgcgagtatttgtaactgcatataccagtgcgtgtgcgtctacctctgtcagcatgaaagtattccagtctttaatttcaaaaacttcaaattagcctcatgaagagaatttttccctgtgaaaagtaagaccaagaaaaaacaaactaaagacatgtgacttattcaatgaaagtgaaaaagaagctctaaaacagtgtcattgattaaaaagaatatctggaatgtagccccactctttgagtgggattcatttcttactgcttatgaactttcaatttagtagtcagaaaccatggatttattttactgcacaatgtgaagtttacattttattaacacttgagtagtctgatttagagactagttacttctattttttaaaataatggagtaacaaattacagaatagctaaataattttttaaaaatattttacagttgtaaaaaatatccatcagaaaaatgacacacaaaacaaaatatctggacctttacagaagacgtttgctgacccccactttaaaggattggaacagtcttctagaattgaggaatatttattaaaatacctgtaaagaaaatagtgaatcactgtagcaatggctttgattcagaccttaaaatcacataagaagaattacaacatgttatggatttttaagtggcaggtattgtaactgttttttgtgtgcaaaatactgagtaaccactgggaaaatatttcagatgaaagggatgacaaaagcatgttgcgctttgcatcagcaaggcattgacttctgaaaaaatgatctgaaaaaagtttcaccgtttgtcttcttacctcattttaagaagcatgtgaaaatgggatactatagactactgagaatttcagaaattgagaacaatttcataataaaacggctatatttgaagagagaatacattttatataaacaggaaaatacatttgacactttatggaattttatgagactttttgtgggaacagaaggtcttcaaattgtaaaatgtaaagattgctctttttattaagtctttaacagggatgtatttcattgtatgttttgggtatggctttggaataaatcattttatattttatttgaatatcagaacca

SEQ ID NO: 942 - DNA, 2704 bp, Homo sapiens
  source 1..2704: mol_type = genomic DNA
cgagggctcctgctggtactgtgttcgctgctgcacagcaaggccctgccacccaccttcaggccatgcagccatgttccgggagccctaattgcacagaagcccatggggagctccagactggcagccctgctcctgcctctcctcctcatagtcatcgacctctctgactctgctgggattggctttcgccacctgccccactggaacacccgctgtcctctggcctcccacacggatgacagtttcactggaagttctgcctatatcccttgccgcacctggtgggccctcttctccacaaagccttggtgtgtgcgagtctggcactgttcccgctgtttgtgccagcatctgctgtcaggtggctcaggtcttcaacggggcctcttccacctcctggtgcagaaatccaaaaagtcttccacattcaagttctataggagacacaagatgccagcacctgctcagaggaagctgctgcctcgtcgtcacctgtctgagaagagccatcacatttccatcccctccccagacatctcccacaagggacttcgctctaaaaggacccaaccttcggatccagagacatgggaaagtcttcccagattggactcacaaaggcatggaggacccgagttctcctttgatttgctgcctgaggcccgggctattcgggtgaccatatcttcaggccctgaggtcagcgtgcgtctttgtcaccagtgggcactggagtgtgaagagctgagcagtccctatgatgtccagaaaattgtgtctgggggccacactgtagagctgccttatgaattccttctgccctgtctgtgcatagaggcatcctacctgcaagaggacactgtgaggcgcaaaaaatgtcccttccagagctggccagaagcctatggctcggacttctggaagtcagtgcacttcactgactacagccagcacactcagatggtcatggccctgacactccgctgcccactgaagctggaagctgccctctgccagaggcacgactggcataccctttgcaaagacctcccgaatgccacagctcgagagtcagatgggtggtatgttttggagaaggtggacctgcacccccagctctgcttcaagttctcttttggaaacagcagccatgttgaatgcccccaccagactgggtctctcacatcctggaatgtaagcatggatacccaagcccagcagctgattcttcacttctcctcaagaatgcatgccaccttcagtgctgcctggagcctcccaggcttggggcaggacactttggtgccccccgtgtacactgtcagccaggcccggggctcaagcccagtgtcactagacctcatcattcccttcctgaggccagggtgctgtgtcctggtgtggcggtcagatgtccagtttgcctggaagcacctcttgtgtccggatgtctcttacagacacctggggctcttgatcctggcactgctggccctcctcaccctactgggtgttgttctggccctcacctgccggcgcccacagtcaggcccgggcccagcgcggccagtgctcctcctgcacgcggcggactcggaggcgcagcggcgcctggtgggagcgctggctgaactgctacgggcagcgctgggcggcgggcgcgacgtgatcgtggacctgtgggaggggaggcacgtggcgcgcgtgggcccgctgccgtggctctgggcggcgcggacgcgcgtagcgcgggagcagggcactgtgctgctgctgtggagcggcgccgaccttcgcccggtcagcggccccgacccccgcgccgcgcccctgctcgccctgctccacgctgccccgcgcccgctgctgctgctcgcttacttcagtcgcctctgcgccaagggcgacatccccccgccgctgcgcgccctgccgcgctaccgcctgctgcgcgacctgccgcgtctgctgcgggcgctggacgcgcggcctttcgcagaggccaccagctggggccgccttggggcgcggcagcgcaggcagagccgcctagagctgtgcagccggctcgaacgagaggccgcccgacttgcagacctaggttgagcagagctccaccgcagtcccgggtgtctgcggccgcaacgcaacggacactggctggaaccccggaatgagccttcgaccctgaaatccttggggtgcctcgaggacgactggccgaaaagccgcattccctgcctcacaggccggaagtcccagcccagtccccgcgcgcgtccctcttcctcctcatactttcccttgactgagagctcctctaacccctgttctgatgggggagggcggtcttcccacttcctctccagaactccagaaagagcagtgtgcttatgcttcagtccaggctggagaggttggggccggggtagggaggcaggagccatgtcagttctgaaggagggtgaggcggtgggggattgcagggggcggctgagagaaaacctccttgggggccagggattccctttcccactctgaggctctggccagagggagagaggactctggacctaggaaaagaggcttttggctccaggtggtcaggacagtgggggttgggggtggggtgggtgggtgctggcggtggggaccaagatccggaaagatgaataaagacaaacatgacaaactaagaaaa

SEQ ID NO: 943 - DNA, 1483 bp, Homo sapiens
  source 1..1483: mol_type = genomic DNA
gccctggtgttcccacctcctcagagccatgaggcaggaatgttctccttatgtgactaggcacaggttccaaatggggaggggactggctcagcatccggagccaaaacaggaatagaactgggagctgagcctggagcggttctgggcttttggttctctgcatcaacacagccagcatgcctatgatttctgtgctgggcaaaatgtttctgtggcagcgtgaagggcctggaggacgatggacttgtcagacaagtcgcagagtgtcctcggaccccgcttgggctgtggagtggatcgaacttcctcggggtctctctctatcctctttgggatctgctcgaaccctccgaggctggagcaggtcctcccgcccttcctcggtggacagtcaggacttgccagaggtgaatgttggagacacagtcgcgatgctgcccaagtcccggcgagccctaactatccaggagatcgctgcgctggccaggtcctccctgcatggtatttcccaggtggtgaaggaccacgtgaccaagcctaccgccatggcccagggccgagtggctcacctcattgagtggaagggctggagcaagccgagtgactcacctgctgccctggaatcagccttttcctcctattcagacctcagcgagggcgaacaagaggctcgctttgcagcaggagtggctgagcagtttgccatcgcggaagccaagctccgagcatggtcttcggtggatggcgaggactccactgatgactcctatgatgaggactttgctgggggaatggacacagacatggctgggcagctgcccctggggccgcacctccaggacctgttcaccggccaccggttctcccggcctgtgcgccagggctccgtggagcctgagagcgactgctcacagaccgtgtccccagacaccctgtgctctagtctgtgcagcctggaggatgggttgttgggctccccggcccggctggcctcccagctgctgggcgatgagctgcttctcgccaaactgccccccagccgggaaagtgccttccgcagcctgggcccactggaggcccaggactcactctacaactcgcccctcacagagtcctgcctttcccccgcggaggaggagccagccccctgcaaggactgccagccactctgcccaccactaacgggcagctgggaacggcagcggcaagcctctgacctggcctcttctggggtggtgtccttagatgaggatgaggcagagccagaggaacagtgacccacatcatgcctggcagtggcatgcatcccccggctgctgccaggggcagagcctctgtgcccaagtgtgggctcaaggctcccagcagagctccacagcctagagggctcctgggagcgctcgcttctccgttgtgtgttttgcatgaaagtgtttggagaggaggcaggggctgggctgggggcgcatgtcctgccccc

SEQ ID NO: 944 - DNA, 5256 bp, Homo sapiens
  source 1..5256: mol_type = genomic DNA
cacatgccccgtttgctgcctgaacctctccacaaagactcccagatcctgtagaattgaatttaatcatctcctgacaaaagaatgcaatttcaactgaccctttttttgcaccttgggtggctcagttactcaaaagctcaagatgactgcaacaggggtgcctgtcatcccaccactggtgatctcctggtgggcaggaacacgcagcttatggcttcttctacctgtgggctgagcagagcccagaaatactgcatcctcagttacctggagggggaacaaaaatgcttcatctgtgactctagatttccatatgatccgtatgaccaacccaacagccacaccattgagaatgtcattgtaagttttgaaccagacagagaaaagaaatggtggcaatctgaaaatggtcttgatcatgtcagcatcagactggacttagaggcattatttcggttcagccaccttatcctgacctttaagacttttcggcctgctgcaatgttagttgaacgttccacagactatggacacaactggaaagtgttcaaatattttgcaaaagactgtgccacttcctttcctaacatcacatctggccaggcccagggagtgggagacattgtttgtgactccaaatactcggatattgaaccctcaacaggtggagaggttgttttaaaagttttggatcccagttttgaaattgaaaacccttatagcccctacatccaagaccttgtgacattgacaaacctgaggataaactttaccaagctccacacccttggggatgctttgcttggaaggaggcaaaatgattcccttgataaatactactatgctctgtacgagatgattgttcggggaagctgcttttgcaatggccatgctagcgaatgtcgccctatgcagaagatgcggggagatgttttcagccctcctggaatggttcacggtcagtgtgtgtgtcagcacaatacagatggtccgaactgtgagagatgcaaggacttcttccaggatgctccttggaggccagctgcagacctccaggacaacgcttgcagatcgtgcagctgtaatagccactccagccgctgtcactttgacatgactacgtacctggcaagcggtggcctcagcgggggcgtgtgtgaagactgccagcacaacactgaggggcagcactgcgaccgctgcagacccctcttctacagggacccgctcaagaccatctcagatccctacgcgtgcattccttgtgaatgtgaccccgatgggaccatatctggtggcatttgtgtgagccactctgatcctgccttagggtctgtggccggccagtgcctttgtaaagagaacgtggaaggagccaaatgcgaccagtgcaaacccaaccactacggactaagcgccaccgaccccctgggctgccagccctgcgactgtaacccccttgggagtctgccattcttgacctgtgatgtggatacaggccaatgcttgtgcctgtcatatgtcaccggagcacactgcgaagaatgcactgttggatactggggcctgggaaatcatctccatgggtgttctccctgtgactgtgatattggaggtgcttattctaacgtgtgctcacccaagaatgggcagtgtgaatgccgcccacatgtcactggccgtagctgctctgaaccagcccctggctacttctttgctcctttgaatttctatctctacgaggcagaggaagccacaacactccaaggactggcgcctttgggctcggagacgtttggccagagtcctgctgttcacgttgttttaggagagccagttcctgggaaccctgttacatggactggacctggatttgccagggttctccctggggctggcttgagatttgctgtcaacaacattccctttcctgtggacttcaccattgccattcactatgaaacccagtctgcagctgactggactgtccagattgtggtgaacccccctggagggagtgagcactgcatacccaagactctacagtcaaagcctcagtcttttgccttaccagcggctacgagaatcatgctgcttcccacacccatctgtttagaaccagatgtacaatattccatagatgtctatttttctcagcctttgcaaggagagtcccacgctcattcacatgtcctggtggactctcttggccttattccccaaatcaattcattggagaatttctgcagcaagcaggacttagatgagtatcagcttcacaactgtgttgaaattgcctcagcaatgggacctcaagtgctcccgggtgcctgtgaaaggctgatcatcagcatgtctgccaagctgcatgatggggctgtggcctgcaagtgtcacccccagggctcagtcggatccagctgcagccgacttggaggccagtgccagtgtaaacctcttgtggtcgggcgctgctgtgacaggtgctcaactggaagctatgatttggggcatcacggctgtcacccatgtcactgccatcctcaaggatcaaaggacactgtatgtgaccaagtaacaggacagtgcccctgccatggagaggtgtctggccgccgctgtgatcgctgcctggcaggctactttggatttcccagctgccacccttgcccttgtaataggtttgctgaactttgtgatcctgagacagggtcatgcttcaattgtggaggctttacaactggcagaaactgtgaaaggtgtattgatggttactatggaaatccttcttcaggacagccctgtcgtccttgcctgtgtccagatgatccctcaagcaatcagtattttgcccattcctgttatcagaatctgtggagctcagatgtaatctgcaattgtcttcaaggttatacgggtactcagtgtggagaatgctctactggtttctatggaaatccaagaatttcaggagcaccttgccaaccatgtgcctgcaacaacaacatagatgtaaccgatccagagtcctgcagccgggtaacaggggagtgccttcgatgtttgcacaacactcagggcgcaaactgccagctctgcaaaccaggtcactatggatcagccctcaatcagacctgcagaagatgctcctgccatgcttccggcgtgagtcccatggagtgtccccctggtgggggagcttgcctctgtgaccctgtcactggtgcatgtccttgtctgccgaatgtcacaggcctggcctgtgaccgttgtgctgatggatactggaatctggtccctggcagaggatgtcagtcatgtgactgtgaccctaggacctctcaaagtagccactgtgaccagcttacaggccagtgtccgtgtaaattaggttacggcgggaaacgttgcagtgagtgccaggaaaattattatggtgatccacctgggcgatgcattccatgtgattgtaacagggcaggtacccagaagcccatctgtgatccagacacaggcatgtgccgctgccgggagggtgtcagcggccagagatgtgatcgctgtgcccggggacacagccaggaattccctacttgtcttcaatgtcacttgtgctttgatcagtgggaccacaccatttcttccctctccaaagcggtgcaagggttaatgagactggctgctaacatggaagataaaagagagaccctgcctgtctgtgaggcagacttcaaagacctcagagggaacgtgtctgaaatagaaaggattttgaaacatcctgttttcccatctgggaaattcttaaaagtcaaggattatcatgactctgttagaagacaaatcatgcagctaaatgaacaactgaaagcagtgtatgaatttcaagatctgaaagatacaatagaaagagcaaagaatgaagcagacctcttacttgaagaccttcaggaagaaattgatttgcaatccagtgtccttaatgcaagcattgcggactcctcagaaaacatcaagaaatattatcacatatcatcatctgctgaaaagaaaattaatgaaactagttccaccattaatacctctgcaaatacaaggaatgacttacttaccatcttagatacactaacctcaaaaggaaacttgtcattggaaagattaaagcagattaagataccagatatccaaatattgaatgaaaaggtgtgcggagatccaggaaatgtgccatgtgtgcccttgccctgtggcggtgctctctgcacgggccggaaggggcacaggaagtgtaggggtcccggctgtcacggctccctgaccctctcaacgaatgccctccaaaaagcccaggaagcaaaatccattattcgtaatttggacaaacaggttcgtgggttgaaaaatcagatcgaaagtataagtgaacaggcagaagtctccaaaaacaatgccttacagctgagggaaaaactgggaaatataagaaaccaaagtgactctgaagaagaaaacatcaatcttttcatcaaaaaagtgaaaaactttttgttagaggaaaacgtgcctccagaagacatcgagaaggttgcgaatggtgtgcttgacattcacctaccaattccatcccaaaatctaaccgatgaacttgtcaaaatacagaaacatatgcaactctgtgaggattacaggacagatgaaaacaggttaaatgaagaagcagatggagcccaaaagcttttggtgaaggccaaagcagctgagaaagcagcaaatattctattaaatcttgacaaaacattgaaccagttacaacaagctcaaatcactcaaggacgggcaaactctaccattacacagctgactgccaatataacaaaaataaaaaagaatgtgctgcaggctgaaaatcaaaccagggaaatgaagagtgagctggagttagcaaagcagcgatcagggctggaggatggactttccctgctgcagaccaagttgcaaaggcatcaagaccacgctgtcaatgcgaaagttcaggctgaatctgcccaacaccaggctgggagtcttgagaaggaatttgttgagctgaaaaaacaatatgctattctccaacgtaagacaagcactacaggactaacaaaggagacattaggaaaagttaaacagctaaaagatgcggcagaaaaattggctggagatacagaggccaagataagaagaataacaggctgttttcagaactcagcaagatag

SEQ ID NO: 945 - DNA, 5858 bp, Homo sapiens
  source 1..5858: mol_type = genomic DNA
cacatgccccgtttgctgcctgaacctctccacaaagactcccagatcctgtagaattgaatttaatcatctcctgacaaaagaatgcaatttcaactgaccctttttttgcaccttgggtggctcagttactcaaaagctcaagatgactgcaacaggggtgcctgtcatcccaccactggtgatctcctggtgggcaggaacacgcagcttatggcttcttctacctgtgggctgagcagagcccagaaatactgcatcctcagttacctggagggggaacaaaaatgcttcatctgtgactctagatttccatatgatccgtatgaccaacccaacagccacaccattgagaatgtcattgtaagttttgaaccagacagagaaaagaaatggtggcaatctgaaaatggtcttgatcatgtcagcatcagactggacttagaggcattatttcggttcagccaccttatcctgacctttaagacttttcggcctgctgcaatgttagttgaacgttccacagactatggacacaactggaaagtgttcaaatattttgcaaaagactgtgccacttcctttcctaacatcacatctggccaggcccagggagtgggagacattgtttgtgactccaaatactcggatattgaaccctcaacaggtggagaggttgttttaaaagttttggatcccagttttgaaattgaaaacccttatagcccctacatccaagaccttgtgacattgacaaacctgaggataaactttaccaagctccacacccttggggatgctttgcttggaaggaggcaaaatgattcccttgataaatactactatgctctgtacgagatgattgttcggggaagctgcttttgcaatggccatgctagcgaatgtcgccctatgcagaagatgcggggagatgttttcagccctcctggaatggttcacggtcagtgtgtgtgtcagcacaatacagatggtccgaactgtgagagatgcaaggacttcttccaggatgctccttggaggccagctgcagacctccaggacaacgcttgcagatcgtgcagctgtaatagccactccagccgctgtcactttgacatgactacgtacctggcaagcggtggcctcagcgggggcgtgtgtgaagactgccagcacaacactgaggggcagcactgcgaccgctgcagacccctcttctacagggacccgctcaagaccatctcagatccctacgcgtgcattccttgtgaatgtgaccccgatgggaccatatctggtggcatttgtgtgagccactctgatcctgccttagggtctgtggccggccagtgcctttgtaaagagaacgtggaaggagccaaatgcgaccagtgcaaacccaaccactacggactaagcgccaccgaccccctgggctgccagccctgcgactgtaacccccttgggagtctgccattcttgacctgtgatgtggatacaggccaatgcttgtgcctgtcatatgtcaccggagcacactgcgaagaatgcactgttggatactggggcctgggaaatcatctccatgggtgttctccctgtgactgtgatattggaggtgcttattctaacgtgtgctcacccaagaatgggcagtgtgaatgccgcccacatgtcactggccgtagctgctctgaaccagcccctggctacttctttgctcctttgaatttctatctctacgaggcagaggaagccacaacactccaaggactggcgcctttgggctcggagacgtttggccagagtcctgctgttcacgttgttttaggagagccagttcctgggaaccctgttacatggactggacctggatttgccagggttctccctggggctggcttgagatttgctgtcaacaacattccctttcctgtggacttcaccattgccattcactatgaaacccagtctgcagctgactggactgtccagattgtggtgaacccccctggagggagtgagcactgcatacccaagactctacagtcaaagcctcagtcttttgccttaccagcggctacgagaatcatgctgcttcccacacccatctgtttagaaccagatgtacaatattccatagatgtctatttttctcagcctttgcaaggagagtcccacgctcattcacatgtcctggtggactctcttggccttattccccaaatcaattcattggagaatttctgcagcaagcaggacttagatgagtatcagcttcacaactgtgttgaaattgcctcagcaatgggacctcaagtgctcccgggtgcctgtgaaaggctgatcatcagcatgtctgccaagctgcatgatggggctgtggcctgcaagtgtcacccccagggctcagtcggatccagctgcagccgacttggaggccagtgccagtgtaaacctcttgtggtcgggcgctgctgtgacaggtgctcaactggaagctatgatttggggcatcacggctgtcacccatgtcactgccatcctcaaggatcaaaggacactgtatgtgaccaagtaacaggacagtgcccctgccatggagaggtgtctggccgccgctgtgatcgctgcctggcaggctactttggatttcccagctgccacccttgcccttgtaataggtttgctgaactttgtgatcctgagacagggtcatgcttcaattgtggaggctttacaactggcagaaactgtgaaaggtgtattgatggttactatggaaatccttcttcaggacagccctgtcgtccttgcctgtgtccagatgatccctcaagcaatcagtattttgcccattcctgttatcagaatctgtggagctcagatgtaatctgcaattgtcttcaaggttatacgggtactcagtgtggagaatgctctactggtttctatggaaatccaagaatttcaggagcaccttgccaaccatgtgcctgcaacaacaacatagatgtaaccgatccagagtcctgcagccgggtaacaggggagtgccttcgatgtttgcacaacactcagggcgcaaactgccagctctgcaaaccaggtcactatggatcagccctcaatcagacctgcagaagatgctcctgccatgcttccggcgtgagtcccatggagtgtccccctggtgggggagcttgcctctgtgaccctgtcactggtgcatgtccttgtctgccgaatgtcacaggcctggcctgtgaccgttgtgctgatggatactggaatctggtccctggcagaggatgtcagtcatgtgactgtgaccctaggacctctcaaagtagccactgtgaccagcttacaggccagtgtccgtgtaaattaggttacggcgggaaacgttgcagtgagtgccaggaaaattattatggtgatccacctgggcgatgcattccatgtgattgtaacagggcaggtacccagaagcccatctgtgatccagacacaggcatgtgccgctgccgggagggtgtcagcggccagagatgtgatcgctgtgcccggggacacagccaggaattccctacttgtcttcaatgtcacttgtgctttgatcagtgggaccacaccatttcttccctctccaaagcggtgcaagggttaatgagactggctgctaacatggaagataaaagagagaccctgcctgtctgtgaggcagacttcaaagacctcagagggaacgtgtctgaaatagaaaggattttgaaacatcctgttttcccatctgggaaattcttaaaagtcaaggattatcatgactctgttagaagacaaatcatgcagctaaatgaacaactgaaagcagtgtatgaatttcaagatctgaaagatacaatagaaagagcaaagaatgaagcagacctcttacttgaagaccttcaggaagaaattgatttgcaatccagtgtccttaatgcaagcattgcggactcctcagaaaacatcaagaaatattatcacatatcatcatctgctgaaaagaaaattaatgaaactagttccaccattaatacctctgcaaatacaaggaatgacttacttaccatcttagatacactaacctcaaaaggaaacttgtcattggaaagattaaagcagattaagataccagatatccaaatattgaatgaaaaggtgtgcggagatccaggaaatgtgccatgtgtgcccttgccctgtggcggtgctctctgcacgggccggaaggggcacaggaagtgtaggggtcccggctgtcacggctccctgaccctctcaacgaatgccctccaaaaagcccaggaagcaaaatccattattcgtaatttggacaaacaggttcgtgggttgaaaaatcagatcgaaagtataagtgaacaggcagaagtctccaaaaacaatgccttacagctgagggaaaaactgggaaatataagaaaccaaagtgactctgaagaagaaaacatcaatcttttcatcaaaaaagtgaaaaactttttgttagaggaaaacgtgcctccagaagacatcgagaaggttgcgaatggtgtgcttgacattcacctaccaattccatcccaaaatctaaccgatgaacttgtcaaaatacagaaacatatgcaactctgtgaggattacaggacagatgaaaacaggttaaatgaagaagcagatggagcccaaaagcttttggtgaaggccaaagcagctgagaaagcagcaaatattctattaaatcttgacaaaacattgaaccagttacaacaagctcaaatcactcaaggacgggcaaactctaccattacacagctgactgccaatataacaaaaataaaaaagaatgtgctgcaggctgaaaatcaaaccagggaaatgaagagtgagctggagttagcaaagcagcgatcagggctggaggatggactttccctgctgcagaccaagttgcaaaggcatcaagaccacgctgtcaatgcgaaagttcaggctgaatctgcccaacaccaggctgggagtcttgagaaggaatttgttgagctgaaaaaacaatatgctattctccaacgtaagacaagcactacaggactaacaaaggagacattaggaaaagttaaacagctaaaagatgcggcagaaaaattggctggagatacagaggccaagataagaagaataacagatttagaaaggaaaatccaagatttgaatctaagtagacaagcaaaagctgatcaactgagaatattggaagatcaagttgttgccattaaaaatgaaattgttgaacaagaaaaaaaatatgctaggtgctatagctaggcagagttaaagagcaaaagcttgtgcctttgtttctggtttctgatgtacaagcccctggggctctgttgaacctgtgaaatactgacaatgtcttctaccttccttccccacaccctgtccttattagacacctgctcagtgtggctggaggttgaaatgccaccaggaaaatgccacttcataattgaaaggggaaagtaatgaaattgtctctggtttcagaaacttttcctcttaccttcctttctctttcctaacttaaaaataacagtttccatataacaagtagaaatttaagtaagtactctactaactaataatcatttcagtcagataaacctaaacattaaataaatatctccaatattaggatggaatacatatgtatggcatgtactagattgtcctatattttatgtttatttggatttgcttttatttgtaaaattattcttttctgaataaactgcatacaattcaaaatg

SEQ ID NO: 946 - DNA, 1801 bp, Homo sapiens
  source 1..1801: mol_type = genomic DNA
cttcgggcggcctcggcccagctcgggcgtcctcttcgggccccgcttcgggctccgcgaccggcgcttcgggcggtcccggacggcgccttcgggaaggctcggcggagtccggatggaggactcggactcggcggcaaagcagctgggcctggctgaggcggcggcggtggcggccgcggccgctgtggcggcggcggccgcggccgcggcaggaggcgaggcggaggagccggtgctgagcagggacgaggactcggaggaggacgcagactcggaggcggagcgggagacgccgcgggtcacggcagtggcggtgatggcggcggagcccgggcacatggacatgggcgccgaggccctgcccggccccgacgaggccgccgctgccgcagccttcgcagaggtgaccacagtgacagtggccaacgtgggggctgctgcagacaatgtcttcaccacgtctgtggcgaacgcggcatccatctcaggacatgttctgtctggtaggacggcccttcagatcggggacagcctgaacaccgaaaaagcgacactgattgtcgtccacacagatgggagcatcgtggagaccaccgggctgaaaggcccggcagctcccctcaccccaggtcctcagtctcctccaacccctctggctcccggccaagaaaaaggtggaactaaatacaactgggacccttctgtgtacgacagtgagctgcccgtacggtgccggaacatcagcggcactctgtacaagaacaggctcggctcaggcggccggggacggtgcatcaagcagggggagaactggtacagtcccaccgagtttgaggccatggcaggaagagccagcagtaaggactggaaaagaagcattcgctacgcgggccgacccttgcagtgcctcatccaggatgggatcttaaaccctcacgctgcctcttgcacctgtgctgcctgctgcgacgacatgaccttaagtggcccagtcaggctttttgtgccttacaaaaggcgcaagaaggagaatgaactgcccacaactcccgtgaagaaggactcccccaagaacatcacattgcttccagccaccgcggctaccaccttcaccgtgaccccctcgggacagatcacgacctcgggggcactgacctttgaccgagcgtccacggtagaggccactgctgtcatatcagagagtccggcccagggcgacgtcttcgcaggggccacagtccaagaggccagcgtgcagcccccatgcagggccagccaccctgagcctcactaccccggctatcaggacagctgccagatcgcaccgtttccagaagctgcgttgccaacgtcacatcccaaaatagtgttgacatccctgcctgcgctggcggtcccacccccgactcccaccaaagcggcacctcccgcgttggtcaatgggctggagctgtcagagccgcggagctggctgtacctagaagagatggtcaactccttgctcaacacagcgcagcagctgaagacgctgtttgagcaagccaagcatgccagcacctaccgagaagctgccacaaaccaggccaagatccacgctgacgcagagcggaaggagcagtcctgcgttaactgcggccgggaggctatgagcgagtgcaccggctgccacaaggtcaactactgctccaccttctgccaacgcaagagatggagtcttactatgttgaccagcctggtctccatctcctggcttcgggcgatcctcccatgtcagcctcccaaagtgctaggattatag

SEQ ID NO: 947 - DNA, 2120 bp, Homo sapiens
  source 1..2120: mol_type = genomic DNA
gccccagcttggccgggcgcggagcggggcgcatggcgccgggcgcactgcgcgggggctgcgaacaaagggcccccggcggcggcgcgaggacggccgcgctcggaccctggccctggcccagccctggcccggccccctccccaggcgcggcgccccccaggagccgaaaaatgagcggcgccctgctctggccgttgctcccgctcctgctcctgctgctgtcggcgcgggacggcgtgcgcgccgcgcagcctcaggccccgggttacttgattgcagctccctctgtttttcgcgcgggcgtggaggaagtcatcagcgtgaccatctttaactctccaagggaagtcacggtccaggctcagctggtggcccagggtgagccggtggtgcagagccagggagccatcctggataaagggacaatcaaactcaaggtgcccacgggcctccggggccaagcgcttctgaaagtgtggggccgcggctggcaggcggaggaggggcccctctttcacaaccagacctcggtgaccgtggacggccggggcgcttctgtattcatccagacggacaagcctgtgtacagaccccagcaccgagtgctcataagcatcttcaccgtctctccaaatctgaggcctgtcaacgagaagctggaagcctacatcctggacccccgaggctctcggatgatagagtggagacacttaaagccgttctgctgcggcatcaccaacatgagcttccccttgtccgaccagcctgtgttgggagaatggttcatttttgttgaaatgcaaggccacgcgtacaacaagtcttttgaagttcagaagtatgtgttgcccaagtttgagcttctgattgacccgccccggtatatccaagacctggacgcctgtgagacaggcactgtgcgggccaggtatacctttgggaaacctgtggctggtgccttaatgatcaacatgactgttaatggtgtagggtactacagccacgaggtgggacgccctgtcctcagaacaaccaagatcctcggctcccgggacttcgacatctgcgtgagggacatgatcccagcggacgtccctgagcacttccggggcagggtcagcatctgggccatggtgaccagtgtggacgggagccagcaggtcgcgttcgatgactccacccccgtgcagaggcagctggtggacatccggtactccaaggacacgaggaagcagttcaagccgggcctggcctacgtggggaaggtggagctatcctaccccgatggcagcccagctgagggggtgacggtccagattaaggcagagctgacaccaaaggataacatctacaccagtgaagttgtgtcccagcgtggactagtggggtttgaaatcccctccatccccacgtcagcccagcacgtgtggctggaggttttccaggaactggaagattatgatgtttctgattcctttggcgtgtccagggaggatggtcctttttggtgggctgggctgacggcacaacgacgccggcgctcctctgtcttcccgtggccttggggcatcaccaaggactctgggtttgccttcaccgtaaggagaggaaacgggactggtggtgatgaccgaccgagtgagcctgaaccaccggcaggacggtggcctctacaccgatgaggctgtccccgctttccagccccacacagggagcctggtggcagtggctccttccaggcacccccccagaacagagaagagaaaaaggactttcttccccgaaacatggatttggcattgtctcaacatcaggtacattaagatttcttttctgcgctgactttgccggttgagtgaaagacactcatgcgggtccagagagcctccggtgagatgggcaggcctgataccaacatctgagcaagacactgtgcatctttttctaacacacaaaacttcaagccatgaagccagccttgagtcccgctgcacatttggacgtttgcctgtgaaatatgaaatgcaagggctttgtgcctcttataactccctcttggggttactctatctgctctgtttgtataacgagctcattaaaatgattacagttccctg

SEQ ID NO: 948 - DNA, 378 bp, Homo sapiens
  source 1..378: mol_type = genomic DNA
ccctggggaagagaagctgagaggaactcctcactcagctagcttcaggagccatgacatcatctctaccatggaaattccactcactctcctgtgcccccacatttgtcctaggcctcagagtccctataaagagagattcccaactcagtatcagcacaggacacagctaggttctgaagcttctgagttctgcagcctcacctctgagaaaacctctttgccaccaataccatgaagctctgcgtgactgtcctgtctctcctcgtgctagtagctgccttctgctctctagcactctcagcaccaaaggcaagcaagtctgcgctgaccccagtgagtcctgggtccaggagtacgtgtatgacctggaactga

SEQ ID NO: 949 - DNA, 4659 bp, Homo sapiens
  source 1..4659: mol_type = genomic DNA
agttgcttggaggagcttggagaaaccagaagtgagatccaggagaagtaaggccctggagtgccaggagcccttctcccaaagatggagaaataaatgaagaaatacaggaaaataagcattgggtgttttgcaatggctacacaaactagtcatgtcttccatggtcaagaaaatatgtttctggaaaaccattgcattaggagaaacactggcagagattcaaagaagccactaaagcagaagaatatgaatggacttgggcaaaattcggacaatggattattggttacacatgttaaccagacacaggacttactgaggctgcaggggagtgagacccagtcttcagattgggaggactctgaagactggctttcggctcacagtttaaaatgtcagaaactcaccttggctgacctgataagccagggcacagaagtgctggaggagggcaccaatgtcgtgcagaaaatatgtttctccacccagatcatccgccattttgagtcaaagctttctgacactattgaagtctatcaagagagaattcagtggctcacagaaaacagcaagaaggcatttggcctcatcaaaggggccagagtcagcatcctcatagatgtgtcagccatcagcagtggccctcagaaagaagagttccaaaaggacctcatgagcctcatcgatgagcagctgagccacaaggagaagctgtttgtcctgtcctttggcaccaatgccgggtccctctggccagaccccatggaagtcagcgcctccaccctccaggaacttaagctctgggtaaagacgctgcagcctgatggaggcagcaacctgctacaagctctgaagaagatcttcactctcaagggactggattccctggtggccatcatgagaagctgcccagatcagccttctgaaatcctgtctgactacatccagcagtccaccatgggaagagacctcatcatccacttcatcacctacagatgcgatgatcagatgccccctgctgtcctgaagaaccttgcagaagctgttaggggctactaccactgctacagcccaaagatggagcactacaccagccgggacatggatgagctcctggcagaaattcagaaggcccagagcctcctcagccacgtgcaagccctgcagcacagcagcccctgtgaggcgctcacctgcaccatggaggagatttccacagagattacaaatgggccactcataagcctcttgcctaaacccccaaagcatgacgctcctctcaccattgagtttccaaacttggacaagacttctgcagagtggcttaaggtcaatggtctgaaagccaagaaattaagtctatatcaggtcctggcacccaatgcattctctcctgtggaggaatttgtacctattctccagaaaacagtatcatcgaccatccatgagaaggcaatgatacaatttgaatggcacgacgggacagtgaagaacattcatgtggacccacccttcctctataagtaccagcaacagctcagcagagctatgcggatgtatgagaggcggattgagtggctctccctggccagcagaagaatctggggcacagtctgtgaaaaaagggtggttgtactgctcgatatctctgcgaccaattccatgtacattattcatatccagcactccctgcggctgctgctggaggagcagttatccaacaaggactgtttcaacctcatcgcgtttggaagcacaattgaaagctggaggcctgagatggttcccgtgagtcacaacaatttacaaagtgcctggcggtgggccctgaacctgcggtgtcggggcagcaggaacgttctcagcgccctgcggaaggctgtggaagtagacttcaaggacaaagacaaacaccaatcgcagggaatctacctcttcactgggggcatccccgaccaggacatgcctacactcagtgcctacatggctgaggcctgtggcggctgcgacctccagctgaacgtgtgtctcttctacgtgggcgagccaaagatggacaccacaccccctgcccgctatgccagtcacactgacacagccgccgcctacaaggaggtcacccgggctgcaggtggccgcttccactggtttggagacacaggcatttatgagagcgatgacatcaactccatcatgtctgagatggaaaaggctctcaactactcccaaaagtgtgccttcctcatggcctccctgaagaaccattcaggaaaagtactgggaagttcagccctcccgaaagaaaaaccaaagacacttcagctaagaagtcagcccaagaagctctgccctcccaggcccaccgtccccctgggggccagaatgagcattaaagatgaccctgacagagagaagagccccccgctgaaatctctgaaatggcgtccactcagtagcagagttggcatctcaccagctgcggcccagccaacgaaagaagggatgatggaactgaggaggaagaccaagtcaagggaagcagagacatctcttttactgttctacacagagaaagggaatgacgtgggctcagtgtacaagaagtaccctcaaggaaggggcttgagaaggactagctcttctattgacttacccagaaaggatacagtttgctcaagccaagagtgggtggcaaaatatgggctcaaaaaattgaagctggagatttccagatgcatgggtcccaactgcactcatcaaaagtcaggacagaggtcagcatccgccaaacactgcagcatcttccccagcgttgagatccatggagtggtgagacacatccagtggacgcccagggagatggaggtgtacatcaggcacttggagaaggtgttaaggcgctatgtccagaggctgcagtggctgctgtccggtccagtcctctgcagtaggacctggtatagacagtccatggacaggggcgtcatgatgactgctgcttcagggagccgccgactgtttggcaccgttttggagagcaaagtatgcatattgctggacacgtcagggtccatgggcccctacctgcagcaggtgaagacagagctggttttgctgatttgggaacagctgcggaagtgctgtgacagttttaacctgctcagctttgcagagagctttcagtcatggcaggacacgctggtggagaccacagatgcagcgtgtcatgaggctatgcaatgggtgacccacctgcaagctcagggcagcacctccatcttgcaagcattgctgaaagctttcagtttccatgatctggaaggattgtacctcctgaccgacggaaagccagacacaagctgcagccttgtcctaaatgaagtccaaaaactcagggagaaaagagatgtgaaagtgcacaccatttccttgaactgctcagacagagcggcggttgagttcctgagaaagctggcttccttcaccggcggacgctatcactgccctgtgggtgaggacacactctccaaaattcacagcctgctgaccaaaggcttcatcaatgaaaaggatcccacattgccaccatttgaaggagatgatttaaggatcctggcccaggagatcaccaaggccagaagcttcctctggcaggcccaatccttcagatcccaactccagaagaaaaatgatgcagaaccaaaggtcactctttcctagagaagtgttctcagaaaagtcatcctgcaaaggaccactcactgagcaaatctcagccccgagggcaggatgggatgaaatgctgtgacctgcaggaaacatgattcctggtaccaggactctctggaagctgaggaaggaaagactttgtcttttgtgtgaggggccattcccgggtcttaatctaactctccagccctgtcccgcagcgcactctactctccagccactagattgtccctctctgggaagccctaaaccaaccccctgcctaaatggtggtgcttcttgcaaaccaaccccctgcctgaacggtgcttcttgccccctctgcctggagactcctgctcatccatcaaggcacagctcaaatgacatcagctccctgggacctatctagagcgaggggcctccagtctttctcttgcagcatcctgaccacgcagacctctcgcactcagcactctatgtcacgccaccttgctcgctgatctaactcttctccttgatggtgagctccttcgggatgagactggtgtcccaggatctgcaggtccccagaagctgccacataggagacacatggtgaacagtgagcaggcggctgagctgtgagagcctagctctggaaagcagctgatggggtggtctccaccctggttcataagaggctaatgcagagtcacagtcagcccatcctgggggaagaagaaacaagtgagcctcagcaccaccctccatccctgcccaaccaaactgaagtgaaggctgctcatctgggttcattttctaaaattaaaaacaattaattttattctactaataggatcaacatgactttaactgtttgaagtgatcattggcgtgtgtgtgtgtgcataaatttttagtgacataaaactttattaaaagactcataccataataaagaatttc

SEQ ID NO: 950 - DNA, 4587 bp, Homo sapiens
  source 1..4587: mol_type = genomic DNA
agttgcttggaggagcttggagaaaccagaagtgagatccaggagaagtaaggccctggagtgccaggagcccttctcccaaagatggagaaataaatgaagaaatacaggaaaataagcattgggtgttttgcaatggctacacaaactagtcatgtcttccatggtcaagaaaatatgtttctggaaaaccattgcattaggagaaacactggcagagattcaaagaagccactaaagcagaagaatatgaatggacttgggcaaaattcggacaatggattattggttacacatgttaaccagacacaggacttactgaggctgcaggggagtgagacccagtcttcagattgggaggactctgaagactggctttcggctcacagtttaaaatgtcagaaactcaccttggctgacctgataagccagggcacagaagtgctggaggagggcaccaatgtcgtgcagaaaatatgtttctccacccagatcatccgccattttgagtcaaagctttctgacactattgaagtctatcaagagagaattcagtggctcacagaaaacagcaagaaggcatttggcctcatcaaaggggccagagtcagcatcctcatagatgtgtcagccatcagcagtggccctcagaaagaagagttccaaaaggacctcatgagcctcatcgatgagcagctgagccacaaggagaagctgtttgtcctgtcctttggcaccaatgccgggtccctctggccagaccccatggaagtcagcgcctccaccctccaggaacttaagctctgggtaaagacgctgcagcctgatggaggcagcaacctgctacaagctctgaagaagatcttcactctcaagggactggattccctggtggccatcatgagaagctgcccagatcagccttctgaaatcctgtctgactacatccagcagtccaccatgggaagagacctcatcatccacttcatcacctacagatgcgatgatcagatgccccctgctgtcctgaagaaccttgcagaagctgttaggggctactaccactgctacagcccaaagatggagcactacaccagccgggacatggatgagctcctggcagaaattcagaaggcccagagcctcctcagccacgtgcaagccctgcagcacagcagcccctgtgaggcgctcacctgcaccatggaggagatttccacagagattacaaatgggccactcataagcctcttgcctaaacccccaaagcatgacgctcctctcaccattgagtttccaaacttggacaagacttctgcagagtggcttaaggtcaatggtctgaaagccaagaaattaagtctatatcaggtcctggcacccaatgcattctctcctgtggaggaatttgtacctattctccagaaaacagtatcatcgaccatccatgagaaggcaatgatacaatttgaatggcacgacgggacagtgaagaacattcatgtggacccacccttcctctataagtaccagcaacagctcagcagagctatgcggatgtatgagaggcggattgagtggctctccctggccagcagaagaatctggggcacagtctgtgaaaaaagggtggttgtactgctcgatatctctgcgaccaattccatgtacattattcatatccagcactccctgcggctgctgctggaggagcagttatccaacaaggactgtttcaacctcatcgcgtttggaagcacaattgaaagctggaggcctgagatggttcccgtgagtcacaacaatttacaaagtgcctggcggtgggccctgaacctgcggtgtcggggcagcaggaacgttctcagcgccctgcggaaggctgtggaagtagacttcaaggacaaagacaaacaccaatcgcagggaatctacctcttcactgggggcatccccgaccaggacatgcctacactcagtgcctacatggctgaggcctgtggcggctgcgacctccagctgaacgtgtgtctcttctacgtgggcgagccaaagatggacaccacaccccctgcccgctatgccagtcacactgacacagccgccgcctacaaggaggtcacccgggctgcaggtggccgcttccactggtttggagacacaggcatttatgagagcgatgacatcaactccatcatgtctgagatggaaaaggctctcaactactcccaaaagtgtgccttcctcatggcctccctgaagaaccattcaggaaaagtactgggaagttcagccctcccgaaagaaaaaccaaagacacttcagctaagaagtcagcccaagaagctctgccctcccaggcccaccgtccccctgggggccagaatgagcattaaagatgaccctgacagagagaagagccccccgctgaaatctctgaaatggcgtccactcagtagcagagttggcatctcaccagctgcggcccagccaacgaaagaagggatgatggaactgaggaggaagaccaagtcaagggaagcagagacatctcttttactgttctacacagagaaagggaatgacgtgggctcagtgtacaagaagtaccctcaaggaaggggcttgagaaggactagctcttctattgacttacccagaaaggatacagtttgctcaagccaagagtgggtggcaaaatatgggctcaaaaaattgaagctggagatttccagatgcatgggtcccaactgcactcatcaaaagtcaggacagaggtcagcatccgccaaacactgcagcatcttccccagcgttgagatccatggagtggtgagacacatccagtggacgcccagggagatggaggtgtacatcaggcacttggagaaggtgttaaggcgctatgtccagaggctgcagtggctgctgtccgggagccgccgactgtttggcaccgttttggagagcaaagtatgcatattgctggacacgtcagggtccatgggcccctacctgcagcaggtgaagacagagctggttttgctgatttgggaacagctgcggaagtgctgtgacagttttaacctgctcagctttgcagagagctttcagtcatggcaggacacgctggtggagaccacagatgcagcgtgtcatgaggctatgcaatgggtgacccacctgcaagctcagggcagcacctccatcttgcaagcattgctgaaagctttcagtttccatgatctggaaggattgtacctcctgaccgacggaaagccagacacaagctgcagccttgtcctaaatgaagtccaaaaactcagggagaaaagagatgtgaaagtgcacaccatttccttgaactgctcagacagagcggcggttgagttcctgagaaagctggcttccttcaccggcggacgctatcactgccctgtgggtgaggacacactctccaaaattcacagcctgctgaccaaaggcttcatcaatgaaaaggatcccacattgccaccatttgaaggagatgatttaaggatcctggcccaggagatcaccaaggccagaagcttcctctggcaggcccaatccttcagatcccaactccagaagaaaaatgatgcagaaccaaaggtcactctttcctagagaagtgttctcagaaaagtcatcctgcaaaggaccactcactgagcaaatctcagccccgagggcaggatgggatgaaatgctgtgacctgcaggaaacatgattcctggtaccaggactctctggaagctgaggaaggaaagactttgtcttttgtgtgaggggccattcccgggtcttaatctaactctccagccctgtcccgcagcgcactctactctccagccactagattgtccctctctgggaagccctaaaccaaccccctgcctaaatggtggtgcttcttgcaaaccaaccccctgcctgaacggtgcttcttgccccctctgcctggagactcctgctcatccatcaaggcacagctcaaatgacatcagctccctgggacctatctagagcgaggggcctccagtctttctcttgcagcatcctgaccacgcagacctctcgcactcagcactctatgtcacgccaccttgctcgctgatctaactcttctccttgatggtgagctccttcgggatgagactggtgtcccaggatctgcaggtccccagaagctgccacataggagacacatggtgaacagtgagcaggcggctgagctgtgagagcctagctctggaaagcagctgatggggtggtctccaccctggttcataagaggctaatgcagagtcacagtcagcccatcctgggggaagaagaaacaagtgagcctcagcaccaccctccatccctgcccaaccaaactgaagtgaaggctgctcatctgggttcattttctaaaattaaaaacaattaattttattctactaataggatcaacatgactttaactgtttgaagtgatcattggcgtgtgtgtgtgtgcataaatttttagtgacataaaactttattaaaagactcataccataataaagaatttc

SEQ ID NO: 951 - DNA, 1295 bp, Homo sapiens
  source 1..1295: mol_type = genomic DNA
gcgcagcagccaggagcgcccacggagctggacccccagagccgcgcggcgccgcagcaggtgggtgacaccccgccccggccggccggagacccgagcccatcgccgtcagccagccagggccgcgcgggttccaggaaggatgttacctttgacgatgacagtgttaatcctgctgctgctccccacgggtcaggctgccccaaaggatggagtcacaaggccagactctgaagtgcagcatcagctcctgcccaaccccttccagccaggccaggagcagctcggacttctgcagagctacctaaagggactaggaaggacagaagtgcaactggagcatctgagccgggagcaggttctcctctacctctttgccctccatgactatgaccagagtggacagctggatggcctggagctgctgtccatgttgacagctgctctggcccctggagctgccaactctcctaccaccaacccggtgatcttgatagtggacaaagtgctcgagacccaggacctgaatggggatgggctcatgacccctgctgagctcatcaacttcccgggagtagccctcaggcacgtggagcccggagagccccttgctccatctcctcaggagccacaagctgttggaaggcagtccctattagctaaaagcccattaagacaagaaacacaggaagcccctggtcccagagaagaagcaaagggccaggtagaggccagaagggagtctttggatcctgtccaggagcctgggggccaggcagaggctgatggagatgttccagggcccagaggggaagctgagggccaggcagaggctaaaggagatgcccctgggcccagaggggaagctgggggccaggcagaggctgaaggagatgcccccgggcccagaggggaagctgggggccaggcagaggccagggagaatggagaggaggccaaggaacttccaggggaaacactggagtctaagaacacccaaaatgactttgaggtgcacattgttcaagtggagaatgatgagatctagatcttgaagatacaggtaccccacgaagtctcagtgccagaacataagccctgaagtgggcaggggaaatgtacgctgggacaaggaccatctctgtgccccctgcctggtcccagtaggtatcaggtctttctgtgcagctcagggagaccctaagttaaggggcagattaccaataaagaactgaatgaattcatccccccggccacctctctacccgtccagcctgcccagaccctctcagagg

SEQ ID NO: 952 - DNA, 4910 bp, Homo sapiens
  source 1..4910: mol_type = genomic DNA
ctccctccctctctccccagctgcctcctcctcttctctccccgctctccttcccctttcaccccatcccctgccctggctgcaaccatgagggtcttggcctgcctccttgcggccctggtggggatccaggctgttgagcgcctgcgcctggccgatggcccccatgggtgcgctggccgcctggaggtctggcatggcgggcgctggggcaccgtgtgtgatgacggctgggacctgcgcgatgccgccgtggcctgccggcagctgggctgcggaggggcactggccgccccgggaggcgccttcttcggggagggggcagggcctgtgtggctcagcgagctggcttgccggggcaacgaggggcagctgggcctctgccaccaccggggctggaaggcccacatctgctcccacgaggaggacgcgggcgtcgtctgcgcaggtcagcgtgtggctaactccagggacgactcaacatctcccctggatggggctccctggccagggctgttgctggagctgagccccagcacggaggagcccctggtgacacatgccccccgcccagctgggaacccccagaacgcctcccggaagaagagcccccggcccaagcaggccaagtccacccgggcccctctgctgacgacaggagccccccgccaagagcggctgcgcctggtctctggcccccacaggtgcgccggacgcctggaggtctggcacggcgggcgctggggcaccgtatgtgacgatggctgggacctgcgcgacgctgctgtagcctgccgggaactgggctgtgggggggcgctggctgcccccggcggtgccagattcgggcctggtgcagggcccgtgtggatggacgatgtggggtgtggaggaggagaacaggccctccgagactgcccccgaagcccctggggccggagcaactgtgaccacagcgaggatgcggggctggtctgcaccggcccagcacctcggctgcgcctggccgatggcccccacgggtgcgccggccgcctggaggtctggcacgggggtcgctgggggtcggtgtgtgacgacgcctgggacctgcgagacgccgctgtggcctgccgagagctgggctgcggaggggcgctggccgcccccgggggcgccttctttggggaggggtctggacccatcatcctggacgaccttcggtgtcggggaaacgagacggccttacgattctgcccagctcggccctggggccagcatgactgtcaccaccgcgaggacgccggggccgtgtgtgacggcatgcccctgggctacgtccctcccacggcccccacggacagcaacaactccacgcccagggaggctgcctccaggcccccgtccaccatgacgagccaggctccagggacggcaggcgtttcacctcctccagcctcccctactgtcctttgggagcctggaccggaagccgggtccccccagctgcgcctggtggctgggcccagcaagtgctcaggtcgactggaggtgtggcatgaccagcgctgggggaccgtgtgtgacgatagctgggacatgcgggattcagctgtggtctgccgggagctgggctgtggtggacctcagcagccagaccctgctgctggccgctttggctggggtgcgggccccatctggctagatgatgtgggctgtgtggggaccgaggcttcactgtccgactgccctgctgctccctggggaaagcacaactgcgctcacaatgaggatgttggggtcacctgcactgggcccccaggcctggactccatctcagaccccttcagctggagctggattcctggactggggagagatcgggatgcctggctcccgggagagctggccaccaagccctctgcaagtgtgactgccagtgttctggagaaaacaaccacgaaggccccagggaaaatgcctaagagtactaagaagtgggtgacaaaaaatgcaaagagaccaaccactcaacccccagtgatgccaaccacgaaacactccagggcccaaagccccccagacctaacctcacagaccactgcagcactgaccactgaggcctcccgaagacctacctctgagtttaccagaaggccgaccacggaggccccccagagatggacctctcacaccactgccacgctgacccctcaggccccccgagaacggaccactaagaccatggcaatgctgaccactcaaggcccccaagaaatgacctctgagtccactatcaagagtatccctcaggcctccctggagccatctgctgagatcccagaagggtctccagagtcacccaaagacccggccccctctcccagtgttagcaccactggggaatcaggcctgttccgggttcgtctggccgatgggcccaaccgctgtgctggccggctggaagtgtggcatgccggacgctggggaacagtgtgtgatgacaactgggacctgcgggacgccactgtggcctgctgggaactgggctgtggaaaggtccggcctcgagtaggcaaaacccattacggccctgggactgggcccatctggctggatgacatgggctgtaagggaagcgaggcctcactgagcgactgcccctcgggggcttgggggaagcacaactgtgaccacgaggaagacgtggggctcacctgcactggctacacagactatgacgattatcccccctggacctgggaccccacctcaagagaggacctggccaaggggactaccacagcgggggtacctggacacactctcccctggaggaccacccggcgcccgggtagctcctccccagcaataaggcgcctgccggacacaggcagcaaagatggttacaagcttccctggacgtgggacacaccatcaggaaggggcctggctgaggggacccctaccgcaggcaaactaggaccaactcttggggctggcaccaccaggagcccaggcagtcctccaactctgagagtccatggagacacaggttccccgaggaaaccgtggcccgagcgccggccaccgcggcccgctgcgaccaggacagcgcccccaaccccgtccccaggtccctccgcctctccgggacccccaggcccagcgctgacctctgactccagtcgagagctcactccccactcagccttgacgtccgaggcgacctctgacgctccggacacttcaccacccaccccagacccggcctcccggacgaaccccgacctcatcttgacaagccctgactttgctttgtccacccctgactccagtgtggttcccgcgttgaccccggagccctcacccacgcccttacccaccttgcccaaagagctgacctctgacccttctacaccgtcggaggtgaccagcctttcccctacctcagagcaggtcccagaatctgacacaaccccagatttggacacaactccatactccagtacagtctcagaatattctagatccccagacccctccccaagccctcaccccactactacccctgatcccaccatggcccctgaccccatcacaacccttaaccctactgtgacccctcacttccctaccacccctcaccccaccacgacccctcaccccaccaccatcactcactccaccatgattcctgaccccaccacaacccctcaacccttcaccaccatcactcactccaccatgattcctgaccccaccacaacccctcaacccttcaccaccatgcagcccaccacaacccctcactccacaacccctcaccccaccacgacccctcatcccaccaccatcactcactccaccatgattcctgaccccaccacaacccctcaacccttcaccaccatgcagcccaccacgatgcctcatcccaccacgacccctcaccccaccacgactcctcaccccaccacaacccctcaccccaccacaacccctcaccccaccatgactcctgaccccaccacgaccccttaccccaccactactcctgatcccaccacgacccctcaccccacaactcctgacccttcctcaacccctgtcatcactactgtgtcccttccaacctccttggggacagaactctcctctcccactctagcaccaacagtcaagcccagtctgcacccccagttgaccttcacagcacctgcccctcacacctccacatcccagatacccaccttagagccctctccagccttggagtccagcccctccaggtcctccacagccacaagcatggacccactgtccactgaggacttcaagccacccagaagccagagccccaacctaacccctccacccacccataccccacactcagcctctgaccttactgtgtcccctgaccccctcctttcccccacagcccaccccttggatcatcctccccttgaccccctcaccctagggccaactcctggtcagagcccaggcccccatggtccatgtgtggccccaacaccacctgtaagggtcatggcttgtgagccacctgccctggtggagctggtggctgctgtgagggatgtgggtggtcagctgcagagactgacccaggtcgtggaacaggagcggcaggagcgccaagccctgctgctggggctgacgcagctggtagaagctgcccggggtctggggcagctgggtgaggctgtgaagagactggcagagatggcctggaccaccagcatgcctgcaccaaccaccactaccccagaggaagaagaaagacccctgaggggagacgtgtgaccctctccaggatttgaggggcttaagacacccccaaccaaaaaaaacaaaaacaaaaaaaacccccaaagtatctaattaaaaacaaggtgtgaatggta

SEQ ID NO: 953 - DNA, 3292 bp, Homo sapiens
  source 1..3292: mol_type = genomic DNA
atgaccacgtggagcctccggcggaggccggcccgcacgctgggactcctgctgctggtcgtcttgggcttcctggtgctccgcaggctggactggagcaccctggtccctctgcggctccgccatcgacagctggggctgcaggccaagggctggaacttcatgctggaggattccaccttctggatcttcgggggctccatccactatttccgtgtgcccagggagtactggagggaccgcctgctgaagatgaaggcctgtggcttgaacaccctcaccacctatgttccgtggaacctgcatgagccagaaagaggcaaatttgacttctctgggaacctggacctggaggccttcgtcctgatggccgcagagatcgggctgtgggtgattctgcgtccaggcccctacatctgcagtgagatggacctcgggggcttgcccagctggctactccaagaccctggcatgaggctgaggacaacttacaagggcttcaccgaagcagtggacctttattttgaccacctgatgtccagggtggtgccactccagtacaagcgtgggggacctatcattgccgtgcaggtggagaatgaatatggttcctataataaagaccccgcatacatgccctacgtcaagaaggcactggaggaccgtggcattgtggaactgctcctgacttcagacaacaaggatgggctgagcaaggggattgtccagggagtcttggccaccatcaacttgcagtcaacacacgagctgcagctactgaccacctttctcttcaacgtccaggggactcagcccaagatggtgatggagtactggacggggtggtttgactcgtggggaggccctcacaatatcttggattcttctgaggttttgaaaaccgtgtctgccattgtggacgccggctcctccatcaacctctacatgttccacggaggcaccaactttggcttcatgaatggagccatgcacttccatgactacaagtcagatgtcaccagctatgactatgatgctgtgctgacagaagccggcgattacacggccaagtacatgaagcttcgagacttcttcggctccatctcaggcatccctctccctcccccacctgaccttcttcccaagatgccgtatgagcccttaacgccagtcttgtacctgtctctgtgggacgccctcaagtacctgggggagccaatcaagtctgaaaagcccatcaacatggagaacctgccagtcaatgggggaaatggacagtccttcgggtacattctctatgagaccagcatcacctcgtctggcatcctcagtggccacgtgcatgatcgggggcaggtgtttgtgaacacagtatccataggattcttggactacaagacaacgaagattgctgtccccctgatccagggttacaccgtgctgaggatcttggtggagaatcgtgggcgagtcaactatggggagaatattgatgaccagcgcaaaggcttaattggaaatctctatctgaatgattcacccctgaaaaacttcagaatctatagcctggatatgaagaagagcttctttcagaggttcggcctggacaaatggagttccctcccagaaacacccacattacctgctttcttcttgggtagcttgtccatcagctccaccccttgtgacacctttctgaagctggagggctgggagaagggggttgtattcatcaatggccagaaccttggacgttactggaacattggaccccagaagacgctttacctcccaggtccctggttgagcagcggaatcaaccaggtcatcgtttttgaggagacgatggcgggccctgcattacagttcacggaaaccccccacctgggcaggaaccagtacattaagtgagcggtggcaccccctcctgctggtgccagtgggagactgccgcctcctcttgacctgaagcctggtggctgctgccccacccctcactgcaaaagcatctccttaagtagcaacctcagggactgggggctacagtctgcccctgtctcagctcaaaaccctaagcctgcagggaaaggtgggatggctctgggcctggctttgttgatgatggctttcctacagccctgctcttgtgccgaggctgtcgggctgtctctagggtgggagcagctaatcagatcgcccagcctttggccctcagaaaaagtgctgaaacgtgcccttgcactggacgtcacagccctgcgagcatctgctggactcaggcgtgctctttgctggttcctgggaggcttggccacatccctcatggccccattttatccccgaaatcctgggtgtgtcaccagtgtagagggtggggaaggggtgtctcacctgagctgactttgttcttccttcacaaccttctgagccttctttgggattctggaaggaactcggcgtgagaaacatgtgacttcccctttcccttcccactcgctgcttcccacagggtgacaggctgggctggagaaacagaaatcctcaccctgcgtcttcccaagttagcaggtgtctctggtgttcagtgaggaggacatgtgagtcctggcagaagccatggcccatgtctgcacatccagggaggaggacagaaggcccagctcacatgtgagtcctggcagaagccatggcccatgtctgcacatccagggaggaggacagaaggcccagctcacatgtgagtcctggcagaagccatggcccatgtctgcacatccagggaggaggacagaaggcccagctcacatgtgagtcctggcagaagccatggcccatgtctgcacatccagggaggaggacagaaggcccagctcacatagctgtgtatgagctggttccgtcagaaagtgatggaatggaagggaaccttcctgcaaatcctcctgtaaggtggagaagccccttggatcacacttccacgcagacctgagcaggacacactgtggtttcctaagcccccgccccgtcagttgagcccgatggccttcctgctgatctgtaagcaggctgagcaacgcttgttccgcctggtggagagttcgttcttcttgggcccggggagctgcatgtcagggtgttgctgcttcgctcaagggtcacttatcacggaggcctctgtggtcaccctacagagcactgaccctctccactgctacctctgtctccccgactcaccctcatcctccatacaacagattgcatctgaaataatatgcattcgttattgcctgtc

SEQ ID NO: 954 - DNA, 2770 bp, Homo sapiens
  source 1..2770: mol_type = genomic DNA
aattcagcactaaaaccagtgtgagaagcagtatgtgtgagcatgtgtgtgtgtgtatgtgtgtgggggggggtgtaaaatgtgtttttcaaagtactgagaggttgatgggactgttcgattagctcctctgagaagaagagaaaaggttcttggacctctccctgtttcttccttagaataatttggatgggatttgtgatgcaggaaagcctaagggaaaaagaatattcattctgtgtggtgaaaattttttgaaaaaaaaattgccttcttcaaacaagggtgtcattctgatatttatgaggactgttgttctcactatgaaggcatctgttattgaaatgttccttgttttgctggtgactggagtacattcaaacaaagaaacggcaaagaagattaaaaggcccaagttcactgtgcctcagatcaactgcgatgtcaaagccggaaagatcatcgatcctgagttcattgtgaaatgtccagcaggatgccaagaccccaaataccatgtttatggcactgacgtgtatgcatcctactccagtgtgtgtggcgctgccgtacacagtggtgtgcttgataattcaggagggaaaatacttgttcggaaggttgctggacagtctggttacaaagggagttattccaacggtgtccaatcgttatccctaccacgatggagagaatcctttatcgtcttagaaagtaaacccaaaaagggtgtaacctacccatcagctcttacatactcatcatcgaaaagtccagctgcccaagcaggtgagaccacaaaagcctatcagaggccacctattccagggacaactgcacagccggtcactctgatgcagcttctggctgtcactgtagctgtggccacccccaccaccttgccaaggccatccccttctgctgcttctaccaccagcatccccagaccacaatcagtgggccacaggagccaggagatggatctctggtccactgccacctacacaagcagccaaaacaggcccagagctgatccaggtatccaaaggcaagatccttcaggagctgccttccagaaacctgttggagcggatgtcagcctgggacttgttccaaaagaagaattgagcacacagtctttggagccagtatccctgggagatccaaactgcaaaattgacttgtcgtttttaattgatgggagcaccagcattggcaaacggcgattccgaatccagaagcagctcctggctgatgttgcccaagctcttgacattggccctgccggtccactgatgggtgttgtccagtatggagacaaccctgctactcactttaacctcaagacacacacgaattctcgagatctgaagacagccatagagaaaattactcagagaggaggactttctaatgtaggtcgggccatctcctttgtgaccaagaacttcttttccaaagccaatggaaacagaagcggggctcccaatgtggtggtggtgatggtggatggctggcccacggacaaagtggaggaggcttcaagacttgcgagagagtcaggaatcaacattttcttcatcaccattgaaggtgctgctgaaaatgagaagcagtatgtggtggagcccaactttgcaaacaaggccgtgtgcagaacaaacggcttctactcgctccacgtgcagagctggtttggcctccacaagaccctgcagcctctggtgaagcgggtctgcgacactgaccgcctggcctgcagcaagacctgcttgaactcggctgacattggcttcgtcatcgacggctccagcagtgtggggacgggcaacttccgcaccgtcctccagtttgtgaccaacctcaccaaagagtttgagatttccgacacggacacgcgcatcggggccgtgcagtacacctacgaacagcggctggagtttgggttcgacaagtacagcagcaagcctgacatcctcaacgccatcaagagggtgggctactggagtggtggcaccagcacgggggctgccatcaacttcgccctggagcagctcttcaagaagtccaagcccaacaagaggaagttaatgatcctcatcaccgacgggaggtcctacgacgacgtccggatcccagccatggctgcccatctgaagggagtgatcacctatgcgataggcgttgcctgggctgcccaagaggagctagaagtcattgccactcaccccgccagagaccactccttctttgtggacgagtttgacaacctccatcagtatgtccccaggatcatccagaacatttgtacagagttcaactcacagcctcggaactgaattcagagcaggcagagcaccagcaagtgctgctttactaactgacgtgttggaccaccccaccgcttaatggggcacgcacggtgcatcaagtcttgggcagggcatggagaaacaaatgtcttgttattattctttgccatcatgctttttcatattccaaaacttggagttacaaagatgatcacaaacgtatagaatgagccaaaaggctacatcatgttgagggtgctggagattttacattttgacaattgttttcaaaataaatgttcggaatacagtgcagcccttacgacaggcttacgtagagcttttgtgagatttttaagttgttatttctgattagaactctgtaaccctcagcaagtttcatttttgtcatgacaatgtaggaattgctgaattaaatgtttagaaggatgacatgc

SEQ ID NO: 955 - DNA, 523 bp, Homo sapiens
  source 1..523: mol_type = genomic DNA
gaactgtggctgcaccatctgtcttcatcttcccgccatctgatgagcagttgaaatctggaactgcctctgttgtgtgcctgctgaataacttctatcccagagaggccaaagtacagtggaaggtggataacgccctccaatcgggtaactcccaggagagtgtcacagagcaggacagcaaggacagcacctacagcctcagcagcaccctgacgctgagcaaagcagactacgagaaacacaaagtctacgcctgcgaagtcacccatcagggcctgagctcgcccgtcacaaagagcttcaacaggggagagtgttagagggagaagtgcccccacctgctcctcagttccagcctgaccccctcccatcctttggcctctgaccctttttccacaggggacctacccctattgcggtcctccagctcatctttcacctcacccccctcctcctccttggctttaattatgctaatgttggaggagaatgaataaataaagtgaatctttgcacctgt

SEQ ID NO: 956 - DNA, 538 bp, Homo sapiens
  source 1..538: mol_type = genomic DNA
tttggctcttgatttacattgggtactttcacaacccactgctcatgaaatttgcttttgtactcactggttgtttttgcataggcccctccaggccacgaccagctgtttggattttataaacgggccgtttgcattgtgaactgagctacaacaggcaggcaggggcagcaagatggtgttgcagacccaggtcttcatttctctgttgctctggatctctggtgcctacggggacatcgtgatgacccagtctccagactccctggctgtgtctctgggcgagagggccaccatcaactgcaagtccagccagagtgttttatacagctccaacaataagaactacttagcttggtaccagcagaaaccaggacagcctcctaagctgctcatttactgggcatctacccgggaatccggggtccctgaccgattcagtggcagcgggtctgggacagatttcactctcaccatcagcagcctgcaggctgaagatgtggcagtttattactgtcagcaatattatagtactcct

SEQ ID NO: 957 - DNA, 1110 bp, Homo sapiens
  source 1..1110: mol_type = genomic DNA
gcttccaccaagggcccatcggtcttccccctggcgccctgctccaggagcacctccgagagcacagccgccctgggctgcctggtcaaggactacttccccgaaccggtgacggtgtcgtggaactcaggcgccctgaccagcggcgtgcacaccttcccggctgtcctacagtcctcaggactctactccctcagcagcgtggtgaccgtgccctccagcagcttgggcacgaagacctacacctgcaacgtagatcacaagcccagcaacaccaaggtggacaagagagttgagtccaaatatggtcccccatgcccatcatgcccagcacctgagttcctggggggaccatcagtcttcctgttccccccaaaacccaaggacactctcatgatctcccggacccctgaggtcacgtgcgtggtggtggacgtgagccaggaagaccccgaggtccagttcaactggtacgtggatggcgtggaggtgcataatgccaagacaaagccgcgggaggagcagttcaacagcacgtaccgtgtggtcagcgtcctcaccgtcctgcaccaggactggctgaacggcaaggagtacaagtgcaaggtctccaacaaaggcctcccgtcctccatcgagaaaaccatctccaaagccaaagggcagccccgagagccacaggtgtacaccctgcccccatcccaggaggagatgaccaagaaccaggtcagcctgacctgcctggtcaaaggcttctaccccagcgacatcgccgtggagtgggagagcaatgggcagccggagaacaactacaagaccacgcctcccgtgctggactccgacggctccttcttcctctacagcaggctcaccgtggacaagagcaggtggcaggaggggaatgtcttctcatgctccgtgatgcatgaggctctgcacaaccactacacacagaagagcctctccctgtctctgggtaaatgagtgccagggccggcaagcccccgctccccgggctctcggggtcgcgcgaggatgcttggcacgtaccccgtgtacatacttcccgggcgcccagcatggaaataaagcacccagcgctgccctggg

SEQ ID NO: 958 - DNA, 1132 bp, Homo sapiens
  source 1..1132: mol_type = genomic DNA
gcctccaccaagggcccatcggtcttccccctggcgccctgctccaggagcacctccgagagcacagcggccctgggctgcctggtcaaggactacttccccgaaccggtgacggtgtcgtggaactcaggcgctctgaccagcggcgtgcacaccttcccggctgtcctacagtcctcaggactctactccctcagcagcgtggtgaccgtgccctccagcaacttcggcacccagacctacacctgcaacgtagatcacaagcccagcaacaccaaggtggacaagacagttgagcgcaaatgttgtgtcgagtgcccaccgtgcccagcaccacctgtggcaggaccgtcagtcttcctcttccccccaaaacccaaggacaccctcatgatctcccggacccctgaggtcacgtgcgtggtggtggacgtgagccacgaagaccccgaggtccagttcaactggtacgtggacggcgtggaggtgcataatgccaagacaaagccacgggaggagcagttcaacagcacgttccgtgtggtcagcgtcctcaccgtcgtgcaccaggactggctgaacggcaaggagtacaagtgcaaggtctccaacaaaggcctcccagcccccatcgagaaaaccatctccaaaaccaaagggcagccccgagaaccacaggtgtacaccctgcccccatcccgggaggagatgaccaagaaccaggtcagcctgacctgcctggtcaaaggcttctaccccagcgacatctccgtggagtgggagagcaatgggcagccggagaacaactacaagaccacacctcccatgctggactccgacggctccttcttcctctacagcaagctcaccgtggacaagagcaggtggcagcaggggaacgtcttctcatgctccgtgatgcatgaggctctgcacaaccactacacacagaagagcctctccctgtctccgggtaaatgagtgccacggccggcaagcccccgctccccaggctctcggggtcgcgcgaggatgcttggcacgtaccccgtctacatacttcccgggcacccagcatggaaataaagcacccagcgctgccctgggcccctgcgagactgtgatggttctt

SEQ ID NO: 959 - DNA, 1128 bp, Homo sapiens
  source 1..1128: mol_type = genomic DNA
gcctccaccaagggcccatcggtcttccccctggcaccctcctccaagagcacctctgggggcacagcagccctgggctgcctggtcaaggactacttccccgaaccggtgacggtgtcgtggaactcaggcgccctgaccagcggcgtgcacaccttcccggctgtcctacagtcctcaggactctactccctcagcagcgtggtgaccgtgccctccagcagcttgggcacccagacctacatctgcaacgtgaatcacaagcccagcaacaccaaggtggacaagaaagttgagcccaaatcttgtgacaaaactcacacatgcccaccgtgcccagcacctgaactcctggggggaccgtcagtcttcctcttccccccaaaacccaaggacaccctcatgatctcccggacccctgaggtcacatgcgtggtggtggacgtgagccacgaagaccctgaggtcaagttcaactggtacgtggacggcgtggaggtgcataatgccaagacaaagccgcgggaggagcagtacaacagcacgtaccgtgtggtcagcgtcctcaccgtcctgcaccaggactggctgaatggcaaggagtacaagtgcaaggtctccaacaaagccctcccagcccccatcgagaaaaccatctccaaagccaaagggcagccccgagaaccacaggtgtacaccctgcccccatcccgggatgagctgaccaagaaccaggtcagcctgacctgcctggtcaaaggcttctatcccagcgacatcgccgtggagtgggagagcaatgggcagccggagaacaactacaagaccacgcctcccgtgctggactccgacggctccttcttcctctacagcaagctcaccgtggacaagagcaggtggcagcaggggaacgtcttctcatgctccgtgatgcatgaggctctgcacaaccactacacacagaagagcctctccctgtctccgggtaaatgagtgccacggccggcaagcccccgctccccaggctctcggggtcgcgcgaggatgcttggcacgtaccccgtgtacatacttcccaggcacccagcatggaaataaagcacccagcgcttccctgggcccctgcga

SEQ ID NO: 960 - DNA, 2004 bp, Homo sapiens
  source 1..2004: mol_type = genomic DNA
caggcagcaggcagcaggcgggcgcgctgtggctccgcgccgcgcggtccgggctctgttcattcatgattggtactcggccctccgagacccagcccgagcgcagggaggggagccgagtgtgcggcaggaggggcgggcggacggcggctcccgcaccgcacgcggcgctggctcggcagcctcggccgggcggccgctctggccccgtgtccagtgccaggcaggcttcagggcaccgtcctcggccctgggcgagggaaccgccgggccgggtcctcgcgcggggaagcggttccgaaggctcgcggggagcggctagccctgagtccctgcatgtgcggggctgaagaaggaagccagaagcctcctagcctcgcctccacgcttgctgaataccaagctgcaggcgagctgccgggcgcttttctctcctccaattcagagtagacaaaccacggggatttctttccagggtaggggaggggccgggcccggggtcccaactcgcactcaagtcttcgctgccatgggggccgtcatgggcaccttctcatctctgcaaaccaaacaaaggcgaccctcgaaagataagattgaagatgagctggagatgaccatggtttgccatcggcccgagggactggagcagctcgaggcccagaccaacttcaccaagagggagctgcaggtcctttatcgaggcttcaaaaatgagtgccccagtggtgtggtcaacgaagacacattcaagcagatctatgctcagtttttccctcatggagatgccagcacgtatgcccattacctcttcaatgccttcgacaccactcagacaggctccgtgaagttcgaggactttgtaaccgctctgtcgattttattgagaggaactgtccacgagaaactaaggtggacatttaatttgtatgacatcaacaaggacggatacataaacaaagaggagatgatggacattgtcaaagccatctatgacatgatggggaaatacacatatcctgtgctcaaagaggacactccaaggcagcatgtggacgtcttcttccagaaaatggacaaaaataaagatggcatcgtaactttagatgaatttcttgaatcatgtcaggaggacgacaacatcatgaggtctctccagctgtttcaaaatgtcatgtaactggtgacactcagccattcagctctcagagacattgtactaaacaaccaccttaacaccctgatctgcccttgttctgattttacacaccaactcttgggacagaaacaccttttacactttggaagaattctctgctgaagactttctatggaacccagcatcatgtggctcagtctctgattgccaactcttcctctttcttcttcttgagagagacaagatgaaatttgagtttgttttggaagcatgctcatctcctcacactgctgccctatggaaggtccctctgcttaagcttaaacagtagtgcacaaaatatgctgcttacgtgcccccagcccactgcctccaagtcaggcagaccttggtgaatctggaagcaagaggacctgagccagatgcacaccatctctgatggcctcccaaaccaatgtgcctgtttctcttcctttggtgggaagaatgagagttatccagaacaattaggatctgtcatgaccagattgggagagccagcacctaacatatgtgggataggactgaattattaagcatgatattgtctgatgacccaaactgcccatgtcatttgtttccagaaacgaggaccaataattctctcacactggcatttgtgctggtagtacaagtcctttaatatgtccaggaagggagccattgcccagtggtccatatctccaccacatcccctgcttgagcccagcgctgcatgtccctcccaagaagtccagaatgcctgcaaattgctgtaattttataccatgttctaaccaataaacagaactatttcttacactctc

SEQ ID NO: 961 - DNA, 1927 bp, Homo sapiens
  source 1..1927: mol_type = genomic DNA
ggagagggtgatgctggctccaagcctgactctgctctcgagagctccagcaggagaggcccttcctcgcctggcagcccctgagcggctcagcagggcaccatggcaagatcccttctcctgcccctgcagatcttactgctatccttagccttggaaactgcaggagaagaagcccagggtgacaagattattgatggcgccccatgtgcaagaggctcccacccatggcaggtggccctgctcagtggcaatcagctccactgcggaggcgtcctggtcaatgagcgctgggtgctcactgccgcccactgcaagatgaatgagtacaccgtgcacctgggcagtgatacgctgggcgacaggagagctcagaggatcaaggcctcgaagtcattccgccaccccggctactccacacagacccatgttaatgacctcatgctcgtgaagctcaatagccaggccaggctgtcatccatggtgaagaaagtcaggctgccctcccgctgcgaaccccctggaaccacctgtactgtctccggctggggcactaccacgagcccagatgtgacctttccctctgacctcatgtgcgtggatgtcaagctcatctccccccaggactgcacgaaggtttacaaggacttactggaaaattccatgctgtgcgctggcatccccgactccaagaaaaacgcctgcaatggtgactcagggggaccgttggtgtgcagaggtaccctgcaaggtctggtgtcctggggaactttcccttgcggccaacccaatgacccaggagtctacactcaagtgtgcaagttcaccaagtggataaatgacaccatgaaaaagcatcgctaacgccacactgagttaattaactgtgtgcttccaacagaaaatgcacaggagtgaggacgccgatgacctatgaagtcaaatttgactttacctttcctcaaagatatatttaaaccaacctcatgccctgttgataaaccaatcaaattggtaaagacctaaaaccaaaacaaataaagaaacacaaaaccctcagtgctggagaagagtcagtgagaccagcactctcaaacactggaactggacgttcgtacagtctttacggaagacacttggtcaacgtacaccgagacccttattcaccacctttgacccagtaactctaatcttaggaagaacctactgaaacaaaaaaaatccaaaatgtagaacaagacttgaatttaccatgatattatttatcacagaaatgaagtgaaaccatcaaacatgttccaaaagtaccagatggcttaaataatagtctggcttggcacaacgatgttttttttctttgagacagagtctctgttgcttgggctgcaatgcagtgatgcaatcttggctcactgcaacctccgcctcctgggttcaagtgattctcgtgcttcagcctcccaagtacctgggactacaggtgtgcaccaccacaccaggctaattttttgtgtatttttactagagacagggtttcaccatgttggccagcatggtcttgaacgcctgacctcagatgatccacccaccttggcctcccaaagtgctgggattacaggcatgagccaccacggccagcccacaatgatattacaaacctattaaaaatgatacttagacagaattgtcagtattattcaagaacatttaggctataggatgttaaatgacaaaaggaaggacaaaaatatatatgtatgtgaccctacccataaaaaatgaaatattcacagaatcagatctgaaaacacatgtcccagactgcatactggggtcgtcatgaggtgtctccttccttctgtgtacttttccttgaatgtgcacttttataacatgaaaaataaaggtggggaaaaaagtctgaaga

SEQ ID NO: 962 - DNA, 520 bp, Homo sapiens
  source 1..520: mol_type = genomic DNA
cacaccaaggatggagatgttccagaggctgctgctgttgctgctgctgagcatgggcgggacatgggcatccaaggagccgcttcggccacggtgccgccccatcaatgccaccctggctgtggagaaggagggctgccccgtgtgcatcaccgtcaacaccaccatctgtgccggctactgccccaccatgacccgcgtgctgcagggggtcctgccggccctgcctcaggtggtgtgcaactaccgcgatgtgcgcttcgagtccatccggctccctggctgcccgcgcggcgtgaaccccgtggtctcctacgccgtggctctcagctgtcaatgtgcactctgccgccgcagcaccactgactgcgggggtcccaaggaccaccccttgacctgtgatgacccccgcttccaggactcctcttcctcaaaggcccctccccccagccttccaagtccatcccgtctcccggggccctaggacaccccgatcctcccacaataaaggcttctcaat

SEQ ID NO: 963 - DNA, 2906 bp, Homo sapiens
  source 1..2906: mol_type = genomic DNA
cccgggcagccgaccagccccacgccggccccgggcgtccgtcgttcggtcccgcgatccgtccgacggtccacccagtgcttgcggcctcgcggccgggccggcctgggctgcaatcaatgcggctttgtctgggacgcccacatcccagaggccattcccgggtcggcaaatcggagcgcggccggggcgcgcgggggtgagataagcggccatgtgatcccacctgggctggaaggggaggggcgccaggtgaggcggcggccggcggggcgcgggcggccacgcggggctcctgcagcatggctgtcagcaggaaggactggtccgcgctgtccagccttgcccggcagaggactctggaggatgaggaggaacaggagcgcgagcgcaggcggcggcaccgcaacctgagctccaccacggacgatgaggctcccaggctcagccagaatggagaccggcaggcctctgcttctgagagactaccgagcgtggaagaagcagaggtgcccaagccactgcccccagcctccaaagatgaggacgaggacatccagagcatcctcagaacacggcaggagcggaggcagaggcggcaggtggtggaggctgcacaggcccccatccaggagaggctggaggcagaggaggggaggaacagcttgagccctgtgcaggccacacagaaacccctagtctccaagaaggaactggaaatcccacctcgccggagactgagtcgggaacagcggggcccctgggccctggaggaggagagcttggtgggcagggagccagaagagaggaagaaaggggttccagaaaagtccccagtcttggagaagtcctccatgccaaagaagacggcacctgaaaagagcctggtctccgataaaacctccatctctgagaaggtgctggcctcagagaagacatctctatcagagaagatagcagtgtcagagaaaagaaacagctcagagaagaagtctgttctagaaaaaaccagtgtctctgagaagtcgctggccccagggatggcactgggctcaggaaggaggctggtgtctgagaaagcttccatctttgagaaggcactggcctcagagaagagcccaactgcagatgctaagccggccccaaagagggccacagcctcagagcagcccctggcgcaggagccgccagcctctgggggaagcccagccaccaccaaggagcagagaggaagggccctccctgggaagaacctgccctctttggcaaagcagggggcttcagaccctccgactgtggcctcccgcctcccacccgtcacactccaggtgaaaatccccagcaaggaggaagaggcagatatgtcctcacccacacagcgaacctacagcagctccctcaaacgctccagccccaggaccatctcctttcggatgaaacccaagaaagaaaactcggaaacaaccctaactcgcagtgccagcatgaagctcccagacaacacagtgaagttgggagagaagctggagagataccacacggccatacggagatcagaatctgtcaagtctcggggtctgccttgcactgagttattcgtggctcctgtgggtgtagccagcaagcgccacctctttgagaaggaactggcgggccagagccgagcagaaccagcctccagccggaaggagaacttgaggctctcaggggttgtgacatcaaggctcaacctgtggatcagcaggacccaggaatctggagatcaggacccccaggaggcacagaaagcatcatctgcaaccgagaggactcagtggggacagaaatctgactcctcgctggacgctgaggtgtgacaagccccgccaagacagacctgcaagtcttcgtctcaagggacctccctcatgccaggcccctgcctctcacagcagcaccctttcctctcattgtccctgttccctttttgcctgtggatctgtttggccagggtccctggggtcaggaatatttgcaagactcagccagctccttcccagcccagcctcttggggctgggactttctcaccctgcggcaggcacaacagatgctgggacccagtctctgcccaggtcacagcacaagtgcacatcagcactatggggcctatgtcctgcccagagacctctgctccttcctgctcacatccacagtcagggcacggcgcccctcaagaactccagagtcacctgtctcatcggctcccagcaagtgcctctttgtctatgatgtcccccttctctgaggcctggacccacccatctttgtccctggggcctgctcccagccactgaggcccgctctggccaggggagaaggagctgccgtgcgtcttccctgtgccccgtctccctgcttggttctcccctcccttccctggccggctgccatggccaggagctaagtgcctttttgtgtgcaaccacttaccctttctctgaaaaacctgttctcaggaaggatctgataaactcatttactctcaggtgtaagagactgatgagaccttagaagcgaattcctctctggaggccttgctttctagcagaggtcacctgaagtgtgtgaggaggatcatcattttcctcatcccccctcttctcacattaaggtggtggcttgccactcagcagtcctagcttggtgactgggaactgccacatacagggccaggcctaccctccttccccacaagccccctccaacccccacccccatgctctggacctcatggctcctatgagcttggagcatggtgaaccatcagagaatctagaaccaaccaagctaggaacatcagcctggtgccctgttaaccccttaaagctgtggtttacaacttttcaaaaatttaaatcattagaa

SEQ ID NO: 964 - DNA, 642 bp, Homo sapiens
  source 1..642: mol_type = genomic DNA
cagcgtggacttgccagaagcctccctggcagccgagggcccttctataaagaggactcttgagctggcagcagagcccatccaggcagcacggctggctgagcagagacaagggctgcccacactgggactggtagaggaagccggccctgacggatgggtggtctcgcccttcctgggttcatcctgctgcaggtgggcctgagtcgcagatcaggaagcaccgggaagatgcaggcctgcatggtgccggggctggccctctgcctcctactggggcctcttgcaggggccaagcctgtgcaggaggaaggagacccttacgcggagctgccggccatgccctactggcctttctccacctctgacttctggaactatgtgcagcacttccaggccctgggggcctacccccagatcgaggacatggcccgaaccttctttgcccacttccccctggggagcacgctgggcttccacgttccctatcaggaggactgaatggtgtccagcctggtgcccgcccaccccgccaggctgcactcggtcgggcctccacaggcatggagtccccgcaaaaacctggcccctgcaggagtcaggcctggtctcacgctcaataaactccggactgaagatgca

SEQ ID NO: 965 - DNA, 2499 bp, Homo sapiens
  source 1..2499: mol_type = genomic DNA
gatgacagcgccactgacccgcgggcggccggcgagccgcggcagattccggggtcggccccggcagacaggctgcggggctcgactctgcgggagcgcctaaggcattggcaatctggggctcaggctgtgcagttctgggtcctcggccgcccacaggcgtcggcgaaaggctgccgccccggccggggaccaggaagcgtcaggcagctggcaagggctccccggggacgcgccacagcctcacagccggcccgagtctcctgggaggcagggctggaagggcaggggtgaaggccagctgtggccgcttgggaaggaccgcctcgcctgctcccgacctaagtcagaacacctggatgaccggtgcctccaggacgcaggtgcaggtgagactcgccctgccacagcaccctgcatctccgcggaggccctcgggagcccagcgtgtctgctcaaaacgaggaaagaatggttaaagcccgaatcgcgactcttaatcccagcgggacagcgtgaatgcatctcagtccacgtggggcaggcaggtgtccagatgggcaatgcctgctgggagctctattgcttggaacatgggattcagcctgatgggcagatgcccagtgacaagaccattggtggaggggacgactccttcaccaccttcttctgtgaaactggtgctggaaaacacgtaccccgggcagtttttgtggatctggagcctacggtcattgatgagatccgaaatggcccataccgacagctcttccacccagagcagctcatcactgggaaagaggatgctgccaacaactatgcccgtggtcactataccattggcaaggagatcattgacccagtgctggatcggatccgcaagctgtctgaccagtgcacaggacttcagggcttcctggtgttccacagctttggtgggggcactggctctggcttcacctcactcctgatggagcggctctctgttgactatggcaagaaatccaagctggaattctccatctacccagccccccaggtgtctacagccgtggtcgagccctacaactctatcctgaccacccacaccaccctggagcactcagactgtgccttcatggtggacaacgaagcaatctatgacatctgccgccgcaacctagacatcgagcgcccaacctacaccaacctcaatcgcctcattagccaaattgtctcctccatcacagcttctctgcgctttgacggggccctcaatgtggacctgacagagttccagaccaacctggtgccctaccctcgcatccacttccccctggccacctatgcaccagtcatctctgcagaaaaggcataccacgagcagctgtcggtggcagagatcaccaatgcctgctttgagcctgccaaccagatggtaaagtgtgatccccggcacggcaagtacatggcctgctgcctgctgtaccgtggagatgtggtgcccaaggatgtcaacgctgccattgccgccatcaagaccaagcgcagcattcagtttgtggactggtgccccacaggcttcaaggttggtatcaactaccagcctcccactgtggtgcctgggggtgacctggccaaggtgcagcgtgccgtgtgcatgctgagcaacacgaccgccatcgccgaggcctgggcccgcctggaccacaagttcgacctgatgtatgccaagagggcgtttgtgcactggtatgtgggtgagggcatggaggagggtgagttctccgaggcccgtgaggatatggctgccctggagaaggattatgaggaggtgggcatcgactcctatgaggacgaggatgagggagaagaataaagcagctgcctggagcctattcactatgtttattgcaaaatcctttcgaaataaacagtttccttgcacggtttcttgttccctctgagtgcttgagcttctgctgccttccccttcatgctgctgctgctctgtttgctgttcatgacccttatcccttccatcgctgaaggtgagacctgcaaaggggttcttgccaggcccaggaagcataaccccagggactttaaattgaagtcctagggttactcagtatagggaggaaatgaggaccaaaatccaggcacaaactgttgaaggatgagtcttcagctcctttccaagtaggagtataatccagtggtttctgtctttgaaagttagactgctaccctgttcttcctgctgcctctacatttaccaactctggaagcaaggcttggcccaggctcctctgtgcattatgagggtttgggagtggggctgggctggcccagagttcctgggcatggagccacgtcataagcttgggggatgggagggaacacaggcgatctcctagagttgtttgtgccactgcacctctgagcagctttgcatagcttcctgtcttgctgctttgctggagctggggctgtgccattaaaagtcaggtcatctcc

SEQ ID NO: 966 - DNA, 2574 bp, Homo sapiens
  source 1..2574: mol_type = genomic DNA
gacatcatcagtccgcgccggcgtaacggcccgcggtatctcagcaaccgctgggcatccggaggatgtggggacgcggagctgagaggctccgggctagctaggtgtaggggtggacgggtcccaggaccctggtgagggttctctacttggccttcggtgggggtcaagacgcaggcacctacgccaaaggggagcaaagccgggctcggcccgaggcccccaggacctccatctcccaatgttggaggaatccgacacgtgacggtctgtccgccgtctcagactagaggagcgctgtaaacgccatggctcccaagaagctgtcctgccttcgttccctgctgctgccgctcagcctgacgctactgctgccccaggcagacactcggtcgttcgtagtggataggggtcatgaccggtttctcctagacggggccccgttccgctatgtgtctggcagcctgcactactttcgggtaccgcgggtgctttgggccgaccggcttttgaagatgcgatggagcggcctcaacgccatacagttttatgtgccctggaactaccacgagccacagcctggggtctataactttaatggcagccgggacctcattgcctttctgaatgaggcagctctagcgaacctgttggtcatactgagaccaggaccttacatctgtgcagagtgggagatggggggtctcccatcctggttgcttcgaaaacctgaaattcatctaagaacctcagatccagacttccttgccgcagtggactcctggttcaaggtcttgctgcccaagatatatccatggctttatcacaatgggggcaacatcattagcattcaggtggagaatgaatatggtagctacagagcctgtgacttcagctacatgaggcacttggctgggctcttccgtgcactgctaggagaaaagatcttgctcttcaccacagatgggcctgaaggactcaagtgtggctccctccggggactctataccactgtagattttggcccagctgacaacatgaccaaaatctttaccctgcttcggaagtatgaaccccatgggccattggtaaactctgagtactacacaggctggctggattactggggccagaatcactccacacggtctgtgtcagctgtaaccaaaggactagagaacatgctcaagttgggagccagtgtgaacatgtacatgttccatggaggtaccaactttggatattggaatggtgccgataagaagggacgcttccttccgattactaccagctatgactatgatgcacctatatctgaagcaggggaccccacacctaagctttttgctcttcgagatgtcatcagcaagttccaggaagttcctttgggacctttacctcccccgagccccaagatgatgcttggacctgtgactctgcacctggttgggcatttactggctttcctagacttgctttgcccccgtgggcccattcattcaatcttgccaatgacctttgaggctgtcaagcaggaccatggcttcatgttgtaccgaacctatatgacccataccatttttgagccaacaccattctgggtgccaaataatggagtccatgaccgtgcctatgtgatggtggatggggtgttccagggtgttgtggagcgaaatatgagagacaaactatttttgacggggaaactggggtccaaactggatatcttggtggagaacatggggaggctcagctttgggtctaacagcagtgacttcaagggcctgttgaagccaccaattctggggcaaacaatccttacccagtggatgatgttccctctgaaaattgataaccttgtgaagtggtggtttcccctccagttgccaaaatggccatatcctcaagctccttctggccccacattctactccaaaacatttccaattttaggctcagttggggacacatttctatatctacctggatggaccaagggccaagtctggatcaatgggtttaacttgggccggtactggacaaagcaggggccacaacagaccctctacgtgccaagattcctgctgtttcctaggggagccctcaacaaaattacattgctggaactagaagatgtacctctccagccccaagtccaatttttggataagcctatcctcaatagcactagtactttgcacaggacacatatcaattccctttcagctgatacactgagtgcctctgaaccaatggagttaagtgggcactgaaaggtaggccgggcatggtggctcatgcctgtaatcccagcactttgggaggctgagacgggtggattacctgaggtcaggacttcaagaccagcctggccaacatggtgaaaccccgtctccactaaaaatacaaaaattagccgggcgtgatggtgggcacctctaatcccagctacttgggaggctgagggcaggagaattgcttgaatccaggaggcagaggttgcagtgagtggaggttgtaccactgcactccagcctggctgacagtgagacactccatctcaaaaaaaaaaaa

SEQ ID NO: 967 - DNA, 1862 bp, Homo sapiens
  source 1..1862: mol_type = genomic DNA
atgaagttccaggggcccctggcctgcctcctgctggccctctgcctgggcagtggggaggctggccccctgcagagcggagaggaaagcactgggacaaatattggggaggcccttggacatggcctgggagacgccctgagcgaaggggtgggaaaggccattggcaaagaggccggaggggcagctggctctaaagtcagtgaggcccttggccaagggaccagagaagcagttggcactggagtcaggcaggttccaggctttggcgtagcagatgctttgggcaacagggtcggggaagcagcccatgctctgggaaacactgggcacgagattggcagacaggcagaagatgtcattcgacacggagcagatgctgtccgcggctcctggcagggggtgcctggccacaatggtgcttgggaaacttctggaggccatggcatctttggctctcaaggtggccttggaggccagggccagggcaatcctggaggtctggggactccgtgggtccacggataccccggaaactcagcaggcagctttggaatgaatcctcagggagctccctggggtcaaggaggcaatggagggccaccaaactttgggaccaacactcagggagctgtggcccagcctggctatggttcagtgagagccagcaaccagaatgaagggtgcacgaatcccccaccatctggctcaggtggaggctccagcaactctgggggaggcagcggctcacagtcgggcagcagtggcagtggcagcaatggtgacaacaacaatggcagcagcagtggtggcagcagcagtggcagcagcagtggcggcagcagtggcggcagcagtggtggcagcagtggcaacagtggtggcagcagaggtgacagcggcagtgagtcctcctggggatccagcaccggctcctcctccggcaaccacggtgggagcggcggaggaaatggacataaacccgggtgtgaaaagccagggaatgaagcccgcgggagcggggaatctgggattcagggcttcagaggacagggagtttccagcaacatgaggaactctgagacgtctcctgggatgtttaactttgacactttctggaagaattttaaatccaagctgggtttcatcaactgggatgccataaacaagaaccaggtcccgccccccagcacccgagccctcctctacttcagccgactctgggaggatttcaaacagaacactcctttcctcaactggaaagcaattattgagggtgcggacgcgtcatcactgcagaaacgtgcaggcagagacgatcagccgggtgcaggatggcaggaggtggcagctgtaacttccaagaactacaattacaaccagcatgcgtatcccactgcctatggtgggaagtactcagtcaagacccctgcaaaggggggagtctcaccttcttcctcggcttcccgggtgcaacctggcctgctgcagtgggtgaagttttggtaggcggagcaaaagtgaggggcaccacaggcgaacaggcaatttcttgcaaccaccaccgaggccccgaaaagcactggtcgtcagggagctcctccccttggcccccagcctgtgccagccctggcccggctgccacacctctgtttcctaggctggggacccagcttgtctctccttgtttcttcccactgcactgtggtgcttcagtggccaccagcctcgtcacatacaccagcatctttctgtacctcctccctttggtgacctgaagtcactgtgacagttctccaggaaggaggagcttcctacttttgagtttctctgtggaaataaaacatgaatcttgtttccct

SEQ ID NO: 968 - DNA, 2704 bp, Homo sapiens
  source 1..2704: mol_type = genomic DNA
ctttgtttccactgggacggaatcggagctctggaggctgggctggccaagcgccccgaaggcccgatgcctgacggctcatgcggcctccttgtttgcagggcctgggcaaaaatttacactgagtcccactcttcgctccagggcccggcaggaagatgggctcccgtggacagggactcttgctggcgtactgcctgctccttgcctttgcctctggcctggtcctgagtcgtgtgccccatgtccagggggaacagcaggagtgggaggggactgaggagctgccgtcgcctccggaccatgccgagagggctgaagaacaacatgaaaaatacaggcccagtcaggaccaggggctccctgcttcccggtgcttgcgctgctgtgaccccggtacctccatgtacccggcgaccgccgtgccccagatcaacatcactatcttgaaaggggagaagggtgaccgcggagatcgaggcctccaagggaaatatggcaaaacaggctcagcaggggccaggggccacactggacccaaagggcagaagggctccatgggggcccctggggagcggtgcaagagccactacgccgccttttcggtgggccggaagaagcccatgcacagcaaccactactaccagacggtgatcttcgacacggagttcgtgaacctctacgaccacttcaacatgttcaccggcaagttctactgctacgtgcccggcctctacttcttcagcctcaacgtgcacacctggaaccagaaggagacctacctgcacatcatgaagaacgaggaggaggtggtgatcttgttcgcgcaggtgggcgaccgcagcatcatgcaaagccagagcctgatgctggagctgcgagagcaggaccaggtgtgggtacgcctctacaagggcgaacgtgagaacgccatcttcagcgaggagctggacacctacatcaccttcagtggctacctggtcaagcacgccaccgagccctagctggccggccacctcctttcctctcgccaccttccacccctgcgctgtgctgaccccaccgcctcttccccgatccctggactccgactccctggctttggcattcagtgagacgccctgcacacacagaaagccaaagcgatcggtgctcccagatcccgcagcctctggagagagctgacggcagatgaaatcaccagggcggggcacccgcgagaaccctctgggaccttccgcggccctctctgcacacatcctcaagtgaccccgcacggcgagacgcgggtggcggcagggcgtcccagggtgcggcaccgcggctccagtccttggaaataattaggcaaattctaaaggtctcaaaaggagcaaagtaaaccgtggaggacaaagaaaagggttgttatttttgtctttccagccagcctgctggctcccaagagagaggccttttcagttgagactctgcttaagagaagatccaaagttaaagctctggggtcaggggaggggccgggggcaggaaactacctctggcttaattcttttaagccacgtaggaactttcttgagggataggtggaccctgacatccctgtggccttgcccaagggctctgctggtctttctgagtcacagctgcgaggtgatgggggctggggccccaggcgtcagcctcccagagggacagctgagccccctgccttggctccaggttggtagaagcagccgaagggctcctgacagtggccagggacccctgggtcccccaggcctgcagatgtttctatgaggggcagagctcctggtacatccatgtgtggctctgctccacccctgtgccaccccagagccctggggggtggtctccatgcctgccaccctggcatcggctttctgtgccgcctcccacacaaatcagccccagaaggccccggggccttggcttctgttttttataaaacacctcaagcagcactgcagtctcccatctcctcgtgggctaagcatcaccgcttccacgtgtgttgtgttggttggcagcaaggctgatccagaccccttctgcccccactgccctcatccaggcctctgaccagtagcctgagaggggctttttctaggcttcagagcaggggagagctggaaggggctagaaagctcccgcttgtctgtttctcaggctcctgtgagcctcagtcctgagaccagagtcaagaggaagtacacgtcccaatcacccgtgtcaggattcactctcaggagctgggtggcaggagaggcaatagcccctgtggcaattgcaggaccagctggagcagggttgcggtgtctccacggtgctctcgccctgcccatggccaccccagactctgatctccaggaaccccatagcccctctccacctcaccccatgttgatgcccagggtcactcttgctacccgctgggcccccaaacccccgctgcctctcttccttccccccatcccccacctggttttgactaatcctgcttccctctctgggcctggctgccgggatctggggtccctaagtccctctctttaaagaacttctgcgggtcagactctgaagccgagttgctgtgggcgtgcccggaagcagagcgccacactcgctgcttaagctcccccagctctttccagaaaacattaaactcagaattgtgttttcagca

SEQ ID NO: 969 - DNA, 2575 bp, Homo sapiens
  source 1..2575: mol_type = genomic DNA
gtgttgagtgcatcagggcccggcaggaagatgggctcccgtggacagggactcttgctggcgtactgcctgctccttgcctttgcctctggcctggtcctgagtcgtgtgccccatgtccagggggaacagcaggagtgggaggggactgaggagctgccgtcgcctccggaccatgccgagagggctgaagaacaacatgaaaaatacaggcccagtcaggaccaggggctccctgcttcccggtgcttgcgctgctgtgaccccggtacctccatgtacccggcgaccgccgtgccccagatcaacatcactatcttgaaaggggagaagggtgaccgcggagatcgaggcctccaagggaaatatggcaaaacaggctcagcaggggccaggggccacactggacccaaagggcagaagggctccatgggggcccctggggagcggtgcaagagccactacgccgccttttcggtgggccggaagaagcccatgcacagcaaccactactaccagacggtgatcttcgacacggagttcgtgaacctctacgaccacttcaacatgttcaccggcaagttctactgctacgtgcccggcctctacttcttcagcctcaacgtgcacacctggaaccagaaggagacctacctgcacatcatgaagaacgaggaggaggtggtgatcttgttcgcgcaggtgggcgaccgcagcatcatgcaaagccagagcctgatgctggagctgcgagagcaggaccaggtgtgggtacgcctctacaagggcgaacgtgagaacgccatcttcagcgaggagctggacacctacatcaccttcagtggctacctggtcaagcacgccaccgagccctagctggccggccacctcctttcctctcgccaccttccacccctgcgctgtgctgaccccaccgcctcttccccgatccctggactccgactccctggctttggcattcagtgagacgccctgcacacacagaaagccaaagcgatcggtgctcccagatcccgcagcctctggagagagctgacggcagatgaaatcaccagggcggggcacccgcgagaaccctctgggaccttccgcggccctctctgcacacatcctcaagtgaccccgcacggcgagacgcgggtggcggcagggcgtcccagggtgcggcaccgcggctccagtccttggaaataattaggcaaattctaaaggtctcaaaaggagcaaagtaaaccgtggaggacaaagaaaagggttgttatttttgtctttccagccagcctgctggctcccaagagagaggccttttcagttgagactctgcttaagagaagatccaaagttaaagctctggggtcaggggaggggccgggggcaggaaactacctctggcttaattcttttaagccacgtaggaactttcttgagggataggtggaccctgacatccctgtggccttgcccaagggctctgctggtctttctgagtcacagctgcgaggtgatgggggctggggccccaggcgtcagcctcccagagggacagctgagccccctgccttggctccaggttggtagaagcagccgaagggctcctgacagtggccagggacccctgggtcccccaggcctgcagatgtttctatgaggggcagagctcctggtacatccatgtgtggctctgctccacccctgtgccaccccagagccctggggggtggtctccatgcctgccaccctggcatcggctttctgtgccgcctcccacacaaatcagccccagaaggccccggggccttggcttctgttttttataaaacacctcaagcagcactgcagtctcccatctcctcgtgggctaagcatcaccgcttccacgtgtgttgtgttggttggcagcaaggctgatccagaccccttctgcccccactgccctcatccaggcctctgaccagtagcctgagaggggctttttctaggcttcagagcaggggagagctggaaggggctagaaagctcccgcttgtctgtttctcaggctcctgtgagcctcagtcctgagaccagagtcaagaggaagtacacgtcccaatcacccgtgtcaggattcactctcaggagctgggtggcaggagaggcaatagcccctgtggcaattgcaggaccagctggagcagggttgcggtgtctccacggtgctctcgccctgcccatggccaccccagactctgatctccaggaaccccatagcccctctccacctcaccccatgttgatgcccagggtcactcttgctacccgctgggcccccaaacccccgctgcctctcttccttccccccatcccccacctggttttgactaatcctgcttccctctctgggcctggctgccgggatctggggtccctaagtccctctctttaaagaacttctgcgggtcagactctgaagccgagttgctgtgggcgtgcccggaagcagagcgccacactcgctgcttaagctcccccagctctttccagaaaacattaaactcagaattgtgttttcagc

SEQ ID NO: 970 - DNA, 1724 bp, Homo sapiens
  source 1..1724: mol_type = genomic DNA
ctttcacaaaaggtgaaatgagctctttgtagtgtttcccgcccaggctgcattttagaatcacagaggaggtggcccgaggcagccgggatgacagctctccccaggaatcctgctgcctgctgagaaacatggtcagcaagtcccgctggaagctcctggccatgttggctctggtcctggtcgtcatggtgtggtattccatctcccgggaagacaggtacatcgagcttttttattttcccatcccagagaagaaggagccgtgcctccagggtgaggcagagagcaaggcctctaagctctttggcaactactcccgggatcagcccatcttcctgcggcttgaggattatttctgggtcaagacgccatctgcttacgagctgccctatgggaccaaggggagtgaggatctgctcctccgggtgctagccatcaccagctcctccatccccaagaacatccagagcctcaggtgccgccgctgtgtggtcgtggggaacgggcaccggctgcggaacagctcactgggagatgccatcaacaagtacgatgtggtcatcagattgaacaatgccccagtggctggctatgagggtgacgtgggctccaagaccaccatgcgtctcttctaccctgaatctgcccacttcgaccccaaagtagaaaacaacccagacacactcctcgtcctggtagctttcaaggcaatggacttccactggattgagaccatcctgagtgataagaagcgggtgcgaaagggtttctggaaacagcctcccctcatctgggatgtcaatcctaaacagattcggattctcaaccccttcttcatggagattgcagctgacaaactgctgagcctgccaatgcaacagccacggaagattaagcagaagcccaccacgggcctgttggccatcacgctggccctccacctctgtgacttggtgcacattgccggctttggctacccagacgcctacaacaagaagcagaccattcactactatgagcagatcacgctcaagtccatggcggggtcaggccataatgtctcccaagaggccctggccattaagcggatgctggagatgggagctatcaagaacctcacgtccttctgacctgggcaagagctgtagcctgtcggttgcctactctgctgtctgggtgacccccatgcgtggctgtgggggtggctggtgccagtatgacccacttggactcaccccctcttggggagggagttctgggcctggccaggtctgagatgaggccatgcccctggctgctcttatggagccgagatccagtcagggtgggggcgctggagccgtgggagcccggccagggcagggggctcgttgctgtggcaccccctctctgccagcaccaagagattatttaatgggctatttaattaaggggtaggaaggtgctgtgggctggtcccacacatccaggaaagaggccagtagagaattctgcccactttttataaaaacttacagcgatggccccaccaaggcctagacacggcactggcctcccaggagggcaggggcattgggaatgggtgggtgccctccagagaggggctgctacctcccagcaggcatgggaagagcactggtgtgggggttccaccgagaaggggacctcatctagaaaagaggttacaaacctaccattaaactatttttcctaaaacggaa

SEQ ID NO: 971 - DNA, 1547 bp, Homo sapiens
  source 1..1547: mol_type = genomic DNA
atcgggctccagcggtcatgtccggcagaggaaagggcggaaaaggcttaggcaaagggggcgctaagcgccaccgcaaggtcttgagagacaacattcagggcatcaccaagcctgccattcggcgtctagctcggcgtggcggcgttaagcggatctctggcctcatttacgaggagacccgcggtgtgctgaaggtgttcctggagaatgtgattcgggacgcagtcacctacaccgagcacgccaagcgcaagaccgtcacagccatggatgtggtgtacgcgctcaagcgccaggggcgcaccctgtacggcttcggaggctaggccgccgctccagctttgcacgtttcgatcccaaaggccctttttagggccgaccacttgctcatctgaggagttggacacttgactgcgtaaagtgcaacagtaacgatgttggaaggtaactttggcagtggggcgacaatcggatctgaagttaacggaaagctaccgcggcccatagcgctcacagccgtaaagacttaagtcgttgaccgaaagcggctttttcacttacctgggctttttttttttttttttttttttttttaaagcctttatcggtatgaaaggttgaatgctctaggtttgagcactgctttctcggcttgctcttctggtgcagtataggcacacctagagggccacgtcagtctttgcgatcaccaaatctggttctgagaaataggcactggcaatttacacatgccttgctgtgtaatctcactatatttgctcaggcaaagtgggagaagcagccttaggttttcattctagagatgccggctttcccacctgatcggcttagagttcacgattgactgttttgggcttcatttcaccctctacataacaagcgggtggactagatgccttagcaagggtccgtgttgtgtggtgtctccagccacgcactcagctcaatcttagcacagttaaaaaatgcctttctagcaagttatctgcccagtgcctgaaaagtatcatttcttgtgttcaataaaaagcctcctaatttaatcaaggacctatgagataactgtcttttagttgtggcattgcaaggatacaaatgcagagatattttaaagtgatccttctgtaagagtgaaccaacgatatgatctgaaagcaacttcacaggtaattcaggcttatgattttactgtgtatgtatttgggagaagaaattctgtcagctcccaaaggataaaccagcagttgctttattggtcttcagatgtggctgcaaacacttgagactgaactaagcttaaaacacggtacttagcaatcgggttgccagcaaagcactggatgcaagccttgccttccagaagcttaccagtcgggttgccagcaaagcagtggatgcaagacttgccctccaggagcttaccatcacaacgaagaagacaaataaatgcataatatatagacgacataaatccatactgtacacatttaagaataaacagtccagtagtaagaggcagtaca

SEQ ID NO: 972 - DNA, 610 bp, Homo sapiens
  source 1..610: mol_type = genomic DNA
agcggtcatgtccggcagaggaaagggcggaaaaggcttaggcaaagggggcgctaagcgccaccgcaaggtcttgagagacaacattcagggcatcaccaagcctgccattcggcgtctagctcggcgtggcggcgttaagcggatctctggcctcatttacgaggagacccgcggtgtgctgaaggtgttcctggagaatgtgattcgggacgcagtcacctacaccgagcacgccaagcgcaagaccgtcacagccatggatgtggtgtacgcgctcaagcgccaggggcgcaccctgtacggcttcggaggctaggccgccgctccagctttgcacgtttcgatcccaaaggccctttttagggccgaccacttgctcatctgaggagttggacacttgactgcgtaaagtgcaacagtaacgatgttggaagatcgctgcagtgaatgcttttaacctgtcaactgtgatgaaacaaacagaaaaccgaagccctggcttcttctgaggtgcaaataaatgaccgagaaggtgttatctaagacctctacagccatttgtatctggccgtgtgtagagtgggctctgcaagaccctgcctcactt

SEQ ID NO: 973 - DNA, 610 bp, Homo sapiens; identical to SEQ ID NO: 972
  source 1..610: mol_type = genomic DNA

SEQ ID NO: 974 - DNA, 1547 bp, Homo sapiens; identical to SEQ ID NO: 971
  source 1..1547: mol_type = genomic DNA

SEQ ID NO: 975 - DNA, 2794 bp, Homo sapiens
  source 1..2794: mol_type = genomic DNA
ggccgatgccgctttaaaaaacgcgaggggctctatgcacctccctggcggtagttcctccgacctcagccgggtcgggtcgtgccgccctctcccaggagagacaaacaggtgtcccacgtggcagccgcgccccgggcgcccctcctgtgatcccgtagcgccccctggcccgagccgcgcccgggtctgtgagtagagccgcccgggcaccgagcgctggtcgccgctctccttccgttatatcaacatgccccctttcctgttgctggaagccgtctgtgttttcctgttttccagagtgcccccatctctccctctccaggaagtccatgtaagcaaagaaaccatcgggaagatttcagctgccagcaaaatgatgtggtgctcggctgcagtggacatcatgtttctgttagatgggtctaacagcgtcgggaaagggagctttgaaaggtccaagcactttgccatcacagtctgtgacggtctggacatcagccccgagagggtcagagtgggagcattccagttcagttccactcctcatctggaattccccttggattcattttcaacccaacaggaagtgaaggcaagaatcaagaggatggttttcaaaggagggcgcacggagacggaacttgctctgaaataccttctgcacagagggttgcctggaggcagaaatgcttctgtgccccagatcctcatcatcgtcactgatgggaagtcccagggggatgtggcactgccatccaagcagctgaaggaaaggggtgtcactgtgtttgctgtgggggtcaggtttcccaggtgggaggagctgcatgcactggccagcgagcctagagggcagcacgtgctgttggctgagcaggtggaggatgccaccaacggcctcttcagcaccctcagcagctcggccatctgctccagcgccacgccagactgcagggtcgaggctcacccctgtgagcacaggacgctggagatggtccgggagttcgctggcaatgccccatgctggagaggatcgcggcggacccttgcggtgctggctgcacactgtcccttctacagctggaagagagtgttcctaacccaccctgccacctgctacaggaccacctgcccaggcccctgtgactcgcagccctgccagaatggaggcacatgtgttccagaaggactggacggctaccagtgcctctgcccgctggcctttggaggggaggctaactgtgccctgaagctgagcctggaatgcagggtcgacctcctcttcctgctggacagctctgcgggcaccactctggacggcttcctgcgggccaaagtcttcgtgaagcggtttgtgcgggccgtgctgagcgaggactctcgggcccgagtgggtgtggccacatacagcagggagctgctggtggcggtgcctgtgggggagtaccaggatgtgcctgacctggtctggagcctcgatggcattcccttccgtggtggccccaccctgacgggcagtgccttgcggcaggcggcagagcgtggcttcgggagcgccaccaggacaggccaggaccggccacgtagagtggtggttttgctcactgagtcacactccgaggatgaggttgcgggcccagcgcgtcacgcaagggcgcgagagctgctcctgctgggtgtaggcagtgaggccgtgcgggcagagctggaggagatcacaggcagcccaaagcatgtgatggtctactcggatcctcaggatctgttcaaccaaatccctgagctgcaggggaagctgtgcagccggcagcggccagggtgccggacacaagccctggacctcgtcttcatgttggacacctctgcctcagtagggcccgagaattttgctcagatgcagagctttgtgagaagctgtgccctccagtttgaggtgaaccctgacgtgacacaggtcggcctggtggtgtatggcagccaggtgcagactgccttcgggctggacaccaaacccacccgggctgcgatgctgcgggccattagccaggccccctacctaggtggggtgggctcagccggcaccgccctgctgcacatctatgacaaagtgatgaccgtccagaggggtgcccggcctggtgtccccaaagctgtggtggtgctcacaggcgggagaggcgcagaggatgcagccgttcctgcccagaagctgaggaacaatggcatctctgtcttggtcgtgggcgtggggcctgtcctaagtgagggtctgcggaggcttgcaggtccccgggattccctgatccacgtggcagcttacgccgacctgcggtaccaccaggacgtgctcattgagtggctgtgtggagaagccaagcagccagtcaacctctgcaaacccagcccgtgcatgaatgagggcagctgcgtcctgcagaatgggagctaccgctgcaagtgtcgggatggctgggagggcccccactgcgagaaccgattcttgagacgcccctgaggcacatggctcccgtgcaggagggcagcagccgtacccctcccagcaactacagagaaggcctgggcactgaaatggtgcctaccttctggaatgtctgtgccccaggtccttagaatgtctgcttcccgccgtggccaggaccactattctcactgagggaggaggatgtcccaactgcagccatgctgcttagagacaagaaagcagctgatgtcacccacaaacgatgttgttgaaaagttttgatgtgtaagtaaatacccactttctgta

SEQ ID NO: 976 - DNA, 1010 bp, Homo sapiens
  source 1..1010: mol_type = genomic DNA
gttctctcccccgttcccactcggggtctccctcagggccgggaggcacagcggtccctgcttgctgaagggctggatgtacgcatccgcaggttcccgcggacttgggggcgcccgctgagccccggcgcccgcagaagacttgtgtttgcctcctgcagcctcaacccggagggcagcgagggcctaccaccatgatcactggtgtgttcagcatgcgcttgtggaccccagtgggcgtcctgacctcgctggcgtactgcctgcaccagcggcgggtggccctggccgagctgcaggaggccgatggccagtgtccggtcgaccgcagcctgctgaagttgaaaatggtgcaggtcgtgtttcgacacggggctcggagtcctctcaagccgctcccgctggaggagcaggtagagtggaacccccagctattagaggtcccaccccaaactcagtttgattacacagtcaccaatctagctggtggtccgaaaccatattctccttacgactctcaataccatgagaccaccctgaaggggggcatgtttgctgggcagctgaccaaggtgggcatgcagcaaatgtttgccttgggagagagactgaggaagaactatgtggaagacattccctttctttcaccaaccttcaacccacaggaggtctttattcgttccactaacatttttcggaatctggagtccacccgttgtttgctggctgggcttttccagtgtcagaaagaaggacccatcatcatccacactgatgaagcagattcagaagtcttgtatcccaactaccaaagctgctggagcctgaggcagagaaccagaggccggaggcagactgcctctttacagccaggaatctcagaggatttgaaaaaggtgaaggacaggatgggcattgacagtagtgataaagtggacttcttcatcctcctggacaacgtggctgccgagcaggagaagatgggctcctgcaggttccatggaagctga

SEQ ID NO: 977 - DNA, 2831 bp, Homo sapiens
  source 1..2831: mol_type = genomic DNA
atggagcacagcgtctgccccagttcagcagtccacctgatcccggtgtcgactcctaagaatggaatgagtagcaagagtcgaaagagaatcatgcccgaccctgtgacggagccccctgtgacagaccccgtttatgaagctcttttgtactgcaacatccccagcgtggccgagcgcagcatggaaggtcatgccccgcatcattttaagctggtctcagtgcatgtgttcattcgccacggagacaggtacccactgtatgtcattcccaaaacaaagcgaccagaaattgactgcactctggtggctaacaggaaaccgtatcacccaaaactggaagctttcattagtcacatgtcaaaaggatccggagcctctttcgaaagccccttgaactccttgcctctttacccaaatcacccattgtgtgagatgggagagctcacacagacaggagttgtgcagcatttgcagaacggtcagctgctgagggatatctatctaaagaaacacaaactcctgcccaatgattggtctgcagaccagctctatttagagaccactgggaaaagccggaccctacaaagtgggctggccttgctttatggctttctcccagattttgactggaagaagatttatttcaggcaccagccaagtgcgctgttctgctctggaagctgctattgcccggtaagaaaccagtatctggaaaaggagcagcgtcgtcagtacctcctacgtttgaaaaacagccagctggagaagacctacggggagatggccaagatcgtggatgtccccaccaagcagcttagagctgccaaccccatagactccatgctctgccacttctgccacaatgtcagctttccctgtaccagaaatggctgtgttgacatggagcacttcaaggtaattaagacccatcagatcgaggatgaaagggaaagacgggagaagaaattgtacttcgggtattctctcctgggtgcccaccccatcctgaaccaaaccatcggccggatgcagcgtgccaccgagggcaggaaagaagagctctttgccctctactctgctcatgatgtcactctgtcaccagttctcagtgccttgggcctttcagaagccaggttcccaaggtttgcagccaggttgatctttgagctttggcaagacagagaaaagcccagtgaacattccgtccggattctttacaatggcgtcgatgtcacattccacacctctttctgccaagaccaccacaagcgttctcccaagcccatgtgcccgcttgaaaacttggtccgctttgtgaaaagggacatgtttgtagccctgggtggcagtggtacaaattattatgatgcatgtcacagggaaggattctaaaaggtatgcagtacagcagtatagaatccatgccaatacagagcatagggaaaggtccacttctagttttgtctgttactaagggtagaagattattgctttttaaaggctaaatattgtttgtgggaaccacagatggttggggttgaacagtaagcacattgctgcaatgtggtacgtgaattgcttggtacaaaatggccagttcacagaggaatagaaggtactttatcatagccagacttcgcttagaatgccagaataatatagttcaagacctgaagttgccaatccaagtttgcactcttctggcctgccccatgttactatgtgatggaaccagcacacctcaaccaaaatttttttaatcttagacatttttaccttgtccttgttaagaatttcttgaagtgatttatctaaaataaaggttggcaaactttttctgtaaagggccagattgtaaatatttcagactgtgtggaccaaaaggccacatacagtctctgtcataactactcaactctgtttctgaagcaggaaagccaccacagacagtacataaaggaatatgtgtagctgggttcccaggccggacaaaacagatggtgaccagatttggcccctgggctgtagtttgctgacccctcatctaaaaaataggctatactacaattgcacttccagcactttgagaacgagttgaataccaagaattattcaatggttcctccagtaacttctgctagaaacacagaatttggtctgtatctgacactagaacaaaacttgagggtaaataaacattgaattagaatgaatcatagaaaactgattagaagaatacttgatgtttatgatgattgtggtacaagatagttttaagtatgttctaaatatttgtctgctgtagtctatttgctgtatatgctgaaatttttgtatgccatttagtatttttatagtttaggaaaatattttctaagaccagttttagatgactcttattcctgtagtaatattcaatttgctgtacctgcttggtggttagaaggaggctagaagatgaattcaggcactttcttccaataaaactaattatggctcattccctttgacaagctgtagaactggattcatttttaaaccattttcatcagtttcaaatggtaaattctgattgatttttaaatgcgtttttggaagaactttgctattagatagtttacagatctttataaggtgttttatatattagaagcaattataattacatctgtgatttctgaactaatggtgctaattcagagaaatggaaagtgaaagtgagattctctgttgtcatcggcattccaactttttctctttgtttttgtccagtgttgcatttgaatatgtctgtttctataaataaattttttaagaatacctatact

SEQ ID NO: 978 - DNA, 3160 bp, Homo sapiens
  source 1..3160: mol_type = genomic DNA
ccgagccgggcgcgcagcgacggagctggggccggcctgggaccatgggcgtgagtgcaatctacggatcagtctctgatggtgggtcgttaacctcagtggggactccaagatttccatgaagaaaatcagttgtcttcattcaagaattggggtctggctcagaattcctgcagctggtgaaaatctgttttctagaagaggtttaattaatgcctgcagtctgacatgttcccgatttgaggtgaaaccatgaagagaaaatagaatacttaataatgcttttccgcaaccgcttcttgctgctgctggccctggctgcgctgctggcctttgtgagcctcagcctgcagttcttccacctgatcccggtgtcgactcctaagaatggaatgagtagcaagagtcgaaagagaatcatgcccgaccctgtgacggagccccctgtgacagaccccgtttatgaagctcttttgtactgcaacatccccagcgtggccgagcgcagcatggaaggtcatgccccgcatcattttaagctggtctcagtgcatgtgttcattcgccacggagacaggtacccactgtatgtcattcccaaaacaaagcgaccagaaattgactgcactctggtggctaacaggaaaccgtatcacccaaaactggaagctttcattagtcacatgtcaaaaggatccggagcctctttcgaaagccccttgaactccttgcctctttacccaaatcacccattgtgtgagatgggagagctcacacagacaggagttgtgcagcatttgcagaacggtcagctgctgagggatatctatctaaagaaacacaaactcctgcccaatgattggtctgcagaccagctctatttagagaccactgggaaaagccggaccctacaaagtgggctggccttgctttatggctttctcccagattttgactggaagaagatttatttcaggcaccagccaagtgcgctgttctgctctggaagctgctattgcccggtaagaaaccagtatctggaaaaggagcagcgtcgtcagtacctcctacgtttgaaaaacagccagctggagaagacctacggggagatggccaagatcgtggatgtccccaccaagcagcttagagctgccaaccccatagactccatgctctgccacttctgccacaatgtcagctttccctgtaccagaaatggctgtgttgacatggagcacttcaaggtaattaagacccatcagatcgaggatgaaagggaaagacgggagaagaaattgtacttcgggtattctctcctgggtgcccaccccatcctgaaccaaaccatcggccggatgcagcgtgccaccgagggcaggaaagaagagctctttgccctctactctgctcatgatgtcactctgtcaccagttctcagtgccttgggcctttcagaagccaggttcccaaggtttgcagccaggttgatctttgagctttggcaagacagagaaaagcccagtgaacattccgtccggattctttacaatggcgtcgatgtcacattccacacctctttctgccaagaccaccacaagcgttctcccaagcccatgtgcccgcttgaaaacttggtccgctttgtgaaaagggacatgtttgtagccctgggtggcagtggtacaaattattatgatgcatgtcacagggaaggattctaaaaggtatgcagtacagcagtatagaatccatgccaatacagagcatagggaaaggtccacttctagttttgtctgttactaagggtagaagattattgctttttaaaggctaaatattgtttgtgggaaccacagatggttggggttgaacagtaagcacattgctgcaatgtggtacgtgaattgcttggtacaaaatggccagttcacagaggaatagaaggtactttatcatagccagacttcgcttagaatgccagaataatatagttcaagacctgaagttgccaatccaagtttgcactcttctggcctgccccatgttactatgtgatggaaccagcacacctcaaccaaaatttttttaatcttagacatttttaccttgtccttgttaagaatttcttgaagtgatttatctaaaataaaggttggcaaactttttctgtaaagggccagattgtaaatatttcagactgtgtggaccaaaaggccacatacagtctctgtcataactactcaactctgtttctgaagcaggaaagccaccacagacagtacataaaggaatatgtgtagctgggttcccaggccggacaaaacagatggtgaccagatttggcccctgggctgtagtttgctgacccctcatctaaaaaataggctatactacaattgcacttccagcactttgagaacgagttgaataccaagaattattcaatggttcctccagtaacttctgctagaaacacagaatttggtctgtatctgacactagaacaaaacttgagggtaaataaacattgaattagaatgaatcatagaaaactgattagaagaatacttgatgtttatgatgattgtggtacaagatagttttaagtatgttctaaatatttgtctgctgtagtctatttgctgtatatgctgaaatttttgtatgccatttagtatttttatagtttaggaaaatattttctaagaccagttttagatgactcttattcctgtagtaatattcaatttgctgtacctgcttggtggttagaaggaggctagaagatgaattcaggcactttcttccaataaaactaattatggctcattccctttgacaagctgtagaactggattcatttttaaaccattttcatcagtttcaaatggtaaattctgattgatttttaaatgcgtttttggaagaactttgctattagatagtttacagatctttataaggtgttttatatattagaagcaattataattacatctgtgatttctgaactaatggtgctaattcagagaaatggaaagtgaaagtgagattctctgttgtcatcggcattccaactttttctctttgtttttgtccagtgttgcatttgaatatgtctgtttctataaataaattttttaagaatacctatactata

SEQ ID NO: 979 - DNA, 1444 bp, Homo sapiens
  source 1..1444: mol_type = genomic DNA
atgcagggcacccctggaggcgggacgcgccctgggccatcccccgtggacaggcggacactcctggtcttcagctttatcctggcagcagctttgggccaaatgaatttcacaggggaccaggttcttcgagtcctggccaaagatgagaagcagctttcacttctcggggatctggagggcctgaaaccccagaaggtggacttctggcgtggcccagccaggcccagcctccctgtggatatgagagttcctttctctgaactgaaagacatcaaagcttatctggagtctcatggacttgcttacagcatcatgataaaggacatccaggtgctgctggatgaggaaagacaggccatggcgaaatcccgccggctggagcgcagcaccaacagcttcagttactcatcataccacaccctggaggagatatatagctggattgacaactttgtaatggagcattccgatattgtctcaaaaattcagattggcaacagctttgaaaaccagtccattcttgtcctgaagttcagcactggaggttctcggcacccagccatctggattgacactggaattcactcccgggagtggatcacccatgccaccggcatctggactgccaataagattgtcagtgattatggcaaagaccgtgtcctgacagacatactgaatgccatggacatcttcatagagctcgtcacaaaccctgatgggtttgcttttacccacagcatgaaccgcttatggcggaagaacaagtccatcagacctggaatcttctgcatcggcgtggatctcaacaggaactggaagtcgggttttggaggaaatggttctaacagcaacccctgctcagaaacttatcacgggccctcccctcagtcggagccggaggtggctgccatagtgaacttcatcacagcccatggcaacttcaaggctctgatctccatccacagctactctcagatgcttatgtacccttacggccgattgctggagcccgtttcaaatcagagggagttgtacgatcttgccaaggatgcggtggaggccttgtataaggtccatgggatcgagtacatttttggcagcatcagcaccaccctctatgtggccagtgggatcaccgtcgactgggcctatgacagtggcatcaagtacgccttcagctttgagctccgggacactgggcagtatggcttcctgctgccggccacacagatcatccccacggcccaggagacgtggatggcgcttcggaccatcatggagcacaccctgaatcacccctactagcagcacgactgagggcaggaggctccatccttctccccaaggtctgtggctcctcccgaaacccaagttatgcatccccatccccatgccctcatcccgacctcttagaaaataaatacaagtttgaacaggc

SEQ ID NO: 980 - DNA, 1641 bp, Homo sapiens
  source 1..1641: mol_type = genomic DNA
atggctcagtggcactgctcacagagaacacaggctggaggacatggagtcggggaacggctggcccagtgccaggaccagagtagtcggcatgctgctgagctgcgggacttcaagaacaagatgctgccactgctggaggtggcagagaaggagcgggaggcactcagaactgaggccgacaccatctccgggagagtggatcgtctggagcgggaggtagactatctggagacccagaacccagctctgccctgtgtagagtttgatgagaaggtgactggaggccctgggaccaaaggcaagggaagaaggaatgagaagtacgatatggtgacagactgtggctacacaatctctcaagtgagatcaatgaagattctgaagcgatttggtggcccagctggtctatggaccaaggatccactggggcaaacagagaagatctacgtgttagatgggacacagaatgacacagcctttgtcttcccaaggctgcgtgacttcacccttgccatggctgcccggaaagcttcccgagtccgggtgcccttcccctgggtaggcacagggcagctggtatatggtggctttctttattttgctcggaggcctcctggaagacctggtggaggtggtgagatggagaacactttgcagctaatcaaattccacctggcaaaccgaacagtggtggacagctcagtattcccagcagaggggctgatccccccctacggcttgacagcagacacctacatcgacctggcagctgatgaggaaggtctttgggctgtctatgccacccgggaggatgacaggcacttgtgtctggccaagttagatccacagacactggacacagagcagcagtgggacacaccatgtcccagagagaatgctgaggctgcctttgtcatctgtgggaccctctatgtcgtctataacacccgtcctgccagtcgggcccgcatccagtgctcctttgatgccagcggcaccctgacccctgaacgggcagcactcccttattttccccgcagatatggtgcccatgccagcctccgctataacccccgagaacgccagctctatgcctgggatgatggctaccagattgtctataagctggagatgaggaagaaagaggaggaggtttgaggagctagccttgttttttgcatctttctcactcccatacatttatattatatccccactaaatttcttgttcctcattcttcaaatgtgggccagttgtggctcaaatcctctatatttttagccaatggcaatcaaattctttcagctcctttgtttcatacggaactccagatcctgagtaatccttttagagcccgaagagtcaaaaccctcaatgttccctcctgctctcctgccccatgtcaacaaatttcaggctaaggatgccccagacccagggctctaaccttgtatgcgggcaggcccagggagcaggcagcagtgttcttcccctcagagtgacttggggagggagaaataggaggagacgtccagctctgtcctctcttcctcactcctcccttcagtgtcctgaggaacaggactttctccacattgttttgtattgcaacattttgcattaaaaggaaaatccac

SEQ ID NO: 981 - DNA, 2654 bp, Homo sapiens
  source 1..2654: mol_type = genomic DNA
tgcgagcttgagcggcgcgaggagatgctagagggcgcagcgccgccagcaccatgcgccccccgcccgcgctggccctggccgggctctgcctgctggcgctgcccgccgccgccgcctcctacttcggcctgaccgggcgggaagtcctgacgcccttcccaggattgggcactgcggcagccccggcacagggcggggcccacctgaagcagtgtgacctgctgaagctgtcccggcggcagaagcagctctgccggagggagcccggcctggctgagaccctgagggatgctgcgcacctcggcctgcttgagtgccagtttcagttccggcatgagcgctggaactgtagcctggagggcaggatgggcctgctcaagagaggcttcaaagagacagctttcctgtacgcggtgtcctctgccgccctcacccacaccctggcccgggcctgcagcgctgggcgcatggagcgctgcacctgtgatgactctccggggctggagagccggcaggcctggcagtggggcgtgtgcggtgacaacctcaagtacagcaccaagtttctgagcaacttcctggggtccaagagaggaaacaaggacctgcgggcacgggcagacgcccacaatacccacgtgggcatcaaggctgtgaagagtggcctcaggaccacgtgtaagtgccatggcgtatcaggctcctgtgccgtgcgcacctgctggaagcagctctccccgttccgtgagacgggccaggtgctgaaactgcgctatgactcggctgtcaaggtgtccagtgccaccaatgaggccttgggccgcctagagctgtgggcccctgccaggcagggcagcctcaccaaaggcctggccccaaggtctggggacctggtgtacatggaggactcacccagcttctgccggcccagcaagtactcacctggcacagcaggttggagtgcagtggcaagatctcagctcatcacaacctccacctcccggattcaagcgattctcccgtctcagctgcctgagtaactgggattacaggcatgcaccaccacgcctgactaattttgtatttttggctaattttgtatttttagtagagatgaggtttctccatgttggtcaggctggtctcgaactcccgacctcaggtgatccacccgcctcggcctcccaaagtgctgggattaccggtgtgagccactgcgcctggccagcatttttttttttgagacagagtctcgctctgtcacccaggctggagtgcactggcatgatctctgctcactgcaacctccacctcccaggttcaagtgactctcttggctcagcctcccaagtagctgggactacaggcgtgcaccaccacgctcagctaatttttgtattttcagtagagatggacttttatcatgttggccaggctggtctcgaactcctggtctcaagtgatctgccagcctcagtctcccagggtgctgggattacaggtatgagccactgtgcccggccgccttagcattttgtgtatgttttgagtgacagccatctgtcaatattggcatcttttgttttattggatgaatgaatgaacaaatgaatttataaatcttgttctccatactgtttacccatcctcatttccctcacttggcagtgtcttgccatagcaggcttcctggtgtagctggcaccacatccctccctgacacacggcctccttattgcccctgctacttgcctttttctctcctccctttccttcccttcattccccctggcttccccttcccaactctcagaatccctggctgcctcaaccacaagaacaaagctgtgcagaagcctgaacctggagcttctgcaagatgaggtggggaatgagctaacccagctggaaagcagcctgctgatccctgggagagacggcgcttgggccaacccaccctccccaaggtggtcccctgcctcagctccacccgcttccccagatgaacttctttctctccctccagcgcttcagaggatgcacagctgtgtgtacttgaccctgagcctgggctagtgctggggacatagccagtctggctgatacccatatcagtacagaaagctgtcctcacccacttcatgcactagttgcattggtatgaagcattagctttataactatcccatttactgcaggcataaacctatatcaattggtggggatggaggttaaatgagagaagacatcaaagatgcatagaactattgggcccctttcaattaataaataaaatttgtaggaggccattagtttgtactgtgctcctgtaatggacccaacagaccaaacaaatatggagtcactcatgctaaatgcaattaacttgggagtatactcctaagttgcaaaaagtggtaacaaatagctgagttttggggcagttacagcagctgagcatctgtcaatgtaggtggccaggtgattcaattaaggatgctgtaaccaattaagctgtatctacacctcacttctgttttctatctacaaatactgcgtgatcatgttgctggttggagttctttgaataagctgtggttcggagggatgcccaattctagaatcatgaataaaagcctattaagatcttt

SEQ ID NO: 982 - DNA, 1041 bp, Homo sapiens
  source 1..1041: mol_type = genomic DNA
ctgacagggaacctccctgaccgagcccacgtctccccacggccagagaaatctccggcccggcccgcatcgccagcccccaggcccggaggaacggcccgagcccaggagaaccacatcttcgtcccagccccggaggctcctgtgggcaagatcgtgagccaacgggttcctgaggcccctcctggccaggcagggtttccccgcgcgtttccgaggagccctgcctggccgggcggctggacaaacagtgcacttgccggcggtcccaacccagcaggagaagtggacatgaggttggcaggtccagagagctcggtgactgcagcgccacgggccaggaagtacaagtgtggcctgccccagccgtgtcctgaggagcacctggccttccgcgtggtcagcggggccgccaacgtcattgggcccaagatctgcctcgaggacaagatgctgatgagcagcgtcaaggacaacgtgggccgcgggctgaacatcgccctggtgaacggggtcagcggcgagctcatcgaggcccgggcctttgacatgtgggccggagatgtcaacgacctgttgaagtttattcggccactgcacgaaggcaccctggtgttcgtggcatcctacgacgacccagccaccaagatgaatgaagagaccagaaagctcttcagtgagctgggcagcaggaacgccaaggagctggccttccgggacagctgggtgtttgtcggggccaagggtgtgcagaacaagagcccctttgagcagcacgtgaagaacagtaagcacagcaacaagtacgaaggctggcccgaggcgctggagatggaaggctgtatcccgcggagaagcacggccagctagcacggccagtgccaggaccgggccgagggaggccagaccaagggaggcacgcgcgctgccgggcggacagaggctgaggctcacaccccacacccgggcaggagcgctccctggccccaacacatcggggctccgaggcagtgaccagaacgtggtctcaaggtggtgggg

SEQ ID NO: 983 - DNA, 5345 bp, Homo sapiens
  source 1..5345: mol_type = genomic DNA
aatatgctcgttccattccctgctggctttgtggccacaaatggaggggcagctacgtttcttgaacacagagcctgagaggccttgtatgcagctgctggaagcagccaggagaccccaaaagtgggctggagacttcaacaaggacagggaacagggctgcactgagaggcccaggggctaggtcagcagcaccgctaggcagatttggaggggagctggggagaggcgaggcagccagctttgcaagattcccacggcacacagccagtgctcaggggttcccttctcagcgttcctctcacctggtgtggctccctcacgcttggcatggatctgagctcctttccttatggctgagacccaaactgcctacaagtggccttttctccctgttcttgcctgcaagggcagcatggggcctcaggctgtcagtgctaccagggacgctggcattcactttgtccataatgtacagatggatgtagacaactgccctcagggctgtccgggggcaggaccaagcccagcaaccacacctcctgacacagccaggttctcccccaacggcggagctgacaggactgttcatggttcattgagtggacccagcaatacctcatcgataatccacagtcgagagaagaggggcggtcagagaccggccagccctcccttctgattgggagaggcctctgcaggcactgacaggctccagagagtgctgtggggggcagtcagtgtccatagtcccctggaatcttctctgggctgttttctctgacttttcacctgaaattaactgtacatagctgggctaggaactctctaaatctgaaagcatgtggcttagggaaaatcacttgactcgtttaccttctggctaagaagtgaagactctgggctaatctagtcctccaggccctggagtcccacacagtgatgctatctgtgcagctagagggcagagcccttggtcatgtccaccctctgattaagtgggcatctcctctcctgctagctttggggcttggggtggggctgggacaaagcctggtgcccgtgtgattcatccgcacattatttctcctctctgccattctagggtcgtgctgcggcagcctggcgcccgacatgtgaaggggaacctgccaggggattactgtgagctcacagcaggataggctggccccgggggagtggggatgggcagaacctgggccaggagtattaggaaggagacctggaccctggtagggagctcagcacaagctcgcctgacccagatggtattggacacagtgccccgctgaacagcagctgttcccagcgccagaggaccccacagccacagtaggagctttgcgacccctacgcaactgcagctggggctggggccaccaggagaagggaccagcacctcagatgggaagcagaagggcaagacctactgcggaaaggatctcgatctctgcagcggagttttcccacactcacagagcttcctgtttttgtcctctcagggttggggtctggctcccctcctctggcagaggttttgggccaggaggtgggacaacacttgcatggaacccaagtcccctgaagcccctgtgctctctgttgtgattggagttctagggcttccccgctgccgggaacgaggggccgcctcattgtctgctcatgaaccacaaggaccccgactgctccagactggattatttcaagccgccaaagagggggacccctagagctggcagccagcaatcccaagggactagagggctgcaatggactgacctccccctcaccagggtggcaggagaggcagagcctctgtggcctagctagtgacggagagacccgatgaagccctaagcaggggccccgcctgactcagggacaggacagccactcctgccaacgtgtgttctccctacatgagggagggcgtggcaagggacccctgccactgtcccctgctgcagcacgtgcccctatgccctttgcatgtggtgccagaataggcaggctacgccgtggctggcccctcagcgggctgggaaaagagtggccacggtgaccgtcacccgcctgccggcaccatgaagtgctccctgcgggtgtggttcctctccgtggccttcctgctggtgttcatcatgtccctgctcttcacctactcgcaccacagcatggccacgctcccctacctggactcaggggccctggatgggacgcaccgggtgaagctggtgcccggctatgccggcctgcagcgcctcagcaaggagaggctctcgggcaagagctgtgcctgtcgccgctgcatgggcgatgccggtgcctccgactggtttgacagccactttgacggtaacatttcccccgtctggacccgagagaacatggatcttccaccggacgtccagaggtggtggatgatgctgcagccccagttcaagtcacacaacaccaatgaggtgctggagaagctgttccagatagtgcctggcgagaacccctaccgcttccgggacccccaccagtgccggcgctgtgccgtggtggggaactcgggcaacctgcggggctctggctatgggcaggacgtggacgggcacaacttcatcatgaggatgaatcaggcgccaaccgtgggctttgagcaggatgttggcagccgaaccacccaccatttcatgtaccctgagagtgccaagaacctgcccgccaacgtcagcttcgtgctggtgcccttcaaggtcctggaccttctgtggatcgccagcgccttgtccacggggcagatccgattcacctacgccccagtgaagtccttccttcgagtggataaagaaaaggtccagatctacaacccagccttcttcaagtatatccacgacaggtggacagagcatcacgggcggtacccttccacggggatgctggtgcttttctttgccctgcatgtgtgtgatgaggtgaacgtgtacgggttcggggccgacagccggggcaactggcaccactactgggagaacaaccggtacgcgggcgagttccggaagactggcgtgcacgacgcggacttcgaggcccacatcatcgacatgctggccaaggccagcaagatcgaagtctaccggggcaactgagccgggcctcgccgcgacccttccggcccatctatcgggcaccggggctccggcccgggacccaggaccagcaacccgcgaccaatcatgctgcagcccaggggcgtctgctgtgccccgccaatcacgagactgggggaccggccgggcctggcaccaatctgcgctgcggtcgggcggagcttctgtttctcccagccaatcatgtgactcaaggaaaacttccggcgctgtgtccagtctcctccaatcaatggccttcgggggcgggccagcggccgctcaatccccactccctcatgctttgggttagggttttctttcacgctttctgaggaggagagcatggcgcgggcctcggcgaagcacttccgtcagcctcgggcggaggatcgtcttagtagctggccagacctggaggagagcgggcggtctttgcgggcctcaggagataggtggccgcccggcccctttccccgcctgcccggataggtgcgtgcagacccaccaaagaaaagcggtcgctgcgggacccccagtcccacctcggccgcgctgtgggatggctgcgcccccagggcttcctgcgtctccaggaagccgggagtggcgccctctgcggggtggggtgctcccgggccgaactccggacaggtggaggggacagggcagagctcgaggaagccctgtccccttcagtgcaaggtgctgtcactcacgtgtgccctcgaccctcccgttcacccgcagccttctcagcgcctctccctgggccggaggcctcctcaccagcctacctgttgctctggaaaaaaatcccgtcccccgactccgtccctacccccagtcttcggccggctctggcccctggggagggggctgcacggcggaaggaggctggctatgggcccggctgcccgctgcatgtacctcctcctccacccatcgcctcttgcctgggggtaactttgcctggggctcattctttggttaagctgaagctgccgtgggtggccaaaccgcagattctttgcaaattctgagctggcagagctcgcagccgggagccggccggggaagaggagacttgcgcgccgcaagccgcctgcctccaccctgctctccatctcccgctctagaagggctgggaagctcgcggccggggttccacctggaagctgcttgcatggctgaacccagcttaggtccctgacggggctgctggtggaattctcccccttcgaagctggggaggtttaggagggggaaggcttctgtgaagctctcaaaccactaatagagccccctccccaacagtgacggcgcagatgctcccccttttcttagttgacaccaccaggcagcttcctggccgttggtaggttcctgcagctggctgagggaacagggaccggcaggggactttgttaggggagggttgggatgggcagtgggcccctgaaagttaatatattggaacctagctcgagtgtcgttctttccaattccgaaagtagaaagagtaaaaataggggtgattggggtggggttagtagaatgcctctctcagggcgctcccccctcccccaccgttttagagagctaggcctcagccagtcttgccactcccatctcagtgcttcctgaagaggctgttttgagtgttgatgaaaagcaatgcaattatgccaaacagtattgagcagaataatttatttcttttttttcttttgctttaaatcatgaatcccgccaggtacggtggctcacacctgtcatcccagcactttgggaggccaaggcgggcggattacttaatacttaaggtcaggagttcgagaccagcctggccaatatggtgaaacctcgtctctaccaaaaaaaaaaaaaaatacaaaaattagccaggcgcagtggtgcgcacctgtaatcccagctacttggaaggctgaggcaggagaatcccttgaaccgaggaggcgaaggttgcagtgagccgagattgtgccactgcactccagcctgggcgacagagcaagaccctgtctcaaaaaaattaaatcatgaatccccatcctggaagaggtaggtcccagcatccagccagattttctgcaatagtaatttaaacacacttttttatttccttccctttctgaattaaaaggaacaaaaaactgtcta

SEQ ID NO: 984 - DNA, 189 bp, Homo sapiens
  source 1..189: mol_type = genomic DNA
atgaagattcaactttttttctttattctgcacttttgggtcacaattttaccagccagaagcaattttgaaccaaagtatagatttgaaagatgcgaaaaagtgagaggaatatgtaaaacgttttgtgatgatgttgagtatgattatggatactgcattaaatggagaagtcagtgctgcgtataa

SEQ ID NO: 985 - DNA, 2073 bp, Homo sapiens
  source 1..2073: mol_type = genomic DNA
cccagcaatgacattattcccagtgctgttgttcctggttgctgggctgcttccatcttttccagcaaatgaagataaggatcccgcttttactgctttgttaaccacccaaacacaagtgcaaagggagattgtgaataagcacaatgaactgaggagagcagtatctccccctgccagaaacatgctgaagatggaatggaacaaagaggctgcagcaaatgcccaaaagtgggcaaaccagtgcaattacagacacagtaacccaaaggatcgaatgacaagtctaaaatgtggtgagaatctctacatgtcaagtgcctccagctcatggtcacaagcaatccaaagctggtttgatgagtacaatgattttgactttggtgtagggccaaagactcccaacgcagtggttggacattatacacaggttgtttggtactcttcatacctcgttggatgtggaaatgcctactgtcccaatcaaaaagttctaaaatactactatgtttgccaatattgtcctgctggtaattgggctaatagactatatgtcccttatgaacaaggagcaccttgtgccagttgcccagataactgtgacgatggactatgcaccaatggttgcaagtacgaagatctctatagtaactgtaaaagtttgaagctcacattaacctgtaaacatcagttggtcagggacagttgcaaggcctcctgcaattgttcaaacagcatttattaaatacgcattacacaccgagtagggctatgtagagaggagtcagattatctacttagatttggcatctacttagatttaacatatactagctgagaaattgtaggcatgtttgatacacatttgatttcaaatgtttttcttctggatctgctttttattttacaaaaatatttttcatacaaatggttaaaaagaaacaaaatctataacaacaactttggatttttatatataaactttgtgatttaaatttactgaatttaattagggtgaaaattttgaaagttgtattctcatatgactaagttcactaaaaccctggattgaaagtgaaaattatgttcctagaacaaaatgtacaaaaagaacaatataattttcacatgaacccttggctgtagttgcctttcctagctccactctaaggctaagcatcttcaaagacgttttcccatatgctgtcttaattcttttcactcattcacccttcttcccaatcatctggctggcatcctcacaattgagttgaagctgttcctcctaaaacaatcctgacttttattttgccaaaatcaatacaatcctttgaattttttatctgcataaattttacagtagaatatgatcaaaccttcatttttaaacctctcttctctttgacaaaacttccttaaaaaagaatacaagataatataggtaaataccctccactcaaggaggtagaactcagtcctctcccttgtgagtcttcactaaaatcagtgactcacttccaaagagtggagtatggaaagggaaacatagtaactttacaggggagaaaaatgacaaatgacgtcttcaccaagtgatcaaaattaacgtcaccagtgataagtcattcagatttgttctagataatctttctaaaaattcataatcccaatctaattatgagctaaaacatccagcaaactcaagttgaaggacattctacaaaatatccctggggtattttagagtattcctcaaaactgtaaaaatcatggaaaataagggaatcctgagaaacaatcacagaccacatgagactaaggagacatgtgagccaaatgcaatgtgcttcttggatcagatcctggaacagaaaaagatcagtaatgaaaaaactgatgaagtctgaatagaatctggagtatttttaacagtagtgttgatttcttaatcttgataaatatagcagggtaatgtaagatgataacgttagagaaactgaaactgggtgagggctatctaggaattctctgtactatcttaccaaattttcggtaagtctaagaaagcaatgc

SEQ ID NO: 986 - DNA, 1953 bp, Homo sapiens
  source 1..1953: mol_type = genomic DNA
cgaggtcctcctcccagggcccggggctggggagcggaagccatcagtgggctcggaggacactgtcccagccaggacacggccatcggtcactaatctgcagcactggaatgtccgcgggccaatcagcgggcccagcctgactcctggagattgtgaatagctccatccagcctgagaaacaagccgggtggctgagccaggctgtgcacggagcgcctgacgggcccaacagacccatgctgcatccagagacctcccctggccgggggcatctcctggctgtgctcctggccctccttggcaccgcctgggcagaggtgtggccaccccagctgcaggagcaggctccgatggccggagccctgaacaggaaggagagtttcttgctcctctccctgcacaaccgcctgcgcagctgggtccagccccctgcggctgacatgcggaggctggactggagtgacagcctggcccagctggctcaagccagggcagccctctgtggaaccccaaccccgagcctggcgtccggcctgtggcgcaccctgcaagtgggctggaacatgcagctgctacccgcgggcttggtgtcctttgtcgaagtggtcagcctatggtttgcagaggggcagcggtacagccacgcggcaggagagtgtgctcgcaacgccacctgcacccactacacgcagctcgtgtgggccacctcaagccagctgggctgtgggcggcacctgtgctctgcaggccaggcagcgatagaagcctttgtctgtgcctactcccccagaggcaactgggaggtcaacgggaagacaatcgtcccctataagaagggtgcctggtgttcgctctgcacagccagtgtctcaggctgcttcaaagcctgggaccatgcaggggggctctgtgaggtccccaggaatccttgtcgcatgagctgccagaaccatggacgtctcaacatcagcacctgccactgccactgtccccctggctacacgggcagatactgccaagtgaggtgcagcctgcagtgtgtgcacggccggttccgggaggaggagtgctcgtgcgtctgtgacatcggctacgggggagcccagtgtgccaccaaggtgcattttcccttccacacctgtgacctgaggatcgacggagactgcttcatggtgtcttcagaggcagacacctattacagagccaggatgaaatgtcagaggaaaggcggggtgctggcccagatcaagagccagaaagtgcaggacatcctcgccttctatctgggccgcctggagaccaccaacgaggtgattgacagtgacttcgagaccaggaacttctggatcgggctcacctacaagaccgccaaggactccttccgctgggccacaggggagcaccaggccttcaccagttttgcctttgggcagcctgacaaccacgggtttggcaactgcgtggagctgcaggcttcagctgccttcaactggaacgaccagcgctgcaaaacccgaaaccgttacatctgccagtttgcccaggagcacatctcccggtggggcccagggtcctgaggcctgaccacatggctccctcgcctgccctgggagcaccggctctgcttacctgtctgcccacctgtctggaacaagggccaggttaagatcacatgcctcatgtccaaagaggtctcagaccttgcacaatgccagaagttgggcagagagaggcagggaggccagtgagggccagggagtgagtgttagaagaagctggggcccttcgcctgcttttgattgggaagatgggcttcaattagatggcgaaggagaggacaccgccagtggtccaaaaaggctgctctcttccacctggcccagaccctgtggggcagcggagcttccctgtggcatgaaccccacagggtattaaattatgaatcagctg

SEQ ID NO: 987 - DNA, 1788 bp, Homo sapiens
  source 1..1788: mol_type = genomic DNA
acctcagacatgcagctcctgtccacacttaatatatgcatgcattggatcacccagccctggtctttctgcctccatggataactgcatgaccctgagagaaaacctccttagatttagcatcctaggttcctcacacgcctcaccctgaatcctggccctcccgcagccccagcgccatttgtcccatcagtgacaagattcatattctgatgtagactctgttgccagagccagtgttgagccagtccgcctcttccccgggaagtgcctgcccttccctcctgttagggttggctctcgagcttgtgtgccagttcctgggttggccgtgagagttctacagacaaggaggaagtgctctcggtgtatttcctgtggtgggttcacacgcagctagacacagctaacttgagtcttggagctcctagagggaagcttctggaaaggaaggctcttcaggacctcttaggagccagagaagaggacgttgtcacagataaagagccaggctcaccagctcctgacgcatgcatcatgaccatgagacacaactggacaccagacctcagccctttgtgggtcctgctcctgtgtgcccacgtcgtcactctcctggtcagagccacacctgtctcgcagaccaccacagctgccactgcctcagttagaagcacaaaggacccctgcccctcccagcccccagtgttcccagcagctaagcagtgtccagcattggaagtgacctggccagaggtggaagtgccactgaatggaacgctgagcttatcctgtgtggcctgcagccgcttccccaacttcagcatcctctactggctgggcaatggttccttcattgagcacctcccaggccgactgtgggaggggagcaccagccgggaacgtgggagcacaggtacgcagctgtgcaaggccttggtgctggagcagctgacccctgccctgcacagcaccaacttctcctgtgtgctcgtggaccctgaacaggttgtccagcgtcacgtcgtcctggcccagctctgggctgggctgagggcaaccttgccccccacccaagaagccctgccctccagccacagcagtccacagcagcagggttaagactcagcacagggccagcagcagcacaaccttgaccagagcttgggtcctacctgtctacctggagtgaacagtccctgactgcctgtaggctgcgtggatgcgcaacacaccccctccttctctgctttgggtcccttctctcaccaaattcaaactccattcccacctacctagaaaatcacagcctccttataatgcctcctcctcctgccattctctctccacctatccattagccttcctaacgtcctactcctcacactgctctactgctcagaaaccaccaagactgttgatgccttagccttgcactccagggccctacctgcatttcccacatgactttctggaagcctcccaactattcttgcttttcccagacagctcccactcccatgtctctgctcatttagtcccgtcttcctcaccgccccagcaggggaacgctcaagcctggttgaaatgctgcctcttcagtgaagtcatcctctttcagctctggccgcattctgcagacttcctatcttcgtgctgtatgttttttttttcccccttcactctaatggactgttccagggaagggatgggggcagcagctgcttcggatccacactgtatctgtgtcatccccacatgggtcctcataaaggattattcaatgga

SEQ ID NO: 988 - DNA, 1549 bp, Homo sapiens
  source 1..1549: mol_type = genomic DNA
gaggaagtgctctcggtgtatttcctgtggtgggttcacacgcagctagacacagctaacttgagtcttggagctcctagagggaagcttctggaaaggaaggctcttcaggacctcttaggagccagtgtgaaggtgaaggaggaagcagatgcctgttcatatggaaacaaagacctggctgtgaagaggggaggcggacaccaaagtcctgacacttgggcgggacagaattgatctagaagaggacgttgtcacagataaagagccaggctcaccagctcctgacgcatgcatcatgaccatgagacacaactggacaccagacctcagccctttgtgggtcctgctcctgtgtgcccacgtcgtcactctcctggtcagagccacacctgtctcgcagaccaccacagctgccactgcctcagttagaagcacaaaggacccctgcccctcccagcccccagtgttcccagcagctaagcagtgtccagcattggaagtgacctggccagaggtggaagtgccactgaatggaacgctgagcttatcctgtgtggcctgcagccgcttccccaacttcagcatcctctactggctgggcaatggttccttcattgagcacctcccaggccgactgtgggaggggagcaccagccgggaacgtgggagcacaggtacgcagctgtgcaaggccttggtgctggagcagctgacccctgccctgcacagcaccaacttctcctgtgtgctcgtggaccctgaacaggttgtccagcgtcacgtcgtcctggcccagctctgggctgggctgagggcaaccttgccccccacccaagaagccctgccctccagccacagcagtccacagcagcagggttaagactcagcacagggccagcagcagcacaaccttgaccagagcttgggtcctacctgtctacctggagtgaacagtccctgactgcctgtaggctgcgtggatgcgcaacacaccccctccttctctgctttgggtcccttctctcaccaaattcaaactccattcccacctacctagaaaatcacagcctccttataatgcctcctcctcctgccattctctctccacctatccattagccttcctaacgtcctactcctcacactgctctactgctcagaaaccaccaagactgttgatgccttagccttgcactccagggccctacctgcatttcccacatgactttctggaagcctcccaactattcttgcttttcccagacagctcccactcccatgtctctgctcatttagtcccgtcttcctcaccgccccagcaggggaacgctcaagcctggttgaaatgctgcctcttcagtgaagtcatcctctttcagctctggccgcattctgcagacttcctatcttcgtgctgtatgttttttttttcccccttcactctaatggactgttccagggaagggatgggggcagcagctgcttcggatccacactgtatctgtgtcatccccacatgggtcctcataaaggattattcaatgga

SEQ ID NO: 989 - DNA, 1037 bp, Homo sapiens
  source 1..1037: mol_type = genomic DNA
agaagaggacgttgtcacagataaagagccaggctcaccagctcctgacgcatgcatcatgaccatgagacacaactggacaccagacctcagccctttgtgggtcctgctcctgtgtgcccacgtcgtcactctcctggtcagagccacacctgtctcgcagaccaccacagctgccactgcctcagttagaagcacaaaggacccctgcccctcccagcccccagtgttcccagcagctaagcagtgtccagcattggaagtgacctggccagaggtggaagtgccactgagctgggctgagggcaaccttgccccccacccaagaagccctgccctccagccacagcagtccacagcagcagggttaagactcagcacagggccagcagcagcacaaccttgaccagagcttgggtcctacctgtctacctggagtgaacagtccctgactgcctgtaggctgcgtggatgcgcaacacaccccctccttctctgctttgggtcccttctctcaccaaattcaaactccattcccacctacctagaaaatcacagcctccttataatgcctcctcctcctgccattctctctccacctatccattagccttcctaacgtcctactcctcacactgctctactgctcagaaaccaccaagactgttgatgccttagccttgcactccagggccctacctgcatttcccacatgactttctggaagcctcccaactattcttgcttttcccagacagctcccactcccatgtctctgctcatttagtcccgtcttcctcaccgccccagcaggggaacgctcaagcctggttgaaatgctgcctcttcagtgaagtcatcctctttcagctctggccgcattctgcagacttcctatcttcgtgctgtatgttttttttttcccccttcactctaatggactgttccagggaagggatgggggcagcagctgcttcggatccacactgtatctgtgtcatccccacatgggtcctcataaaggattattcaatgga

SEQ ID NO: 990 - DNA, 1002 bp, Homo sapiens
  source 1..1002: mol_type = genomic DNA
gggagggtcccttcctcagggagcacaggaactctgagactcagcaagggtgtcctgggagggctcggggatgggagagtacacagattcacaactcattcagaactgtagaagatgatggatgtgaccaagatcactttagtcctaggggactagagaaggaaaatgacatgaggcagtggggtatctgtgtgttctcccactgaccacgctttctttagtgactcctgattgcctcctcaagtcgcagacactatgctgcctcccatggccctgcccagtgtatcttggatgctgctttcctgcctcatgctgctgtctcaggttcaaggtgaagaaccccagagggaactgccctctgcacggatccgctgtcccaaaggctccaaggcctatggctcccactgctatgccttgtttttgtcaccaaaatcctggacagatgcagatctggcctgccagaagcggccctctggaaacctggtgtctgtgctcagtggggctgagggatccttcgtgtcctccctggtgaagagcattggtaacagctactcatacgtctggattgggctccatgaccccacacagggcaccgagcccaatggagaaggttgggagtggagtagcagtgatgtgatgaattactttgcatgggagagaaatccctccaccatctcaagccccggccactgtgcgagcctgtcgagaagcacagcatttctgaggtggaaagattataactgtaatgtgaggttaccctatgtctgcaagttcactgactagtgcaggagggaagtcagcagcctgtgtttggtgtgcaactcatcatgggcatgagaccagtgtgaggactcaccctggaagagaatattcgcttaattcccccaacctgaccacctcattcttatctttcttctgtttcttcctccccgctgtcatttcagtctcttcattttgtcatacggcctaaggctttaaagagcaataaaatttttagtctgc

SEQ ID NO: 991 - DNA, 2414 bp, Homo sapiens
  source 1..2414: mol_type = genomic DNA
cgggatgggaaaactatgcctggggccgacgctctgcccggctgctgccgctgaggaaagccgggacgcggagccccgccgagagcttctttgctccggacgcccctggacgtggcgggcagccgcgagggtaaccaccatgatcccctgggtgctcctggcctgtgccctcccctgtgctgctgacccactgcttggcgcctttgctcgcagggacttccggaaaggctcccctcaactggtctgcagcctgcctggcccccagggcccacccggccccccaggagccccagggccctcaggaatgatgggacgaatgggctttcctggcaaagacggccaagatggacacgacggcgaccggggggacagcggagaggaaggtccacctggccggacaggtaaccggggaaagccaggaccaaagggcaaagccggggccattgggcgggctggcccccgtggccccaagggggtcaacggtacccccgggaagcatggcacaccaggcaagaaggggcccaagggcaagaagggggagccaggcctcccaggcccctgcagctgtggcagtggccataccaagtcagctttctcggtggcagtgaccaagagctacccacgggagcggctgcccatcaagtttgacaagattctgatgaacgagggtggccactacaatgcttccagcggcaagttcgtctgcggcgtgcctgggatctactacttcacctacgacatcacgctggccaacaagcacctggccatcggcctggtgcacaacggccagtaccgcatccggacctttgatgccaacaccggcaaccacgatgtggcctcaggctccaccatcctggctctcaagcagggtgacgaagtttggctgcagatcttctactcagagcagaacgggctcttctatgacccttactggacagacagcctctttacgggcttcctaatctatgccgaccaggatgaccccaacgaggtatagacatgccacggcggtcctccaggcagggaacaagcttctggacttgggcttacagagcaagaccccacaactgtaggctgggggtggggggtcgagtgagcggttctagcctcaggctcacctcctctgcctctttttttccccttcattaaatccaaacctttttattcatccaaccatctatttattcacttctttttaaagtatctactgtgtaacaggcactatgctattctctgaaagatgcagcagtggacaagacagagtatctgtcctcatgcagcttacattctagcaggagatacaatttacaaatatacaagcaaataatataatattatgccaggatagaaatgaacatgccatggttgacagtaataggaataacaggagacagggaagaggtggaaatttgtttctttttttaagtttgcgtttttaggtttacttacatacagtgactctccagattttaagttgacaactcagtgaataatttttgcttatgtgcacactctgaaacctccatgtagatcaaagaacaagctatttccaacttctcacctcccttccccaaaagctctcttaagacccctctaagtcagtacctggaaaatttccatttttgagctgagttccaaagaaggaaatagagcaacacaaaggcctcgaaaagaggtctccagcaaaaggctctgcaagtgcaaagaccttgacaggaaagagggaggggccaaggtaagaactgagaagggaggcatgaggcgtgaggctggaagataatacagaatgtcccaggccatggcagagctcgttccattcacgaaggcttatcagaatacaaagtgacactgataggcggatcatcttgaatctgctcattgcatgagtcaagtcggccacagacttgagcgctttattattagttaatcttttgcaggcccgcttctcaatgaatgagatacaccaggatatgcacgtgcatctgagaaccgctgctctgagatggcaggaatggatcccacgcaaatgaatcgcaccccaagcacaggtgttgccagtatgcagggatctgggggcttaagaagctgcagtaaaagtgccaggtgctggcgggatgtggtagctcatgcctataatcccaggactttgggaagctgaggtggacggatcatttgaggtcaggagttcaagaccagcctgaccaacatggcaaaacatcgtctaaaaaaatacaaaaattagacaggcgtggtgttgggtgcctgtaatcccagctactggggaggctgaggcgggagaatcgcttgaacccaggaggtggaggttgcagttagctgagatcctgccactgcactccagcctgggcaacagagtgagactatctcaaaaaaaaacaaaaaaaaaaaaaaaacaa

SEQ ID NO: 992 - DNA, 439 bp, Homo sapiens
  source 1..439: mol_type = genomic DNA
cgacggagcggccctggctgcagcctcccggcgccagcgaagacaggctgagatgcggctgctcctgctcgtgccgctgctgctggctccagcgcccgggtcctcggctcccaaggtgaggcggcagagtgacacctggggaccctggagccagtggagcccctgcagccggacctgtggagggggtgtcagcttccgggagcgcccctgctactcccagaggagagatggaggctccagctgcgtgggccccgcccggagccaccgctcttgtcgcacggagagctgccccgacggcgcccgggacttccgggccgagcagtgcgcggagttcgacggagcggagttccaggggcggcggtatcggtggctgccctactacagcgccccaaacaagtgtgaactgaactgcattcccaagggtctggggctgcagggg

SEQ ID NO: 993 - DNA, 1470 bp, Homo sapiens
  source 1..1470: mol_type = genomic DNA
aaaatactaaccagccagagaaacagaatcctaactatttctgaggaaactgacttggcaacaagcattttgagaaatttattctgcccttgaacatctttgagcccattgagatgttctccaacgcaaacagcaggtccaaaatgtggctgcttttaacaatggcaagtttgatatctgtactggggactacacatggtttgtttggaaaattacatcctggaagccctgaagtgactatgaacattagtcagatgattacttattggggatacccaaatgaagaatatgaagttgtgactgaagatggttatattcttgaagtcaatagaattccttatgggaagaaaaattcagggaatacaggccagagacctgttgtgtttttgcagcatggtttgcttgcatcagccacaaactggatttccaacctgccgaacaacagccttgccttcattctggcagatgctggttatgatgtgtggctgggcaacagcagaggaaacacctgggccagaagaaacttgtactattcaccagattcagttgaattctgggctttcagctttgatgaaatggctaaatatgaccttccagccacaatcgacttcattgtaaagaaaactggacagaagcagctacactatgttggccattcccagggcaccaccattggttttattgccttttccaccaatcccagcctggctaaaagaatcaaaaccttctatgctctagctcctgttgccactgtgaagtatacaaaaagccttataaacaaacttagatttgttcctcaatccctcttcaagtttatatttggtgacaaaatattctacccacacaacttctttgatcaatttcttgctactgaagtgtgctcccgtgagatgctgaatctcctttgcagcaatgccttatttataatttgtggatttgacagtaagaactttaacacgagtcgcttggatgtgtatctatcacataatccagcaggaacttctgttcaaaacatgttccattggacccaggctgttaagtctgggaaattccaagcttatgactggggaagcccagttcagaataggatgcactatgatcagtcccaacctccctactacaatgtgacagccatgaatgtaccaattgcagtgtggaacggtggcaaggacctgttggctgacccccaagatgttggccttttgcttccaaaactccccaatcttatttaccacaaggagattcctttttacaatcacttggactttatctgggcaatggatgcccctcaagaagtttacaatgacattgtttctatgatatcagaagataaaaagtagttctggatttaaagaattatccgtttgtttttccaaaatactttattctctcatacatagtattttcataatgtttgacatgcagtgcttctttctgtaattttgactttagaaatatattggcatcaac

SEQ ID NO: 994 - DNA, 1753 bp, Homo sapiens
  source 1..1753: mol_type = genomic DNA
gctgttacctcttctggcgtccgtgcccgcggaagttcgctcctagggaagtcgctcgcgtcctcaagagcacctgagaggatctcggcgaagcggaaggctttggtgccagctgggagagtctgcgccggatttcctcagctccttggcgcgtttcctcggagccgggggaggcaaagcacggaccccggagtcggcgcccatagcgggacgccctcgcgaggggcgggagtgcgggagagccgagctgctgcccttgactggtgctcaggggaccacagctgcaatgacagtttgggcctgcaaaaagaaggctggaacaacgggagatggaagctttctgcaaatgcagcaccactggtatccatgaatttaacctgcccatcattcttcctaaacaagagactattgaaaagtcagggtgttcaaaatggcttcagatcttatcaggacaatcttggctgttgcactaatttccaaacttggcacagctgtagatgcagaactgatgccatctggtgcgattctacagaataagagagaaaatttacccagagtgtgccatgcactggcttttctgggaatggcaaggtgccaggatttgtttttggttcgcttgcaggggtggaaacttggaactaggttccaagatggtccccgcagcaccccacaagaagaaggaggaagcccacagagaaaacggggcatgccagttcaaatccacttccttttaaagagcttcctcagcagcccaataacttttgccttcatctcattggccagaactgtgtcattggctactgctatctgcaagattgtctgagaaatgtagtttttgtagctggatatataactgcctttgacaaaaatccagtttctcttgatgaagaagaagatgatggtggatcttgggaggacaactaacattttatgccctggctacagaatacagttgcagaggagcataaagttcaaaaagatcaaaactctagttccttcacaactgtcaaagctccaagcagcactgctcccctctgacagagtgagcagagtgaaggcatgtcaggtgttctcacaaaactcttgacagggctgacctctctcagtcaatatccttgtcccacatcaggattttctagagggccctgggtacctgtgcacttccttggtggccgtaacctctttgtggagggttggtgtaggataaagaatgttctattacgctgctccctcatctgtatcatttctctcctctctaattttcctgtcagttatattttggtggagtctgggtttgtgtatttgattcctatagaaagaccatcgctttcatgcatggaggaggggaatctacgcaaagaaaggctaccttactcctttctgtgactccaccaccagtctaggaatatcctgggagaagaattgcctctcaaagctgcttctataagcagcctacatcctagctaagcaaagaagaaacacttcccacatctagggctgtctaaaagaactttctgtgatgacagaaatgttctatatctgcagtgtccaatatggtaaccatataggcacatgtggctagtgaacacttgaaatgtggctagtgtgactgaggaaggaaaatttaaattttgtttaattgtaattaatttaaattcagatagccaaatggggctactagctattgtgttagatagcacggtatactttattctctttcttgtgttgtagaaccagctgggagaggtgtggg

SEQ ID NO: 995 - DNA, 2032 bp, Homo sapiens
  source 1..2032: mol_type = genomic DNA
tttggagggaggaatcccttcctcccggtgatccttactcatattctagccaccaaccacggttagtgcttgcggattgccgtgcaggagccgagctgctgcccttgactggtgctcaggggaccacagctgcaatgacagtttgggcctgcaaaaagaaggctggaacaacgggagatggaagctttctgcaaatgcagcaccactggtatccatgaatttaacctgcccatcattcttcctaaacaagagactattgaaaagtcagggtgttcaaaatggcttcagatcttatcaggacaatcttggctgttgcactaatttccaaacttggcacagctgtagatgcagaactgatgccatctggtgcgattctacagaataagagagaaaatttacccagagtgtgccatgcactggcttttctgggaatggcaaggtgccaggatttgtttttggttcgcttgcaggggtggaaacttggaactaggttccaagatggtccccgcagcaccccacaagaagaaggaggaagcccacagagaaaacggggcatgccagttcaaatccacttccttttaaagagcttcctcagcagcccaataacttttgccttcatctcattggccagaactgtgtcattggctactgctatctgcaagattgtctgagaaatgtagtttttgtagctggatatataactgcctttgacaaaaatccagtttctcttgatgaagaagaagatgatggtggatcttgggaggacaactaacattttatgccctggctacagaatacagttgcagaggagcataaagttcaaaaagatcaaaactctagttccttcacaactgtcaaagctccaagcagcactgctcccctctgacagagtgagcagagtgaaggcatgtcaggtgttctcacaaaactcttgacagggctgacctctctcagtcaatatccttgtcccacatcaggattttctagagggccctgggtacctgtgcacttccttggtggccgtaacctctttgtggagggttggtgtaggataaagaatgttctattacgctgctccctcatctgtatcatttctctcctctctaattttcctgtcagttatattttggtggagtctgggtttgtgtatttgattcctatagaaagaccatcgctttcatgcatggaggaggggaatctacgcaaagaaaggctaccttactcctttctgtgactccaccaccagtctaggaatatcctgggagaagaattgcctctcaaagctgcttctataagcagcctacatcctagctaagcaaagaagaaacacttcccacatctagggctgtctaaaagaactttctgtgatgacagaaatgttctatatctgcagtgtccaatatggtaaccatataggcacatgtggctagtgaacacttgaaatgtggctagtgtgactgaggaaggaaaatttaaattttgtttaattgtaattaatttaaattcagatagccaaatggggctactagctattgtgttagatagcacggtatactttattctctttcttgtgttgtagaaccagctgggagaggtgtgggtcagtcatgggcttggtatcccctggtcttcactattctagcttgccattgaatttgtctcccagaggaaaagaaagaatggtatttggaattaaattcaagatgttaacttgacatctatatattgcacatattcctgtatagtgaatggatgacctcctgggaatagttcctgtgactgattttagtgataattgatcatgaagaaatggcagtactgctccacttcaccttcctagtgactattatgtgttcctagtcagagtgactcagcagagattattttgttctcttgtgcaatttattctgtgtcattttatttttgtaatattgtggcagctaaatgattattctgtgtatgtttttcaaaatattaggtggcttatattttttaaaaggctatgaaataaaaataaactatacgtaacaca

SEQ ID NO: 996 - DNA, 3540 bp, Homo sapiens
  source 1..3540: mol_type = genomic DNA
ggagggctggggcggtacgaagcgggggtgggctctgcgcgtaatggcagcgccgtggcctcgcgtccatctttgccgttctctcggacctgtcacaaaggagtcgcgccgccgccgccgccccctccctccggtgggcccgggaggtagagaaaaactgccattggatgtccagaatcccctgtagttgataatgttgggaataagctctgcaactttctttggcattcagttgttaaaaacaaataggatgcaaattcctcaactccaggttatgaaaacagtacttggaaaactgaaaactacctaaatgatcgtctttggttgggccgtgttcttagcgagcagaagccttggccagggtctgttgttgactctcgaagagcacatagcccacttcctagggactggaggtgccgctactaccatgggtaattcctgtatctgccgagatgacagtggaacagatgacagtgttgacacccaacagcaacaggccgagaacagtgcagtacccactgctgacacaaggagccaaccacgggaccctgttcggccaccaaggaggggccgaggacctcatgagccaaggagaaagaaacaaaatgtggatgggctagtgttggacacactggcagtaatacggactcttgtagataatgatcaggaacctccctattcaatgataacattacacgaaatggcagaaacagatgaaggatggttggatgttgtccagtctttaattagagttattccactggaagatccactgggaccagctgttataacattgttactagatgaatgtccattgcccactaaagatgcactccagaaattgactgaaattctcaatttaaatggagaagtagcttgccaggactcaagccatcctgccaaacacaggaacacatctgcagtcctaggctgcttggccgagaaactagcaggtcctgcaagtataggtttacttagcccaggaatactggaatacttgctacagtgtctgaagttacagtcccaccccacagtcatgctttttgcacttatcgcactggaaaagtttgcacagacaagtgaaaataaattgactatttctgaatccagtattagtgaccggcttgtcacattggagtcctgggctaatgatcctgattatctgaaacgtcaagttggtttctgtgcccagtggagcttagacaatctctttttaaaagaaggtagacagctgacctatgagaaagtgaacttgagtagcattagggccatgctgaatagcaatgatgtcagcgagtacctgaagatctcacctcatggcttagaggctcgctgtgatgcctcctcttttgaaagtgtgcgttgcaccttttgtgtggatgccggggtatggtactatgaagtaacagtggtcacttctggcgtcatgcagattggctgggccactcgagacagcaaattcctcaatcatgaaggctacggcattggggatgatgaatactcctgtgcgtatgatggctgccggcagctgatttggtacaatgccagaagtaagcctcacatacacccatgctggaaagaaggagatacagtaggatttctgttagacttgaatgaaaagcaaatgatcttctttttaaatggcaaccagctgcctcctgaaaagcaagtcttttcatctactgtatctggattttttgctgcagctagtttcatgtcatatcaacaatgtgagttcaattttggagcaaaaccattcaaatacccaccatctatgaaatttagcacttttaatgactacgccttcctaacagctgaagaaaaaatcattttgccaaggcacaggcgtcttgctctgttgaagcaagtcagtatccgagaaaactgctgttccctttgttgtgatgaggtagcagacacacaattgaagccatgtggacacagtgacctgtgcatggattgtgccttgcagctggagacctgcccattgtgtcgtaaagaaatagtatctagaatcagacagatttctcatatttcatgacacatgtgaagaggcatcgtggacttttttctactcaattccagccaatgttgaaaagaaaaagaaaaaaaaaactctctaatcagttgtacacacattgaaacttatagccatggccagattttatgctaaaaatggtagtttgtcaaagacaaaattctcttagaatctaatccaacttgccagccctgagaaaatcccttttaaggccaaggaaagctgaatgctagcagccaggcctgtggtacttccatgagaaaccatagcagacaatgccctcccaagtactgaaatcacactggaatcccccttgttgggttcatttgattgtttaacacaggatgtgttgtgtcattctgaagtttttatttggggcagaagtctttatggagatgtaaatgacagcgtttctgggttatgcataacttctcactggtcagagacaccggtgtgtcaagcatggatattgcattgcaagacttgaatctataaaaattagaatcacacagtcagtactacaagcaaaacagagaacctgaaagaaggtgcacagactgtaagaaaaaacccaagtttgtgatatttcagtgattccaaagaacattctaggttttttgtttgtttttttgttttttgggttttttttttttactgcagaaaattggtggtattttcacattcatagtgtttctatccaatttcagtacccacatttaatgaggaaaaaatgttttaccaatgaaggaggaattcttaaattagctgtaatgttaggttggagaaaatttggtatttagggtattttcaaggtaccatcaaatcagatttctgtttttttgttaaaaaaaatttttttaatcagtattgtttttacaagtaatatactttgaaactcttgaactaatagtctcaaaaactctagaggacagtctgagaacacgtatttctattgttctaaataaatacatgtttttgaatagttcaatcatgaattattgactatgtcttcatcaaaagtgttaatccctctcagggtctctggtgaagaccttcaagagtttggttttttctcccaggaaattggaaggtagaattgtaaattcatagaacttcttttataatggtgtacctcagcagctgcctttcaatttatgccaagtccttacagagtttatacttgaatagtaaatatgtcttctgagttttacagtgtcttaaactcaatgcacatttttttttcttctttttccaccccttcttgtttgtagttcattatacctgtcctattacagaactgatttccttcctggctgtacatgttggggtgctggatttttttccgtgtctttagtcttccataaatccacacacacacacacacacaaaaaatatatatatatataaatatatatgtaggatacatgttctcttctttagcttgtggtgaatacagtaatttgcattgaagaataaaacatctgttgccttttttgactaag

SEQ ID NO: 997 - DNA, 638 bp, Homo sapiens
  source 1..638: mol_type = genomic DNA
gcaggtcggcggcggcggcaggagagcggccgggcgtcagctcctcgacccccgtgtcgggctagtccagcgaggcggacgggcggcgtgggcccatggccaggcccggcatggagcggtggcgcgaccggctggcgctggtgacgggggcctcggggggcatcggcgcggccgtggcccgggccctggtccagcagggactgaaggtggtgggctgcgcccgcactgtgggcaacatcgaggagctggctgctgaatgtaagagtgcaggctaccccgggactttgatcccctacagatgtgacctatcaaatgaagaggacatcctctccatgttctcagctatccgttctcagcacagcggtgtagacatctgcatcaacaatgctggcttggcccggcctgacaccctgctctcaggcagcaccagtggttggaaggacatgttcaattagacttagcacctcacagatgcttgggcctggaaatgaagccatgaaaatgaagccctcagccttcttggagatcagagccatggtcctcacccacagcacatgggtctctaaacctggacctcaactcgcccatctgtaaaatgagggacttacattaaattcctacagctcctttcagcttga

SEQ ID NO: 998 - DNA, 229 bp, Homo sapiens
  source 1..229: mol_type = genomic DNA
agaaggacgcaggcagcaaagagtagtcagtcccttcttggctctgctgacactcgagcccacattccatcacctgctcccaatcatgcaggtctccactgctgcccttgccgtcctcctctgcaccatggctctctgcaaccaggtcctctctgcaccacaggccggcaggtctgtgctgaccccagtgaggagtgggtccagaaatacgtcagtgacctggagctga

SEQ ID NO: 999 - DNA, 244 bp, Homo sapiens
  source 1..244: mol_type = genomic DNA
agaaggacgcaggcagcaaagagtagtcagtcccttcttggctctgctgacactcgagcccacattccatcacctgctcccaatcatgcaggtctccactgctgcccttgccgtcctcctctgcaccatggctctctgcaaccaggtcctctctgcaccactctccagaccaagagaggccggcaggtctgtgctgaccccagtgaggagtgggtccagaaatacgtcagtgacctggagctga

SEQ ID NO: 1000 - DNA, 4154 bp, Homo sapiens
  source 1..4154: mol_type = genomic DNA
aggagctgaagtattggcagaagctccggcatgacttggagcgggcgcggctgctgattgagctgattcggaagagagagaagctcaaacgagagcaggtcaaagtccagcaggctgccatggagctggagctgatgccattcaatgttctgttgaggacaacactggacctgctgcaggagaaggatcctgcacacatcttcgcagaaccagtcaacttgagtgaggttccagattacctggaattcatatccaagccaatggatttttctactatgaggcggaagctggagtcccacctgtaccgcaccttggaggagtttgaggaggactttaaccttatagttaccaactgcatgaagtataatgctaaagacacaattttccaccgagcagctgtccgcctgcgggacctgggaggggccatcctacggcacgcccggcggcaggcagagaacatcggctatgaccccgagaggggcactcacctgcccgagtcacccaaattggaagacttttaccgcttctcctgggaagacgtggacaacatcctcatcccagagaaccgggcccatttgtccccagaggtgcagctgaaggagctgctggagaaactggacctggtgagcgccatgcggtccagtggggcccgcacccgtcgtgtccgcctgctacgccgggagatcaatgcccttcggcagaagctggcacagccaccaccaccacagccaccatcactcaacaagacagtatccaatggggagctgccagcagggccccagggggatgcagctgtgctggagcaggccttgcaggaggagccagaagacgatggggacagagatgactccaaactgcctcctccgccaaccctggagcccactgggcctgcaccttccttgtctgagcaagaatcccccccggagccccctactctgaaacccattaatgatagcaaacctccaagcaggttcctaaagcccagaaaggtggaagaagatgagctcttggaaaaatcaccactgcagctagggaatgagcctttgcaacgcttgctcagtgacaatggcatcaacagactatccctcatggcccctgacaccccggccggtaccccacttagtggtgtgggtcgccgcacatcagtcctcttcaagaaggccaagaatggggttaagctacagagaagcccagacagggtcctggagaatggcgaggaccatggtgtggcaggctctcctgcctctccagccagcatcgaggaagagcgccactcccggaagcggccaaggagcaggagctgtagtgagagcgaaggggagaggtccccccagcaggaggaagagacaggcatgaccaacggctttggaaaacaccgaaagcgggtctgactctgaatgtagtttgggtctcagtggtggactggcatttgaagcttgcagtggtctgacgccccccaaacgcagccgtgggaagccagccctgtctcgagtgcccttcctggaaggtgtgaacggagactctgactacaatggctcaggcagaagcctcctgctgccctttgaagaccgcggagacctggagcccttggagctggtgtgggccaagtgccgaggctacccctcctaccctgccttgatcatcgatcccaagatgccccgggagggcctcctgcacaatggcgttcccatccctgtccccccgctggacgtgctgaagctgggagagcagaaacaggcagaggctggagagaagctcttccttgtcctcttctttgacaacaagcgcacctggcagtggcttccaagggacaaagtcctgcccttgggtgtggaagacaccgtggacaagctcaagatgctggaaggccgcaagaccagcatccgcaagtcagtgcaggtggcctatgaccgtgcgatgatccacctgagcagagtccgggggccccactccttcgtcacttccagctacctgtaagggcagggctgggcctgcatccgcttgccctgcctccatcccgcagggcacagagaagcctcttctgcccctgccagatgtatggccggcagcttccccctctcatggtaggccagggactgggctttctccccactaagggcaaggccccagttttgaccaatcgcatggttctcctggcaggcctgctgtgtgccaaaaactcccacccaaggtccctcaggggatatttcactgaagaaccagttagaagtagaaacagctgtggggcttgggcccagcttaggagattgcccagatggcaagaggtcctgggctccttcttgaggggctgcctggcccgctccatcctactcccactaactacacctcagggcgggtgaggttccgacactgatcccagagatgccgtggatacgccagggtcccagggggaatctccccaagctcacactctctcccgcttatcgcctattctcacacctcttctcggtcccatcttctgcacccattgcccagtcttgctttctctttcccatattccttttctttttctcttgtgccaaactgacagaaaccgtcaccacactggtctttttctttaatgtctcattccccttgaggccagctgctatgccaggtggtgtctctgccaggctcctcaggcccagacagaggccagcccacaacctatgaccccctcccccaggacaccacctcccacccacagaccttccctttagctgttgacacaacttcccagctctgcaagtgtgccccctggatcaaggcgggtcccctcttgtttttttctttgctgccacgaggtggtccaagccttcagggtgggctcctatcaggctgggtgtgcgagtgtccatctgtccacatggatgtcgagggtggtttgtgtggagctgtgctcgtcagctgggtctgccctcttcccccttttctccttcttctctcctcatggactttttctgcaattgcagtcttaagcttcactctccaccacctggatggcatggcgcctgccaccaaacatcttcctggcctgcgctctgccctgccctgcctagcctctgctactcccacttcccaactccagggaatgcattacttttatttcaaaccctctgcctccttccttctttctcttcaaccccctccccaccttcaccttctcaaaaatggaaggaaaaaaaaactgtgaatggggaatgctgactgacaaaccaacacaactttcagaggcttcagtgtctgttctctggacatttcttttcacctcctgagcaccaaagtcgcagggccagttgcaggccgctgattgccatgttgatttttaacctgatattctttttaattgttttaaatttttcataggggagttttggacaaaacagtcactggggagatcactgccatttttacacacttgactttttaaaaatacaaccaaccaaccaccacaacttcttatacatttgggacatgagccagagtttaaaagggaaccaacaaaacactataacttaaaaggatggggttttggattttgtataataataaaaacaatacagcatatggctagggaaggacatggtgtatataattgtaaaatactgttctaaattattcaggcctatagtttccattactggagtcctccattgtgtggccacacagtgtcgttgatttaaaggagccagtgcttcccctctccccaggtagttggtcagctgtggactctgtgacctttgtctaaacctgtgttgtaagatcttgggacttcctctctttctatgtctatctcttccccccaacactttctcttcttagtctctctctttatttttcaatctctgaatattttagtctctctctgagtctcattttttaaaatgctcttttagaacgggaaacggctcagatcctgctgtggcacggggcctatgtgtctctgtcgcgtctgctgtgaagcacatgatgctctatttattgtagagagtgactttatttgctttctagaattgtttataacagatggtataagagaggtaataaacagagaaaaatctatgcttgtaaagaatacaaaagttaattttacctactataatatgactgtctgaaacttattttctctctgagaaataaatgttctaatgggc

SEQ ID NO: 1001 - DNA, 5163 bp, Homo sapiens
  source 1..5163: mol_type = genomic DNA
ccagccatgggctcggggcgcgtacccgggctctgcctgcttgtcctgctggtccacgcccgcgccgcccagtacagcaaagccgcgcaagatgtggatgagtgtgtggaggggactgacaactgccacatcgatgctatctgccagaacaccccgaggtcatacaagtgcatctgcaagtctggctacacaggggacggcaaacactgcaaagacgtggatgagtgcgagcgagaggataatgcaggttgtgtgcatgactgtgtcaacatccctggcaattaccggtgtacctgctatgatggattccacctggcacatgacggacacaactgtctggatgtggacgagtgtgccgagggcaacggcggctgtcagcagagctgtgtcaacatgatgggcagctatgagtgccactgccgggaaggcttcttcctcagcgacaaccagcatacctgtatccagcggccagaagaaggaatgaattgcatgaacaagaaccacggctgtgcccacatttgccgggagacacccaaggggggtattgcctgtgaatgccgtcctggctttgagcttaccaagaaccaacgggactgtaaattgacatgcaactatggtaacggcggctgccagcacacgtgtgatgacacagagcagggtccccggtgcggctgccatatcaagtttgtgctccataccgacgggaagacatgcatcggggaaaggcggctagagcagcacatccccactcaagccgtttctaatgagacctgtgctgtcaacaacgggggctgtgacagtaagtgccatgatgcagcgactggtgtccactgcacctgccctgtgggcttcatgctgcagccagacaggaagacgtgcaaagatatagatgagtgccgcttaaacaacgggggctgtgaccatatttgccgcaacacagtgggcagcttcgaatgcagttgcaagaaaggctataagcttctcatcaatgagaggaactgccaggatatagacgagtgttcctttgatcgaacctgtgaccacatatgtgtcaacacaccaggaagcttccagtgtctctgccatcgtggctacctgttgtatggtatcacccactgtggggatgtggatgaatgcagcatcaaccggggaggttgccgctttggctgcatcaacactcctggcagctaccagtgtacctgcccagcaggccagggtcggctgcactggaatggcaaagattgcacagagccactgaagtgtcagggcagtcctggggcctcgaaagccatgctcagctgcaaccggtctggcaagaaggacacctgtgccctgacctgtccctccagggcccgatttttgccagagtctgagaatggcttcacggtgagctgtgggacccccagccccagggctgctccagcccgagctggccacaatgggaacagcaccaactccaaccactgccatgaggctgcagtgctgtccattaaacaacgggcctccttcaagatcaaggatgccaaatgccgtttgcacctgcgaaacaaaggcaaaacagaggaggctggcagaatcacagggccaggtggtgccccctgctctgaatgccaggtcaccttcatccaccttaagtgtgactcctctcggaagggcaagggccgacgggcccggacccctccaggcaaagaggtcacaaggctcaccctggaactggaggcagaggtcagagccgaagaaaccacagccagctgtgggctgccctgcctccgacagcgaatggaacggcggctgaaaggatccctgaagatgctcagaaagtccatcaaccaggaccgcttcctgctgcgcctggcaggccttgattatgagctggcccacaagccgggcctggtagccggggagcgagcagagccgatggagtcctgtaggcccgggcagcaccgtgctgggaccaagtgtgtcagctgcccgcagggaacgtattaccacggccagacggagcagtgtgtgccatgcccagcgggcaccttccaggagagagaagggcagctctcctgcgacctttgccctgggagtgatgcccacgggcctcttggagccaccaacgtcaccacgtgtgcaggtcagtgcccacctggccaacactctgtagatgggttcaagccctgtcagccatgcccacgtggcacctaccaacctgaagcaggacggaccctatgcttcccttgtggtgggggcctcaccaccaagcatgaaggggccatttccttccaagactgtgacaccaaagtccagtgctccccagggcactactacaacaccagcatccaccgctgtattcgctgtgccatgggctcctatcagcccgacttccgtcagaacttctgcagccgctgtccaggaaacacaagcacagactttgatggctctaccagtgtggcccaatgcaagaatcgtcagtgtggtggggagctgggtgagttcactggctatattgagtcccccaactacccgggcaactacccagctggtgtggagtgcatctggaacatcaaccccccacccaagcgcaagatccttatcgtggtaccagagatcttcctgccatctgaggatgagtgtggggacgtcctcgtcatgagaaagaactcatccccatcctccattaccacttatgagacctgccagacctacgagcgtcccattgccttcactgcccgttccaggaagctctggatcaacttcaagacaagcgaggccaacagcgcccgtggcttccagattccctatgttacctatgatgaggactatgagcagctggtagaagacattgtgcgagatggccggctctatgcctctgaaaaccaccaggagattttaaaggacaagaagctcatcaaggccttctttgaggtgctagcccacccccagaactacttcaagtacacagagaaacacaaggagatgctgccaaaatccttcatcaagctgctccgctccaaagtttccagcttcctgaggccctacaaatagtaaccctaggctcagagacccaattttttaagcccccagactccttagccctcagagccggcagccccctaccctcagacaaggaactctctcctctctttttggagggaaaaaaaaaatatcactacacaaaccaggcactctccctttctgtctttctagtttcctttccttgtctctctctgcctgcctctctactgttcccccttttctaacacactacctagaaaagccattcagtactggctctagtccccgtgagatgtaaagaaacagtacagccccttccactgcccattttaccagctcacattcccgaccccatcagcttggaagggtgctagaggcccatcaaggaagtgggtctggtgggaaacggggaggggaaagaagggcttctgccattatagggttgtgccttgctagtcaggggccaaaatgtcccctggctctgctccctagggtgattctaacagcccagggtcctgccaaagaagcctttgatttacaggcttaatgccagcaccagtcctctggggcacatggtttgagctctggacttcccacatggccagctttcttgtctatacagatcctctctttctttccctacgtctgcctggggtctactccataagggtttacaaatggcccacaacactgagttagtggacaccggctaaatgaggaagagcagcaggcattgtcatggtgaatgccccgctgtagctccctgagagaaagactgtaactctgcaggacagaaacaaggttttaaagcattgccaaaaaaaagaaaacagaaagaaaaaatgtatcatctaaaggactagacacagaacaattggaagtcaacttcaaacactaatcccttttcttgtcttccctggcccagccacctcctcagccccatgtgatgctccctgggggagccctactccccttgctacatgttgtccttaaacatggttattgacctgaagccagcctaggccttgccctacagttgtttttcccttgtagccccagctggcttgtgggcttcaccaaagaggaccccactctgaagccagcctggagccacctacctctggcctcaggctgtgggcagcaaaaggaatgtgtgtgcacttggcgagcctcctgcccaccctgtccacacctaataagtgcaatcattttgagtctttctatgttgtctagacggaggggtttttgttttctgggtttgttttttgtttttgtttcttcttcctctattagcaaaaccctatttatagctgcccaagagaaaagagtgtatgtttggagtggaagaaaatcggttttgaatctcatgaaccttgagtgctggagcatctgatctgtctctatgccaccactggccacctagagcccttggctgtggtaatccagggtaattgcgcagaggcatctgatgtgtaggaaagtaattctggggatttgatggagcagaaaggagagagacctatgtttgctaaaccaatcttgctatccctatgcctctccatggagtcagtgtggacctcatgattatagaggccaatggaactggtcagtgattctctaccccaagtagggaaaacctccatcttttccctgtcttcatcctgttatcccctggtgtacacatggaagaggaccaggacataccacctggggatgggctgactcagggtcccgaggccagagacaaagctgtgggagccaagaataagacagaaggcatcagatatttgcctggctctggtcacttccctttgaagttgacttcaagcttagcttcctcaactactgtttttcagaaggaagaaagaatcaaatggaagaagaatcaagtccatgcccaagcccaaagcctgcacacattctgcccttaatccaagtgttgcctataaaattattttctgttttctcactctagttcccccaaagctgtagtcccaatcaatcaaaggctaccaactgagtcctcaggttcatttcttttttttttttttttctttttaactctcctggtaactcacagaacagctcaggttcatttctaggtgactgtcctaggctactgctcccccaggagactcaacactaaataaaggagtc

SEQ ID NO: 1002 - DNA, 2037 bp, Homo sapiens
  source 1..2037: mol_type = genomic DNA
cgcctccgccttcggaggctgacgcgcccgggcgccgttccaggcctgtgcagggcggatcggcagccgcctggcggcgatccagggcggtgcggggcctgggcgggagccgggaggcgcggccggcatggaggcgctgctgctgggcgcggggttgctgctgggcgcttacgtgcttgtctactacaacctggtgaaggccccgccgtgcggcggcatgggcaacctgcggggccgcacggccgtggtcacgggtgagtgcggaggcgggtgagtgcgagctggcggggcgcgcggagaggaggccgggccggcggtagcagcggcccgccgggctcagctcagctcggctcccgcccgcggtccgcaggcgccaacagcggcatcggaaagatgacggcgctggagctggcgcgccggggagcgcgcgtggtgctggcctgccgcagccaggagcgcggggaggcggctgccttcgacctccgccaggagagtgggaacaatgaggtcatcttcatggccttggacttggccagtctggcctcggtgcgggcctttgccactgcctttctgagctctgagccacggttggacatcctcatccacaatgccggtatcagttcctgtggccggacccgtgaggcgtttaacctgctgcttcgggtgaaccatatcggtccctttctgctgacacatctgctgctgccttgcctgaaggcatgtgcccctagccgcgtggtggtggtagcctcagctgcccactgtcggggacgtcttgacttcaaacgcctggaccgcccagtggtgggctggcggcaggagctgcgggcatatgctgacactaagctggctaatgtactgtttgcccgggagctcgccaaccagcttgaggccactggcgtcacctgctatgcagcccacccagggcctgtgaactcggagctgttcctgcgccatgttcctggatggctgcgcccacttttgcgcccattggcttggctggtgctccgggcaccaagagggggtgcccagacacccctgtattgtgctctacaagagggcatcgagcccctcagtgggagatattttgccaactgccatgtggaagaggtgcctccagctgcccgagacgaccgggcagcccatcggctatgggaggccagcaagaggctggcagggcttgggcctggggaggatgctgaacccgatgaagacccccagtctgaggactcagaggccccatcttctctaagcaccccccaccctgaggagcccacagtttctcaaccttaccccagccctcagagctcaccagatttgtctaagatgacgcaccgaattcaggctaaagttgagcctgagatccagctctcctaaccctcaggccaggatgcttgccatggcacttcatggtccttgaaaacctcggatgtgtgcgaggccatgccctggacactgacgggtttgtgatcttgacctccgtggttactttctggggccccaagctgtgccctggacatctcttttcctggttgaaggaataatgggtgattatttcttcctgagagtgacagtaaccccagatggagagataggggtatgctagacactgtgcttctcggaaatttggatgtagtattttcaggccccacccttattgattctgatcagctctggagcagaggcagggagtttgcaatgtgatgcactgccaacattgagaattagtgaactgatccctttgcaaccgtctagctaggtagttaaattacccccatgttaatgaagcggaattaggctcccgagctaagggactcgcctagggtctcacagtgagtaggaggagggcctgggatctgaacccaagggtctgaggccagggccgactgccgtaagatgggtgctgagaagtgagtcagggcagggcagctggtatcgaggtgccccatgggagtaaggggacgccttccgggcggatgcagggctggggtcatctgtatctgaagcccctcggaataaagcgcgttgaccgccgaa

SEQ ID NO: 1003 - DNA, 4846 bp, Homo sapiens
  source 1..4846: mol_type = genomic DNA
cgagccagcgagcgagcagagcacatcgctgcgggctcacaaagcggccagacgctcggcggcggcgtgtggcaggagcgcaggggcgcgagccggcgatcagccttcccggcgaccgtgccgcgggagctcgagcaactcggactaggggacccgggccggcccccaagatgccggcgatcgcggtgttggcggcggccgccgcggcgtggtgcttcctccaagtcgagagccggcacctggacgcgctcgccggaggcgcgggccccaaccacggcaatttcctagacaatgaccagtggctgagcaccgtctcccagtacgaccgggacaagtactggaaccgctttcgagacgatgattatttcagaaactggaatcccaacaagccctttgaccaagccctggacccatccaaggacccctgcctgaaggtaaaatgcagccctcacaaagtgtgtgtgacccaggactaccagaccgccctgtgtgtcagccgcaagcacctgctccccaggcaaaagaaggggaacgtggcccagaaacactgggttggaccttcgaatttggtcaagtgcaagccctgtcccgtggcacagtcagccatggtctgcggctcagatggccactcctacacatccaagtgcaaattggagttccatgcttgttctactggcaaaagcctcgccaccctctgtgatgggccctgtccctgtctcccagagcctgagccaccaaagcacaaggcagaaaggagtgcctgcacagacaaggagttgcggaaccttgcctcccggctgaaggattggtttggagctctccacgaggatgcgaacagagtcatcaagcccaccagctccaacacagcccaaggcaggtttgacactagcatcctgcccatctgcaaggactccctgggctggatgttcaacaagttggacatgaactatgacctcctgcttgacccttcagagatcaatgccatctacctggataagtacgagccctgtatcaagcctcttttcaactcgtgtgactccttcaaggatggcaagctttctaacaatgagtggtgctactgcttccagaagcctggaggtctcccttgccagaatgaaatgaacagaattcagaagctgagtaaggggaaaagcctgttgggggccttcatacctcggtgtaatgaggagggctattacaaagccacacagtgccacggcagcacggggcagtgctggtgtgtggacaaatatgggaatgagttggctggctccaggaaacagggtgctgtgagctgtgaagaggagcaggaaacctcaggggattttggcagtggtgggtccgtggtcctgctggatgacctagaatatgaacgggagctgggaccaaaggacaaagaggggaagctgagggtgcacacccgagccgtgacagaggatgatgaggatgaggatgatgacaaagaggatgaggtcgggtacatatggtagtgcccacaagaaagaggacacaagttttgcacaaaattgcaagtcacttcctattcctgcatttgtatctaagactccaaggcaccaaggtctcttctccattgttgctctctatacccgacctaaggtttggaagacaactgcttgttcccagaggattctgattttgcatatgtttgtatgggagaaagggtgttgtgttttttttttgttgttgtttattttttggatagggaagtcattggcttaattagagcctccttcctttctgtgagatttttccaacaagcatgtgatttacgtggaattctgacagtgcagggagccccaaccctcttaaatgtcaaagaccctttttgattacccacactggtggttattacagcatggttcccagccttacagtgtctaagtgcttctcttgtgtcctgtagatgttgtgaaaaagaaaaaaacaaaaaatacaccacactgtactttttccccctgcccccgttactgccggtgattattattaaaaattagtttttttcacatcattatatctggcttcctataaacaacagccttaattcagtcaagactccctttggggaattcattttattaaaaattggtgtctggatacttccctgtacatgcataaatatgcatgcatgtacagaaagactgtatgtgtgtgccttgcacacacacccatacctctcagaaaaagtgtttgggtatcttaaaaactcgaaaaacaatgataaatttctcagcttgtccagacctggaacaaaatttctggaataagaaatttgtattaaagtccttttttgcactaacagttggctcttgtagcctgcaggctgaggaagtctcttctctgtgcatcagcagagttactgaaagcctctgattgagaaaaaacctccgtctgcctaaatcacttttctcgcagaagccatgcgactcccacacgacacgggcagcttcacaagccatctctttcatttctgcttgaagccccttggctgcagcaatcctgtctgccataggtttcttccttccttacctactcaagggctttttctaaggcatgcacacatatctcctgttctctgagagtaccatggtgttccttaaaagaagaaaatttctaattctgaactcaatgttttgcttttactccctttctactgacaaatcatgataagggcacaaaagctgtacagatttttttttttaaccactcaatcccaaatggaggcctacaaagaacatcgtaataacacatggaagcaaaccctgggtttttaagagcaaattctgtccccccctcactcccccaagtgacaagatactaatgaagaaagttcttcaccatagtgtttgttttaactaaactcattggagtctagttccaaatttggtagggtcatcatctctacattccttaggatttctctccctatcaagctggcccagatacaagtaccaaacagtagtctctgaagttcccccatttccttcagtaccagtctataagctactgtccgccactgattttcatttatcagggtgtcctaatcagaatcagccacccaagcaagcctctctggcccacatatctatctcttgccttcccccatgaacttcagcctgtccacacaaaagccacataaactcaagcaagaaatatgttcagccaaaacatgattatagtggcagctgaccaatcccccatcccaaattgaccatttagatgtaccaactcaccttaaattagcatgttccaatccagtcggcattgcctgaatacagtagcatcatacctatagttggtcttagataagaaatgaactacttgatatagcaaagtcctttggcttcgtaaataaccctgaggttttgtacttactttccccataggaagacagaccataggcaaactctgttttgggatctcaactccatcacctttgtttcaatattttttttctctcttgaacaaaactgagataatttagaaaacaggtgcttaattgcaataaaattactatgaagtatattaaaaatcacgacattgtaaaatctcactttagatcatcaaagaaaaccattgttactatctcctttgagcttaggaaaatgtacaagagaacaaattaaaattgaaaaattgatttcacttagaaaaacttctaggaacagggtgaaccactgattttaatttgcctaattatcttatgacaagtatcaaattaagatgacacttaaagatccttagcattaacttaatgatggagaagagtgctcaatagacagttcccagtaaggtaatgagatgccattttcagagacattctaagaagatattttgattcattaaaacattaaataaaaagccctcctcagattggaacccccaaatcgatggagccacattaataatacttttcatgcctcactttgacatgacagcattcgatttttttaaagatctttaatactttccatgagtactaaagattgtaatgagttaccttatccttagaagtagaatgtttgctttcttcttcttggaaatagtcctccaaaaagtccacttgtaccagtgacaagaagtcacttgtatagtgaccaagtacacataaaatactgattataaaaatattgtaataaaccacttcctcatttgatacaggtattaagctgaatcctcactaattcacttttgaaaagttcttaatgaacagttttattcttattccatgaacagctcttttaatacaatttccttggtatccaacttaaatcccagaattttgttccaccatggttagttatttgccatatgaatgtattcttgtttctaccaatattctaggcatgagaataccttaatactgagttggagattttgtatctgtttctcctcctttacgcccattttcctacccacagcagcaaatgacaacgtgtctgtccaggtctgtccccctgctcatcccaggatgccactcacatttttttcttcttgttaccttgaccacgctgtacagtaacatccaagagcccattctacagtgggtggttttggtctttttataactttttctcaaagtcactgatgtttgttcctgttaaatgtatagcattgtaatgagagcccatcaaatcctgagtgtcagtttgttgtccctattgtagatgaaatagtgatgtagcaaaaacctagtaaattctgaatgcttttccacgtagacttatctggaatgtgaacacaactctttggttaatagtaaatgcttaactgtagtcctgagtaggtgcatttctgtctgtctcaataaattttactttgtctgcaa

SEQ ID NO: 1004 - DNA, 5217 bp, Homo sapiens
  source 1..5217: mol_type = genomic DNA
agagaggccaagaggtttctgcttctattgatgttagcatttggttataaccacgggcaaagaatattaagctttgtcagagacccttcagcacttccatagagccatcccactagaggtcacagatcacaaaaaccctacagaaacaggaaaccgaacttcctgagtacgctacaaaacacagaaacctgtttcctctacacatctcaaactggcaaaactcagtcttagcagattcagtgtggaagcagctatcaaaaaggccataaggattttgtccccaaatttcacatgagctaccttgcttcaaactactgagatgaagggggcaagattatttgtccttctttctagtttatggagtgggggcattgggcttaacaacagtaagcattcttggactatacctgaggatgggaactctcagaagactatgccttctgcttcagttcctccaaataaaatacaaagtttgcaaatactgccaaccactcgggtcatgtcggcggagatagctacaactccagaggcaagaacttctgaagacagtcttcttaaatcaacactgcctccctcagaaacaagtgcacctgctgagggtgtgagaaatcaaactctcacatccacagagaaagcagaaggagtggtcaagttacagaatcttaccctcccaaccaacgctagcatcaagttcaatcctggagcagaatcagtggtcctttccaattctacactgaaatttcttcagagctttgccagaaagtcaaatgaacaagcaacttctctaaacacagttggaggcactggaggcattggaggcgttggaggcactggaggcgtgggaaatcgagccccacgggaaacatacctcagccggggtgacagcagttccagccaaagaactgactaccaaaaatcaaatttcgaaacaactagaggaaagaattggtgtgcttatgtacataccaggttatctcccacagtgatattggacaaccaggtcacttatgtcccaggtgggaaaggaccttgtggctggaccggtggatcctgtcctcagagatctcagaagatatccaatcctgtctataggatgcaacataaaattgtcacctcattggattggaggtgctgtcctggatacagtgggccgaaatgtcaactaagagcccaggaacagcaaagtttgatacacaccaaccaggctgaaagtcatacagctgttggcagaggagtagctgagcagcagcagcagcaaggctgtggtgacccagaagtgatgcaaaaaatgactgatcaggtgaactaccaggcaatgaaactgactcttctgcagaagaagattgacaatatttctttgactgtgaatgatgtaaggaacacttactcctccctagaaggaaaagtcagcgaagataaaagcagagaatttcaatctcttctaaaaggtctaaaatccaaaagcattaatgtactgataagagacatagtaagagaacaatttaaaatttttcaaaatgacatgcaagagactgtagcacagctcttcaagactgtatcaagtctatcagaggacctcgaaagcaccaggcaaataattcaaaaagttaatgaatctgtggtttcaatagcagcccagcaaaagtttgttttggtgcaagagaatcggcccactttgactgatatagtggaactaaggaatcacattgtgaatgtaaggcaagaaatgactcttacatgtgagaagcctattaaagaactagaagtaaagcagactcatttagaaggtgctctagaacaggaacactcaagaagcattctgtattatgaatccctcaataaaactctttctaaattgaaggaagtacatgagcagcttttatcaactgaacaggtatcagaccagaagaatgctccagctgctgagtcagttagcaataatgtcactgagtacatgtctactttacatgaaaatataaagaagcagagtttgatgatgctgcaaatgtttgaagatttgcacattcaagaaagcaagattaacaatctcaccgtctctttggagatggagaaagagtctctcagaggtgaatgtgaagacatgttatccaaatgcagaaatgattttaaatttcaacttaaggacacagaagagaatttacatgtgttaaatcaaacattggctgaagttctctttccaatggacaataagatggacaaaatgagtgagcaactaaatgatttgacttatgatatggagatccttcaacccttgcttgagcagggagcatcactcagacagacaatgacatatgaacaaccaaaggaagcaatagtgataaggaaaaagatagaaaatctgactagtgctgtcaatagtctaaattttattatcaaagaacttacaaaaagacacaacttacttagaaatgaagtacagggtcgtgatgatgccttagaaagacgtatcaatgaatatgccttagaaatggaagatggcctcaataagacaatgactattataaataatgctattgatttcattcaagataactatgccctaaaagagactttaagtactattaaggataatagtgagatccatcataaatgtacctccgatatggaaactattttgacatttattcctcagttccaccgtctgaatgattctattcagactttggtcaatgacaatcagagatataactttgttttgcaagtcgccaagacccttgcaggtattcccagagatgagaaactaaatcagtccaacttccaaaagatgtatcaaatgttcaatgaaaccacttcccaagtgagaaaataccagcaaaatatgagtcatttggaagaaaaactactcttaactaccaagatttccaaaaattttgagactcggttgcaagacattgagtctaaagttacccagacgctcataccttattatatttcagttaaaaaaggcagtgtagttacaaatgagagagatcaggctcttcaactgcaagtattaaattccagatttaaggcgttggaagcaaaatctatccatctttcaattaacttcttttcgcttaacaaaactctccacgaagttttaacaatgtgtcacaatgcttctacaagtgtgtcagaactgaatgctaccatccctaagtggataaaacattccctgccagatattcaacttcttcagaaaggtctaacagaatttgtggaaccaataattcaaataaaaactcaagctgccctatctaatttaacttgttgtatagatcgatcgttgcctggtagtctggcaaatgttgtcaagtctcagaagcaagtaaaatcattgccaaagaaaattaacgcacttaagaaaccaacggtaaatcttaccacagtcctgataggccggactcaaagaaacacggacaacataatatatcctgaggagtattcaagctgtagtcggcatccgtgccaaaatgggggcacgtgcataaatggaagaactagctttacctgtgcctgcagacatccttttactggtgacaactgcactatcaagcttgtggaagaaaatgctttagctccagatttttccaaaggatcttacagatatgcacccatggtggcattttttgcatctcatacgtatggaatgactatacctggtcctatcctgtttaataacttggatgtcaattatggagcttcatataccccaagaactggaaaatttagaattccgtatcttggagtatatgttttcaagtacaccatcgagtcatttagtgctcatatttctggatttttagtggttgatggaatagacaagcttgcatttgagtctgaaaatattaacagtgaaatacactgtgatagggttttaactggggatgccttattagaattaaattatgggcaggaagtctggttacgacttgcaaaaggaacaattccagccaagtttccccctgttactacatttagtggctatttattatatcgtacataagttagtatgaaaaacagactatcacctttattgagaaacagccagtgttttcatttatctttgcttgcacatctgctctgttttggtttttctacaggaaatgaaaatcaacttgtttttttaatatgagtaaacttgtatgtctattttataaaattatttgaatattgtttaatgtctgaatatgaaagagttcttgatcctaaagaaatttagtggcacagaaaacaaagtgaatttgttagcataattattcctattcttatttcttcattttaagtcattgcaatggaaagtaatattataaaatggtaattacaacatattatcagtcacagttttctttccaattaaacacttaacttttgttattccctgtatataaatatataacacacattttctagattcacaaatttaaataaattactcaaaaaatgaaaattgattttgtaaacttttatttttactctttacgttgagttgatcaattttccatactaagattttcattcagaatcaaaattaagaaagttggactgaaaatatgaaaaatgcttaactattgttctcttcctataattctctaattataacatagtaatttacatgtagttggacatgtacactcaagtctaagaatatatgagtggatcatttaccgccccccgccccacaacatctataaggggcaaaaagtctttttctaataagtattcttctatggtagtacctacagatctgcccttcttcttctaaagggtaagtcataatctgtgtaatactacaatttatgggatgctcactatgccctgtttctcttctaaacaatttacatgtaatgtctcattcctcacaataacccttgtaaagtgggcatgattaccatgatttttatagttgaagaacctaagacacagagaccaaggcccatgagctcatagggctgaggcaggatttggaatcaggccatgtcttctccagagcccacatccatcctttctctatattgcctcccacagatgtgctaaaatttatttaactaatcctttatcctctatttgtgttgtctcccattttttattattacaatattactgtggtgaacatgcttaaaaatacattccttggatatctgacaacgtgtttctgaaaaacagattttcataagtaataataaaaataataataaaaaagttttggtatggtaa

SEQ ID NO: 1005 - DNA, 2805 bp, Homo sapiens
  source 1..2805: mol_type = genomic DNA
atgaagggggcaagattatttgtccttctttctagtttatggagtgggggcattgggcttaacaacagtaagcattcttggactatacctgaggatgggaactctcagaagactatgccttctgcttcagttcctccaaataaaatacaaagtttgcaaatactgccaaccactcgggtcatgtcggcggagatagctacaactccagagaaagcagaaggagtggtcaagttacagaatcttaccctcccaaccaacgctagcatcaagttcaatcctggagcagaatcagtggtcctttccaattctacactgaaatttcttcagagctttgccagaaagtcaaatgaacaagcaacttctctaaacacagttggaggcactggaggcattggaggcgttggaggcactggaggcgtgggaaatcgagccccacgggaaacatacctcagccggggtgacagcagttccagccaaagaactgactaccaaaaatcaaatttcgaaacaactagaggaaagaattggtgtgcttatgtacataccaggttatctcccacagtgatattggacaaccaggtcacttatgtcccaggtgggaaaggaccttgtggctggaccggtggatcctgtcctcagagatctcagaagatatccaatcctgtctataggatgcaacataaaattgtcacctcattggattggaggtgctgtcctggatacagtgggccgaaatgtcaactaagagcccaggaacagcaaagtttgatacacaccaaccaggctgaaagtcatacagctgttggcagaggagtagctgagcagcagcagcagcaaggctgtggtgacccagaagtgatgcaaaaaatgactgatcaggtgaactaccaggcaatgaaactgactcttctgcagaagaagattgacaatatttctttgactgtgaatgatgtaaggaacacttactcctccctagaaggaaaagtcagcgaagataaaagcagagaatttcaatctcttctaaaagaggagtattcaagctgtagtcggcatccgtgccaaaatgggggcacgtgcataaatggaagaactagctttacctgtgcctgcagacatccttttactggtgacaactgcactatcaagcttgtggaagaaaatgctttagctccagatttttccaaaggatcttacagatatgcacccatggtggcattttttgcatctcatacgtatggaatgactatacctggtcctatcctgtttaataacttggatgtcaattatggagcttcatataccccaagaactggaaaatttagaattccgtatcttggagtatatgttttcaagtacaccatcgagtcatttagtgctcatatttctggatttttagtggttgatggaatagacaagcttgcatttgagtctgaaaatattaacagtgaaatacactgtgatagggttttaactggggatgccttattagaattaaattatgggcaggaagtctggttacgacttgcaaaaggaacaattccagccaagtttccccctgttactacatttagtggctatttattatatcgtacataagttagtatgaaaaacagactatcacctttattgagaaacagccagtgttttcatttatctttgcttgcacatctgctctgttttggtttttctacaggaaatgaaaatcaacttgtttttttaatatgagtaaacttgtatgtctattttataaaattatttgaatattgtttaatgtctgaatatgaaagagttcttgatcctaaagaaatttagtggcacagaaaacaaagtgaatttgttagcataattattcctattcttatttcttcattttaagtcattgcaatggaaagtaatattataaaatggtaattacaacatattatcagtcacagttttctttccaattaaacacttaacttttgttattccctgtatataaatatataacacacattttctagattcacaaatttaaataaattactcaaaaaatgaaaattgattttgtaaacttttatttttactctttacgttgagttgatcaattttccatactaagattttcattcagaatcaaaattaagaaagttggactgaaaatatgaaaaatgcttaactattgttctcttcctataattctctaattataacatagtaatttacatgtagttggacatgtacactcaagtctaagaatatatgagtggatcatttaccgccccccgccccacaacatctataaggggcaaaaagtctttttctaataagtattcttctatggtagtacctacagatctgcccttcttcttctaaagggtaagtcataatctgtgtaatactacaatttatgggatgctcactatgccctgtttctcttctaaacaatttacatgtaatgtctcattcctcacaataacccttgtaaagtgggcatgattaccatgatttttatagttgaagaacctaagacacagagaccaaggcccatgagctcatagggctgaggcaggatttggaatcaggccatgtcttctccagagcccacatccatcctttctctatattgcctcccacagatgtgctaaaatttatttaactaatcctttatcctctatttgtgttgtctcccattttttattattacaatattactgtggtgaacatgcttaaaaatacattccttggatatctgacaacgtgtttctgaaaaacagattttcataagtaataataaaaataataataaaaaagttttggtatggt

SEQ ID NO: 1006 - DNA, 1555 bp, Homo sapiens
  source 1..1555: mol_type = genomic DNA
cgggcggctgctgaggtgagggccgggccagaggagaggcatacccactggggcgtaggtctgggactccccctgtccgccctggcgcgacctcaggactctccgtgtcccctccgtgacccccgcggcccgggccgctctttgcatcttgtcttgcccacagctggcctcggccaggtccgagggcctggatgcgaccttggggcagcccctactcttccgggcagcccacttccgcggccaccggtgcagggcatgccccggggccgtggagctgccttgaggtgcagtgttggggatccagagccatgtcggacctgctactactgggcctgattgggggcctgactctcttactgctgctgacgctgctggcctttgccgggtactcagggctactggctggggtggaagtgagtgctgggtcaccccccatccgcaacgtcactgtggcctacaagttccacatggggctctatggtgagactgggcggcttttcactgagagctgcagcatctctcccaagctccgctccatcgctgtctactatgacaacccccacatggtgccccctgataagtgccgatgtgccgtgggcagcatcctgagtgaaggtgaggaatcgccctcccctgagctcatcgacctctaccagaaatttggcttcaaggtgttctccttcccggcacccagccatgtggtgacagccaccttcccctacaccaccattctgtccatctggctggctacccgccgtgtccatcctgccttggacacctacatcaaggagcggaagctgtgtgcctatcctcggctggagatctaccaggaagaccagatccatttcatgtgcccactggcacggcagggagacttctatgtgcctgagatgaaggagacagagtggaaatggcgggggcttgtggaggccattgacacccaggtggatggcacaggagctgacacaatgagtgacacgagttctgtaagcttggaagtgagccctggcagccgggagacttcagctgccacactgtcacctggggcgagcagccgtggctgggatgacggtgacacccgcagcgagcacagctacagcgagtcaggtgccagcggctcctcttttgaggagctggacttggagggcgaggggcccttaggggagtcacggctggaccctgggactgagcccctggggactaccaagtggctctgggagcccactgcccctgagaagggcaaggagtaacccatggcctgcaccctcctgcagtgcagttgctgaggaactgagcagactctccagcagactctccagccctcttcctccttcctctgggggaggaggggttcctgagggacctgacttcccctgctccaggcctcttgctaagccttctcctcactgccctttaggctcccagggccagaggagccagggactattttctgcaccagcccccagggctgccacccctgttgtgtctttttttcagactcacagtggagcttccaggacccagaataaagccaatgatttacttgtttcacctg

SEQ ID NO: 1007 - DNA, 834 bp, Homo sapiens
  source 1..834: mol_type = genomic DNA
atgtgcaccgtagtggaccctcgcattgtccggagatacctactcaggcggcagctcgggcagggggcctatggcattgtgtggaaggcagtggaccggaggactggtgaggtcgtggccatcaagaaaatctttgatgcttttagggataagacagatgcccagagaacattccgggaaatcacgctcctccaggagtttggggaccatcccaacatcatcagcctccttgacgtgatccgggcagagaacgacagggacatttacctggtgtttgagtttatgggttgcccccccagccccccacccccgactgcagtgcgcaccctctctgcagacactgacctgaacgcagtcatccggaagggcggcctgctgcaggacgtccacgtgcgctccatcttctaccagctcctgcgggccacccggttcctccactcggggcacgttgtgcaccgggaccagaagccgtccaatgtgctcctggatgccaactgcacagtgaagctgtgtgactttggcctggcccgctccctgggcgacctccccgaggggcctgaggaccaggccgtgacagagtacgtggccacacgctggtaccgagcaccggaggtgctgctctcttcgcaccgatacacccttggggtggacatgtggagtctgggctgtatcctgggggagatgctgcgggggagacccctgttccccggcacgtccaccctccaccagctggagctgatcctggagaccatcccaccgccatctgaggaggacctcctggctctcggctcaggctgccgtgcctctgtgctgcaccagctggggtcccggtga

SEQ ID NO: 1008 - DNA, 765 bp, Homo sapiens
  source 1..765: mol_type = genomic DNA
atgtgcaccgtagtggaccctcgcattgtccggagatacctactcaggcggcagctcgggcagggggcctatggcattgtgtggaaggcagtggaccggaggactggtgaggtcgtggccatcaagaaaatctttgatgcttttagggataagacagatgcccagagaacattccgggaaatcacgctcctccaggagtttggggaccatcccaacatcatcagcctccttgacgtgatccgggcagagaacgacagggacatttacctggtgtttgagtttatggacactgacctgaacgcagtcatccggaagggcggcctgctgcaggacgtccacgtgcgctccatcttctaccagctcctgcgggccacccggttcctccactcggggcacgttgtgcaccgggaccagaagccgtccaatgtgctcctggatgccaactgcacagtgaagctgtgtgactttggcctggcccgctccctgggcgacctccccgaggggcctgaggaccaggccgtgacagagtacgtggccacacgctggtaccgagcaccggaggtgctgctctcttcgcaccgatacacccttggggtggacatgtggagtctgggctgtatcctgggggagatgctgcgggggagacccctgttccccggcacgtccaccctccaccagctggagctgatcctggagaccatcccaccgccatctgaggagggggcccagactgcctgcaggtcaggcacaggggcatctacctag

SEQ ID NO: 1009 - DNA, 551 bp, Homo sapiens
  source 1..551: mol_type = genomic DNA
ggccgttggttggtgcgcggctgaagggtgtggcgcgagcagcgtcgttggttggccggcggcgggccgggacgggcatggccctgctgctgtgcctggtgtgcctgacggcggcgctggcccacggctgtctgcactgccacagcaacttctccaagaagttctccttctaccgccaccatgtgaacttcaagtcctggtgggtgggcgacatccccgtgtcaggggcgctgctcaccgactggagcgacgacacgatgaaggagctgcacctggccatccccgccaagatcacccgggagaagctggaccaagtggcgacagcagtgtaccagatgatggatcagctgtaccaggggaagatgtacttccccgggtatttccccaacgagctgcgaaacatcttccgggagcaggtgcacctcatccagaacgccatcatcgaaaggcacctggcaccaggcagctggggaggagggcagctctccagggagggacccagcctagcacctgaaggatcaatgccatcaccccgcggggacctcccctaa

SEQ ID NO: 1010 - DNA, 699 bp, Homo sapiens
  source 1..699: mol_type = genomic DNA
atggccctgctgctgtgcctggtgtgcctgacggcggcgctggcccacggctgtctgcactgccacagcaacttctccaagaagttctccttctaccgccaccatgtgaacttcaagtcctggtgggtgggcgacatccccgtgtcaggggcgctgctcaccgactggagcgacgacacgatgaaggagctgcacctggccatccccgccaagatcacccgggagaagctggaccaagtggcgacagcagtgtaccagatgatggatcagctgtaccaggggaagatgtacttccccgggtatttccccaacgagctgcgaaacatcttccgggagcaggtgcacctcatccagaacgccatcatcgaaagccgcatcgactgtcagcaccgctgtggcatcttccagtacgagaccatctcctgcaacaactgcacagactcgcacgtcgcctgctttggctataactgcgagtcctcggcgcagtggaagtcagctgtccagggcctcctgaactacataaataactggcacaaacaggacacgagcatgagaccacgctcctctgccttctcctggcctgggacacacagagccaccccggccttcctggtatcgccagccttaaggtgtctggagcccccacacttggccaacctgaccttggaagatgctgctgagtgtctcaagcagcactga

SEQ ID NO: 1011 - DNA, 1496 bp, Homo sapiens
  source 1..1496: mol_type = genomic DNA
ggtggctctatggactcggcccctctgttccccaggccccacctcttccagaacctcctgctcttcctgtgggccctgctgaactgtggtttgggggtcagtgctcagtagggtccgggcgagtggaccccgtgggtgtcctggacccgctgctccagctcctgcgggcgtggcgtctctgtgcgcagccggcgctgcctccggcttcctggggaagaaccgtgctggggagactcccatgagtaccgcctctgccagttgccagactgccccccaggggctgtgcccttccgagacctacagtgtgccctgtacaatggccgccctgtcctgggcacccagaagacctaccagtgggtgcccttccatggggcgcccaaccagtgcgacctcaactgcctggctgaggggcacgccttctaccacagcttcggccgcgtcctggacggcaccgcctgcagcccgggtgcccagggggtctgcgtggctggccgctgccttagcgccggctgtgatgggttgttgggctcgggtgccctcgaggaccgctgtggccgctgcggaggcgccaacgactcgtgccttttcgtgcagcgcgtgtttcgtgacgccggtgccttcgctgggtactggaacgtgaccctgatccccgagggcgccagacacatccgcgtggaacacaggagccgcaaccacctggcactgatggggggcgatgggcgctacgtgcttaatgggcactgggtggtcagcccaccagggacctacgaggcggccggcacgcatgtggtctacacccgagacacagggccccaggagacattgcaagcagccgggcccacctcccatgacctgctcctacaggtcctcctgcaggagcccaaccctggcatcgagtttgagttctggctccctcgggagcgctacagccccttccaggctcgtgtgcaggccctgggctggcccctgaggcagcctcagccccggggggtggagcctcagccccccgcagcccctgctgtcacccctgcacagaccccaacgctggccccaggcccgagtgctgggccaccaccaccaggcccaggagacccgctatgaggtgcgcatccagctcgtctacaagaaccgctcgccactgcgggcacgcgagtacgtgtgggcgccaggccactgcccctgcccgatgctggcaccccaccgggactacctgatggctgtccagcgtcttgtcagccccgacggcacacaggaccagctgctgctgccccacgccggctacgcccggccctggagccctgcggaggacagccgcatacgcctgactgcccggcgctgtcctggctgagcccctgcaggagccccggccacacacagcaagaaagatacatctgaccagcctcaacgtcaacgtatttcccctctcaccctggcttccaggcagctctgaaatacgtcccacctgtgcagctatgtgactccctcccacacacgct

SEQ ID NO: 1012 - DNA, 535 bp, Homo sapiens
  source 1..535: mol_type = genomic DNA
cgcccacgcccggcgccccgaccgcggaggactccccgagccccgcccgccatggcccggatcccgacggccgccctgggttgcatcagcctcctctgcctgcagctccctggctcgctgtcccgcagcctgggcggggacccgcgacccgtcaaacccagggagcccccagcccggagcccttccagcagcctgcagcccaggcaccccgcaccccgacctgtggtctggaagcttcaccgggccctccaggcacagaggggtgccggcctggcccctgttatgggtcagcctctccgggatggtggccgccaacactcgggcccccgaagacactcgggcccccgcaggacccaagcccagctcctgcgagtgggctgtgtgctgggcacctgccaggtgcagaatctcagccaccgcctgtggcaactcatgggaccggccggccggcaggactcagctcctgtggaccccagcagcccccacagctatggctgaggtggggccgggccacacccctgcccatcccagccag

SEQ ID NO: 1013 - DNA, 4276 bp, Homo sapiens
  source 1..4276: mol_type = genomic DNA
attcagccctggaggtgccatcccgggccgcgactccgctccaggcaggacccccaacccgcccagcccgctccgccttgcgccccggacccgcggccgaccccagacccgctgcccgcttcgcgcccgaggcctgcgccccgacggacgcccgtgcccagcttgccacgcccacgcccggcgccccgaccgcggaggactccccgaggtgccggcggagggggtggctcgcggctcaggctgcccccgacgtgcccggctcaccgccccctcccctgcagccccgcccgccatggcccggatcccgacggccgccctgggttgcatcagcctcctctgcctgcagctccctggctcgctgtcccgcagcctgggcggggacccgcgacccgtcaaacccagggagcccccagcccggagcccttccagcagcctgcagcccaggcaccccgcaccccgacctgtggtctggaagcttcaccgggccctccaggcacagaggggtgccggcctggcccctgttatgggtcagcctctccgggatggtggccgccaacactcgggcccccgaagacactcgggcccccgcaggacccaagcccagctcctgcgagtgggctgtgtgctgggcacctgccaggtgcagaatctcagccaccgcctgtggcaactcatgggaccggccggccggcaggactcagctcctgtggaccccagcagcccccacagctatggctgaggtggggccgggccacacccctgcccatcccagccagggtgctgtgcccccgtccagagctgcagctgagccccatctgaagcccagtccctcggagctgcagacagcaggtcctgcagcaacaatacctgcacggctttgcacacgtaaacctaggctggtctacacgcagtgctggtacgtcaaggagcctaaacaccctgaaattgtgaccccctgggggacagctgccagacacagctggcggcagcaccagatgctaagcgcttcagagaggaggtgtctgcccagagatgtggagcagaagctgggccctgaacacacggggccatgtctggacgagcaggggagagaggctgaactggccagaagtggcccctccgctgctggtccagtcagactgaagcccggccttgtgcctgggctgttcctgctctcatgcacaaccagcccttccacgtgcctgcctgtgggacaggagggggagcgtgggatgctgtagcccccggggttgggcaagggaaggatggtggccctccagaggtcatgaagggacctctgtggctccagctgccaaccctggagcccagaccgaggtggccatggagactccacctggatcccctgtaggaggccagggaggggaactcagcagttcaggagccaccccaaaccattctgggacagggacacccctttctaccccagggcagggcagggctgggtggggcaagatcccccagcccgactagacccacctcacctgaagggggtgagacccttgttggcagccagacaagggtggggctccacaggcagcacaggcgccccaccaccacccagtttggggacccagtgggaccaggtgcgggggcagagggtgacttaccaagagccagggagggcagcccaggcccaagtgacagcaagaacaagaaccactgccggcgtgcacagacttggtgtgtgtccttccctggggggacgggggactcacatgtgcctgccactggagcctctcaaccgtccagcagaacacggggttcagaaagggctccttctgctatttagcgaacactgagcatttaatttacaaatgtttgctagggtcaccctctcggccatcccacgagggtcgccatgatcaccccaactctagaggccgcagcagagctcaggacattcccccacagagcttgcccctcagttcctacctccaagggggagggtcctggaagcgcccacccaggcgccgcccctgtgcttgctccccgagctcagggattgccgagtccacgtaactgacctgtactccacgaggccctgtgggaacggtccaggctggtcctgccctgtggaggcctccgtgcactgagagatgtactaggattgcagcaaaggtggtcagggtgatgggccgcacagcgaggcagtcaaggccagctccctgggagaagcactgggtcaggtgaggtctgaggacagcaggccttccctaggggaaggagctgggagtgccaaggccccaggtgcacaggaggcgtggctgctgagaggctgcagggtggaggggcctcggcctcagagtcatgtgccctgtgaccactgaagggtgtcagcagagcacacggcatgaggacagagggaggggcacggggagtgaaggagggggccctggggcaaggctcgggggtcaggagctcagcgtccgctactcagcccagccaaaaccctcccagacgtctcctctcctgcctgggcaaagtccagcttggcaccccgtctggggcctgcctgtggtcagggccaagtgttccctcctccaggaaagcctttaccctcctcatgccctgtagtcaggaggccgcctgctgtaaccctccgtgtcgcctcgggtgcgaaatcagacccacctgacaccatcacgcggaggcccagcagcacctgcacccacttccagctgctctggccaaaatctccgctcggccaggccccgtggctcacacctgtaatcctagcacattgggaggccaaggcaggcacatcacctgagttcaggagttcaagaccagcctggccaacatggtgaaatcccgtctctactaaaaacagaaaattatccgggcgtggtggcacatgactgtaatcccagctactcaggaggctgaggcaggaggatcacttgaacctgggaggcggaggttgcagtgagctgagattgcgccattgcactccagcctgggcaacaagagcaaaattctgcctcaaaaaaaaaaatagtaataatacaaaaattagctgggcgtggtggcacatgccagtaattccatctactcgggaggctgaggcaggagaatcgtctaagcccgggaggtggaggttgcagtgagcccagatggcgctgctgcactcaagcttggatgacagagcaagactccgtttcaaaaaaaaaaaacctcctctcttccttcacaccttcctctgaatcccacccggtcccacctcctgaacctatccagacaccttctcctgacccaggcaccacctgctttcggggcgatggccgtagcctcctcccaggcacctgtctgcatccctctggccagtgcatgctgagcacgtgacctacccgtgttgggacacgtgaggatacagccttgacccccaggggctgacattctagggggagatagaaggagacaaacgtagaaggtagaataagtgggtggtggagtggcagggagtgctgagtgccacaggaagtcagacaaggaaggagagtgtggggcaggtgccgtttaaatggggggcgctggggtctcctcacagttgcttctcagctcagctgtgccaggatcttgttgagtcaggtcagctgcccacagccctcttgcctgacccctgaagcccagaactctgatcttcacagccctaggtatggccccagcaccccactgccctctctcctgccccagccgactgctgttcccagacttccctggccacgctccaagacgccagctctgccgcgggcactttgttctcacggtgtcctccatgcctgcagggcccatgcatgggaagttgcgttggcggcctgggtgttggcggttccgtgcctgctccaactctccgtgaggcccctctcccagagcctgacacactctgtggccgaactctaggcaggtgcccctgagtcctttcctcgacgaggcctgaccccatccccatcctcgctgggcccgccgaccccggtgttagcaagaatcctctaaatcagtttatggagaattacccaccctcgatatctgatcccattcctcatctcccacccttgatctcatcaccctgccggcctcctgcaagatcctcattgagccactccagtgagaatccccctaccctcgaaggccgccctaacaacttcccatccgctgacccctccaacgccatcaatctccagctgtggttgttgaactcggaggtgagctcctctcaccactctcttgaataaagcttttctcaccattttaacaa

SEQ ID NO: 1014 - DNA, 2816 bp, Homo sapiens
  source 1..2816: mol_type = genomic DNA
ctggtccgagggcagcccgaatatgtccctgggtgtgggtatgggtgtggggcaatttgggtgggagcagcgtggaggctcccaggaccaagtcctgcgcctctttggcggggtgtgtgcaggaggaggggggataaataggaggctccctcctcccggcgacattcacggagccggccggcctcccgccctgggtgtttccctgccttgtagccagggtgccagcctgggaagtagtttcgtttccttctgcctccgggattagtttccaggcaccctctcaggcgcccgaggcccgggaagggggcgaagaaggagggagacttgtctaggggctgcccggcccggcagagcggggttgatggaccgggccgcccggtgcagcggcgccagctccctgccactgctcctggcccttgccctgggtctagtgatccttcactgtgtggtggcagatgggaattccaccagaagtcctgaaactaatggcctcctctgtggagaccctgaggaaaactgtgcagctaccaccacacaatcaaagcggaaaggccacttctctaggtgccccaagcaatacaagcattactgcatcaaagggagatgccgcttcgtggtggccgagcagacgccctcctgtgtctgtgatgaaggctacattggagcaaggtgtgagagagttgacttgttttacctaagaggagacagaggacagattctggtgatttgtttgatagcagttatggtagtttttattattttggtcatcggtgtctgcacatgctgtcaccctcttcggaaacgtcgtaaaagaaagaagaaagaagaagaaatggaaactctgggtaaagatataactcctatcaatgaagatattgaagagacaaatattgcttaaaaggctatgaagttacctccaggttggtggcaagctgcaaagtgccttgctcatttgaaaatggacagaatgtgtctcaggaaaacagctagtagacatgaattttaaataatgtatttactttttatttgcaactttagtttgtgttattattttttaataagaacattaattatatgtatattgtctagtaattgggaaaaaagcaactggttaggtagcaacaacagaagggaaatttcaataacctttcacttaagtattgtcaccaggattactagtcaaacaaaaaagaaaagtagaaaggaggttaggtcttaggaattgaattaataataaagctaccatttatcaagcatttaccatgtgctaataagtttgaaatatattatttcctttattcctttcagcaatccatgagatagctattataatcctcatttcctacatatggaaacagggccaaagaagtcaagtcaaataatctaatccagatttagagagttggagattggtagagacagactagaaatcaagatttatctaaatcaaaatctatgctcttaaccatcatttttgttagtctgaatcggtgcaacctaactcaataatataacccaaggttttatactgaactgtgttttggtatgattgtgagatgtcaagaccgtcttcccacaggcacacagaatgagaaatcctggcctatattgctgttaccatcatgctttctatagaattggcttttattatgtttctttgctcctttataaattctcaatgatgtgactacatttttacattattaaagcaaatagattggccccataactagggaaatgaatagagatggaaaagtaaatgcttggcattccttaagccctgggtaagtgtttatgctcaataaaatataaataatattactgaaagaggctgtttatatgggagtaatggtcagtgacaacactggagagaccaggtagggaccggttgtgaccatatcctcatttatgttcttgatgacagcatatatgattgctctcaggtaaattttgatgcagtaaattcatgaccataacatctattacttgggaccatcttgccaagtgctcctttactccatgaaatatttaataaacactgctttaaacctggaaaagcacaatctacatttagtgaatatttcatagaatatttaactttttacattgattacgtggttcacttacaaaaatcgatggaagatgccccccaacttgtgcctgtcggccaagcagcttcttttttagaatctttgcaaattttactttgcaatgtagattccatagtgaagtggagaattcagacaaatgctgaaatcgcatattaccttctagcatccatggtgttttgagtgaagctggggctgtacttacatatgatacataaatagctcccctattagtaaaagctaagccaaacaactgataattttcaaaatctattttttctcctgatttaatggtcatacttgaaacacaattatatccaactgatccatgttgtatatgccttattttcaaaagtctcatttaagctcattcatgccctttctcttatgtagtcttcttcgatacgaaaggagcttggaataaatatccattagagcttttaaaaacacaaaacaatgctttaatgtttcttttttcctggactgagtttggctgaccaacaaaatctctcaagccattttgttttgatcctaaaatatcaatggtggctctcgaaatttggtagatctgatatcaagaaagaatttcaaagatttttatatcttttcaaaatgtattttatagttgctttgcatacactaaataactttgtttatgtaaactgtcaatattatcatgtaataaaataaatttatttttaaaacaaa

SEQ ID NO: 1015 - DNA, 4312 bp, Homo sapiens
  source 1..4312: mol_type = genomic DNA
ggtcggggcgcggatcccgagagggaaagtcataacaaccgcacgagggagttcgactggcgaactggaaggccacgcctcctcccgcctgccccctcagccctgtggctgggggcagagctcagactgtcttctgaagattgatgtctatttccttgagctctttaattttgttgccaatttggataaacatggcacaaatccagcagggaggtccagatgaaaaagaaaagactaccgcactgaaagatttattatctaggatagatttggatgaactaatgaaaaaagatgaaccgcctcttgattttcctgataccctggaaggatttgaatatgcttttaatgaaaagggacagttaagacacataaaaactggggaaccatttgtttttaactaccgggaagatttacacagatggaaccagaaaagatacgaggctctaggagagatcatcacgaagtatgtatatgagctcctggaaaaggattgtaatttgaaaaaagtatctattccagtagatgccactgagagtgaaccaaagagttttatctttatgagtgaggatgctttgacaaatccacagaaactgatggttttaattcatggtagtggtgttgtcagggcagggcagtgggctagaagacttattataaatgaagatctggacagtggcacacagataccgtttattaaaagagctgtggctgaaggatatggagtaatagtactaaatcccaatgaaaactatattgaagtagaaaagccgaagatacacgtacagtcatcatctgatagttcagatgaaccagcagaaaaacgggaaagaaaagataaagtttctaaagaaacaaagaagcgacgtgatttctatgagaagtatcgtaacccccaaagagaaaaagaaatgatgcaattgtatatcagagaaaatggttctcctgaagaacatgcaatctatgtttgggatcatttcatagctcaggctgctgctgagaatgtgtttttcgttgctcacagctatggaggacttgcttttgttgaactgatgattcaacgagaagccgatgtaaaaaataaggtaactgctgtggcattgacagactctgttcacaatgtgtggcatcaagaagctggcaaaacgattcgagaatggatgagagagaactgttgtaattgggtctctagctcagaaccattagacacatcagtggagtccatgctacctgattgcccccgggtctcagcaggcaccgaccgtcacgagctaacttcctggaagagctttccgtctattttcaaattctttaccgaagcctcagaggccaagaccagctccctgaagccggctgtgacgcgccgctcccaccgcatcaagcacgaagagctgtaagaggagcgagcgcgacgggggaggccgccctggcgcacccacccgcacgcctcctcactgcttgtgtcgagcggactcccagcccctcattagattgttttcttcccagagcccagggtcgtgatatatacatctaaatagcgttttgcattatttctagatgagtgcaactgtcaaagcaatatgggttcactggtcgtgcttcctgcgggctgagcgcgggctgagcgctgccagtcagcgctcacattaaggctgacagcgccctgcctggctcggccggcgaagctctaattgccctgaaggagaccgcgcgggcgctgcgggtccggcggcgtcggcgcggtcctagcgcccgccgtagcggagccgctgctgcttccccctccttaatcatgtccatctttccccgctctcaactggagcaaacttctattccagacttcagatttccattttcactaggtttttccctgagggcatcttattacccacctctttttttttttttttaaggaagttccacacacactccaaagccgatttcaaattcagaacctgaatgccatgatgtaccatgtagtttggggaatgcaaattgttctctccctgttttcatttcgggaccagaaaaaaaaacaactctgcataaaaatctataaagtactgaatccgcattactgctgaaaatccttttgccagctaattgtgagagtttacacaagtctctgatttcagaagagactgttaaaaccaaaacaatgatgggcagctcttttaagtgtaggtgtgaaggtcccattttcaatggaatttccaactgttatcactgggattgactttactttttaaacacataatgtgtactgtgtggcattgtaatttagatataacacacttaagttttgctttttaaatctctctgtggagaaaggttgttgttaatcctttccagaatgatctattctgagctttcctggagttaggcccttctagggagagaatttttttattgtcatcaggaaacgaaacctttgtgctctgcagcctttttcttctgaaaggctaagtggggctaaaattatccttttagttttctgctttaacaagaagagaaggacttggtgtgaaagaatttcttctctcagtccaatggtataatttttagcactccgcttcctctgtagggtttagccctacagtttgaacaattattttaatccagctaagatgtggccaacactgtgaaatacaggagatgttaaggttttgctgacttttagattaaaatcttaaaatttcacattatattttaattacttgaaaagtttaattacctagtaaagattgtttctaatagatgagaacataaatttaatagttttcatccttttttaaagtgtgtgcaacaattaatatgcctgccttatttgaggacatgataaaatgtacccaaaatgacttcgaactgtctaatgcctcagaaaagtaacttaaaatcaaccacttcgtgcttaaatgtttttatattatgaaccgatttcaacaagttttaaagctgttaatatctcattgctgtgtttgacatacaagtacattcattggttctatagtcttaatgatgacaaattaaagatgttttttcagtgctcaggtatgcatatattttcgtgttacttaagcaaaatcaactatataggaggaaaaatcaaaatggcattttattcagctaccagatggcttaaaatgagtaaaccccaacaacatcaagcacatttgtctgtgatattgaccctttttatccaatcattactattttagaagtagtggtgaactgtgtaaaataatggtatcttcagcagtgttccggaatcttagttgagggacaaacattccttccagtgagagattcaagaattgatgtgaattgaatatatttttcaaggtattataaattgtgttgtgttttcagtataagaaaatgttgacaggaaacaattttatagcatttataaaaaaccaacacttgtgcaatgctaaattggcgaagcttctgcacctgaattagagcacaataaatatgctgtttataaaccaaatcactgctattccttctctgaaatcatctctcctctttttaaacctttacttatagctagaataaatcactatttaattgcctctaatactttaaaactactggatggttaggcctggtttaactatttatggagagctatttgcaaacttaagttgtgtaaatgtaatttctacttgtgaatctgagctgtagcagcccagagggagctaggcaaactattccagaccaccaactgataagtgatcagattctttgtaatgtaggattttttaacctgttgattatgggtttgttgatataaatgtaataatgttcacctcgattttcctggagtaacaaccagcgttggtagtagcccacctgcatgaggacggccagtgttaacaatatttttgttctgatcttcttccccatttttgtttcctcaaacaggtttttaggagagtggagatttaaagtcaggatgtggcctttttattttaattatatacttaattcttagaacaagtagaatgggaaaggagtgactgataaatctaagattcaaaatagtcccgtcgaaacttaaaggccagattattgctttggagctttctataggtactagccatcccgtcgttaaatgttttcatggatatttgaaaagaagaccatgtacctttaataactgttcttttctcgagtttctgcctcgtgctttgacctggattgcattattattgtttatgcgaagtaaaaaaaaaaaaggaaagcacaagcttttcctgtatattatatttccatttccattttaaaataaaaacaattttcccaacaa

SEQ ID NO: 1016 - DNA, 1319 bp, Homo sapiens
  source 1..1319: mol_type = genomic DNA
ttataaagctaaagatcacaacttattttctagatatatcatacgaaaatgaaaattataattcttcttggattcctgggagccacattgtcagccccacttatcccacagcgtctcatgtctgccagcaatagcaatgagttacttcttaatcttaataatggtcaacttttgccactacaacttcagggcccacttaattcatggattccacctttctctggaattttacaacagcagcagcaggctcaaattccaggactctcccagttctctttatcagctctagaccagtttgctggactgctcccaaatcagatacccttaacaggagaggccagttttgcccaaggagcccaggcaggccaagttgatcccttacagcttcaaacaccgcctcagacacaaccaggccccagtcacgtgatgccctatgtattctccttcaaaatgcctcaagagcaaggacagatgtttcaatactatccagtttacatggtcctaccctgggaacaacctcagcaaacagttccaaggtcacctcaacaaacaagacagcaacagtatgaggagcagataccattctatgctcaatttggatacattccacaactagcagaacctgctatatcaggaggacagcagcaactagcttttgatccccaactaggcacagctcctgaaattgctgtgatgtcaacaggagaagagataccatatttacaaaaagaagcgatcaactttagacatgacagtgcaggagttttcatgccctcaacttcaccaaaacccagcacaaccaatgttttcacttctgctgtagaccaaactattaccccagagctcccagaagagaaggacaagactgacagcctaagggaaccataagaagttgccctgatcattcagacattttgggaaaaagatgtggccatgccttggatataattttaggctattagcttcctcaatactagtatcagttctttggaatacatgaaatatcttgactcttctcctaaatttgtttttacttatacatgttattaaactctttaaatatgtcatagaaaataatacaatcatgtaatgagtcttgtcttacaaaattatatgtctcttcaaatatcctatcattgtataatatggaatataataacacagaataaagctagtatcattaaatcaattggataattgcattagtaaatgatgcctctgcaaaatggtagtacccatgaagatatgtatattgtcattggatgtatgatgagtgttgtgattggaactgatgaagtaaaataagtatctagatttga

SEQ ID NO: 1017 - DNA, 675 bp, Homo sapiens
  source 1..675: mol_type = genomic DNA
ctggaggggtaggtgttctgggggaatgaatccctgggggcttggtgggacaggaaggcgggaagaagctgctcttcgagtgaccctggggctgtctgttagcaggtccctcagccgttggaacgtccttgggcttctgaactagtgcccatgtgtgcctcggcctttcccaagggccagcttcttcctgagatgctgcccccacccccttaggcccgagggatcaggagctatgggaccagaggccctgtcatctttactgctgctgctcttggtggcaagtggagatgctgacatgaagggacattttgatcctgccaagtgccgctatgccctgggcatgcaggaccggaccatcccagacagtgacatctctgcttccagctcctggtcagattccactgccgcccgccacagcaggttggagagcagtgacggggatggggcctggtgccccgcagggtcggtgtttcccaaggaggaggagtacttgcaggtggatctacaacgactgcacctggtggctctggtgggcacccagggacggcatgccgggggcctgggcaaggagttctcccggagctaccggctgcgttactcccgggatggtcgccgctggatgggctggaaggaccgctggggtcaggaggtgatctcaggcaatgaggaccctga

SEQ ID NO: 1018 - DNA, 726 bp, Homo sapiens
  source 1..726: mol_type = genomic DNA
cggaaccctgtgtgctggggaggaatcccgcagtggccggggggcttgaggccgctgctttgtctcttcgtccagagccttatcccccaaagggcctccaggcaacatggggggcccagtcagagagccggcactctcagttgccctctggttgagttggggggcagctctgggggccgtggcttgtgccatggctctgctgacccaacaaacagagctgcagagcctcaggagagaggtgagccggctgcaggggacaggaggcccctcccagaatggggaagggtatccctggcagagtctcccggagcagcactctgtcctgcacctggttcccattaacgccacctccaaggatgactccgatgtgacagaggtgatgtggcaaccagctcttaggcgtgggagaggcctacaggcccaaggatatggtgtccgaatccaggatgctggagtttatctgctgtatagccaggtcctgtttcaagacgtgactttcaccatgggtcaggtggtgtctcgagaaggccaaggaaggcaggagactctattccgatgtataagaagtatgccctcccacccggaccgggcctacaacagctgctatagcgcaggtgtcttccatttacaccaaggggatattctgagtgtcataattccccgggcaagggcgaaacttaacctctctccacatggaaccttcctggggtttgtgaaactgtgatt

SEQ ID NO: 1019 - DNA, 1593 bp, Homo sapiens
  source 1..1593: mol_type = genomic DNA
cctaattctcctgaggctgagggagggtggagggtctcaaggcaacgctggccccacgacggagtgccaggagcactaacagtacccttagcttgctttcctcctccctcctttttattttcaagttcctttttatttctccttgcgtaacaaccttcttcccttctgcaccactgcccgtacccttacccgccccgccacctccttgctaccccactcttgaaaccacagctgttggcagggtccccagctcatgccagcctcatctcctttcttgctagcccccaaagggcctccaggcaacatggggggcccagtcagagagccggcactctcagttgccctctggttgagttggggggcagctctgggggccgtggcttgtgccatggctctgctgacccaacaaacagagctgcagagcctcaggagagaggtgagccggctgcaggggacaggaggcccctcccagaatggggaagggtatccctggcagagtctcccggagcagagttccgatgccctggaagcctgggagaatggggagagatcccggaaaaggagagcagtgctcacccaaaaacagaagaagcagcactctgtcctgcacctggttcccattaacgccacctccaaggatgactccgatgtgacagaggtgatgtggcaaccagctcttaggcgtgggagaggcctacaggcccaaggatatggtgtccgaatccaggatgctggagtttatctgctgtatagccaggtcctgtttcaagacgtgactttcaccatgggtcaggtggtgtctcgagaaggccaaggaaggcaggagactctattccgatgtataagaagtatgccctcccacccggaccgggcctacaacagctgctatagcgcaggtgtcttccatttacaccaaggggatattctgagtgtcataattccccgggcaagggcgaaacttaacctctctccacatggaaccttcctgggactttgattttacggatatcttgcttctgttccccatggagctccgaattcttgcgtgtgtgtagatgaggggcgggggacgggcgccaggcattgtccagacctggtcggggcccactggaagcatccagaacagcaccaccatctagcggccgctcgagggaagcacccgccggttggccgaagtccacgaagccgccctctgctagggaaaacccctggttctccatgccacacctctctccaggtgccctctgcctcttcaccccacaagaagccttatcctacgtccttctctccatctatcggaccccagtttccatcactatctccagagatgtagctattatgcgcccgtctacagggggtgcccgacgatgacggtgccttcgcagtcaaattactcttcgggtcccaaggtttggctttcacgcgctccattgccccggcgtggcaggccattccaagcccttccgggctggaactggtgtcggaggagcctcgggtgtatcgtacgccctggtgttggtgttgcctcactcctctgagctcttctttctgatcaagccctgcttaaagttaaataaaatagaatgaatgata

SEQ ID NO: 1020 - DNA, 2272 bp, Homo sapiens
  source 1..2272: mol_type = genomic DNA
agtgcagcgcagccgcggggagcgaggagcgcgcggagccggccatgggcaagtcagaatctctacagagcctccagcggtagaggcctggcctccagaaggaacttcgagaacccagtgcagccccacctaggacacctataccctccaccccagcagagacagcccagccccttccctcagccctggggagccaggcccagggcttttagcagctctgacctttattttaagtcccaagtctggccccctggtaacctgcactctgcagtccctgatatccccctggggtccctcagccagaaattccatgggatttgacttggcccaggagacatgggagatctggctatgagaaaagggactaggactccctgttgcatcatctcctcagtctcgggtgaaaggcagcagagtagaagaaaggcaccagtgaagcttccaaacagtttcataatgaggtcctgaaggcccacaatgagtaccggcagaagcacggcgtccccccactgaagctctgcaagaacctcaaccgggaggctcaacagtattctgaggccctggccagcacgaggatcctcaagcacagcccggagtccagccgtggccagtgtggggagaaccttgcatgggcatcctatgatcagacaggaaaggaggtggctgatagatggtacagtgaaatcaagaactataacttccagcagcctggcttcacctcggggactggacacttcacggccatggtatggaagaacaccaagaagatgggcgtggggaaggcgtccgcaagtgacgggtcctcctttgtggtggccagatacttcccagcggggaatgttgtcaatgagggcttcttcgaagaaaacgtcctgccgccgaagaagtaacttgttaaatgtaatgggaaggtggcagacttaagaacgtggatatgaagtgcctagaaccaccacaacctggctgtgcgtctgtccctgtgggtgtatgtgcttgtgtgtgtgatgcatgtgagcgtctctggcacacacacttggacatacagttctgtgtgcgctcattcttattacaggagtgagcaaaggaagcatttaccccgatggttacctagaccacgattatttggattggggggaggggggatccgttttttttttttaattttttgttatttctaagcaaacctcttttgtacttttcttacttctaatatccatccctggactttttgtattccaaatgtttgtgatgctgagaagtgaagttcattttatgtgatcttcatgcgtcgtaatctacttttggtagataattaagattattaaaccctcatttaaatgtgacataaaatacagctttaagcacataaatacaaagcagcttccatcaggaacatggagcaggcagggactccattttacagaattactgagatttctcagttgtaaaacatgatgtcatcctgcatgcctcctggaattctccaatggggtcgccaaacaacaaatggagaaaaaaagttttacttccttgcattcttctacctttaaatagcaaagtaccactaccaccaccacctcttgcccccttccctcttttcttaaacttctggcatttcagagctcagcaggctacccctggtttctggagagttgggctaggcctgaagctccccctcccccacctctgctaggcagcccaggcctggtctgggagacagcccctcaccctgcctgggctcttggccaagcggccttggatggatgaagtcagagaggtggggtgagggtgagcttactcagggcccccagaggaagccctcagcctctgccctccccccacacagggcgggagcccaggcctgttcctggcagctgtggctgcagctgtgctcctgctccctcctggaatgtgcgacaagcccaaatgttccggggaggcggccggggcagggggcttagaagtgctaatatggttctgtgttttgcctgaaacgataccaggttcccctgaatagcaactttacaaggtccatgtgggagggaccaacccagatgccctgctgagtgtccctgaaaccatggcagctccatctgtcaagatggcaggggccggagtgagggggctgctggcttaacagcaggcatctgggcaggccagtcctcaaagcagctcctgaaggtctgtgttgcactgtcaccagtctcaagctatgcctctaatttcaccagggatattgactaagaagacaataaaatctttttctttgtgt

SEQ ID NO: 1021 - DNA, 4484 bp, Homo sapiens
  source 1..4484: mol_type = genomic DNA
aggactcaggaagagatagacccataatgatgctgcctcaaaactcgtggcatattgattttggaagatgctgctgtcatcagaaccttttctctgctgtggtaacttgcatcctgctcctgaattcctgctttctcatcagcagttttaatggaacagatttggagttgaggctggtcaatggagacggtccctgctctgggacagtggaggtgaaattccagggacagtgggggactgtgtgtgatgatgggtggaacactactgcctcaactgtcgtgtgcaaacagcttggatgtccattttctttcgccatgtttcgttttggacaagccgtgactagacatggaaaaatttggcttgatgatgtttcctgttatggaaatgagtcagctctctgggaatgtcaacaccgggaatggggaagccataactgttatcatggagaagatgttggtgtgaactgttatggtgaagccaatctgggtttgaggctagtggatggaaacaactcctgttcagggagagtggaggtgaaattccaagaaaggtggggaactatatgtgatgatgggtggaacttgaatactgctgccgtggtgtgcaggcaactaggatgtccatcttcttttatttcttctggagttgttaatagccctgctgtattgcgccccatttggctggatgacattttatgccaggggaatgagttggcactctggaattgcagacatcgtggatggggaaatcatgactgcagtcacaatgaggatgtcacattaacttgttatgatagtagtgatcttgaactaaggcttgtaggtggaactaaccgctgtatggggagagtagagctgaaaatccaaggaaggtgggggaccgtatgccaccataagtggaacaatgctgcagctgatgtcgtatgcaagcagttgggatgtggaaccgcacttcacttcgctggcttgcctcatttgcagtcagggtctgatgttgtatggcttgatggtgtctcctgctccggtaatgaatcttttctttgggactgcagacattccggaaccgtcaattttgactgtcttcatcaaaacgatgtgtctgtgatctgctcagatggagcagatttggaactgcgactagcagatggaagtaacaattgttcagggagagtagaggtgagaattcatgaacagtggtggacaatatgtgaccagaactggaagaatgaacaagcccttgtggtttgtaagcagctaggatgtccgttcagcgtctttggcagtcgtcgtgctaaacctagtaatgaagctagagacatttggataaacagcatatcttgcactgggaatgagtcagctctctgggactgcacatatgatggaaaagcaaagcgaacatgcttccgaagatcagatgctggagtaatttgttctgataaggcagatctggacctaaggcttgtcggggctcatagcccctgttatgggagattggaggtgaaataccaaggagagtgggggactgtgtgtcatgacagatggagcacaaggaatgcagctgttgtttgtaaacaattgggatgtggaaagcctttgcatgtgtttggtatgacctattttaaagaagcatcaggacctatttggctggatgacgtttcttgcattggaaatgagtcaaatatctgggactgtgaacacagtggatggggaaagcataattgtgtacacagagaggatgtgattgtaacctgctcaggtgatgcaacatggggcctgaggctggtgggcggcagcaaccgctgctcgggaagactggaggtgtactttcaaggacggtggggcacagtgtgtgatgacggctggaacagtaaagctgcagctgtggtgtgtagccagctggactgcccatcttctatcattggcatgggtctgggaaacgcttctacaggatatggaaaaatttggctcgatgatgtttcctgtgatggagatgagtcagatctctggtcatgcaggaacagtgggtggggaaataatgactgcagtcacagtgaagatgttggagtgatctgttctgatgcatcggatatggagctgaggcttgtgggtggaagcagcaggtgtgctggaaaagttgaggtgaatgtccagggtgccgtgggaattctgtgtgctaatggctggggaatgaacattgctgaagttgtttgcaggcaacttgaatgtgggtctgcaatcagggtctccagagagcctcatttcacagaaagaacattacacatcttaatgtcgaattctggctgcactggaggggaagcctctctctgggattgtatacgatgggagtggaaacagactgcgtgtcatttaaatatggaagcaagtttgatctgctcagcccacaggcagcccaggctggttggagctgatatgccctgctctggacgtgttgaagtgaaacatgcagacacatggcgctctgtctgtgattctgatttctctcttcatgctgccaatgtgctgtgcagagaattaaactgtggagatgccatatctctttctgtgggagatcactttggaaaagggaatggtctaacttgggccgaaaagttccagtgtgaagggagtgaaactcaccttgcattatgccccattgttcaacatccggaagacacttgtatccacagcagagaagttggagttgtctgttcccgatatacagatgtccgacttgtgaatggcaaatcccagtgtgacgggcaagtggagatcaacgtgcttggacactggggctcactgtgtgacacccactgggacccagaagatgcccgtgttctatgcagacagctcagctgtgggactgctctctcaaccacaggaggaaaatatattggagaaagaagtgttcgtgtgtggggacacaggtttcattgcttagggaatgagtcacttctggataactgtcaaatgacagttcttggagcacctccctgtatccatggaaatactgtctctgtgatctgcacaggaagcctgacccagccactgtttccatgcctcgcaaatgtatctgacccatatttgtctgcagttccagagggcagtgctttgatctgcttagaggacaaacggctccgcctagtggatggggacagccgctgtgccgggagagtagagatctatcacgacggcttctggggcaccatctgtgatgacggctgggacctgagcgatgcccacgtggtgtgtcaaaagctgggctgtggagtggccttcaatgccacggtctctgctcactttggggaggggtcagggcccatctggctggatgacctgaactgcacaggaatggagtcccacttgtggcagtgcccttcccgcggctgggggcagcacgactgcaggcacaaggaggacgcaggggtcatctgctcagaattcacagccttgaggctctacagtgaaactgaaacagagagctgtgctgggagattggaagtcttctataacgggacctggggcagcgtcggcaggaggaacatcaccacagccatagcaggcattgtgtgcaggcagctgggctgtggggagaatggagttgtcagcctcgcccctttatctaagacaggctctggtttcatgtgggtggatgacattcagtgtcctaaaacgcatatctccatatggcagtgcctgtctgccccatgggagcgaagaatctccagcccagcagaagagacctggatcacatgtgaagatagaataagagtgcgtggaggagacaccgagtgctctgggagagtggagatctggcacgcaggctcctggggcacagtgtgtgatgactcctgggacctggccgaggcggaagtggtgtgtcagcagctgggctgtggctctgctctggctgccctgagggacgcttcgtttggccagggaactggaaccatctggttggatgacatgcggtgcaaaggaaatgagtcatttctatgggactgtcacgccaaaccctggggacagagtgactgtggacacaaggaagatgctggcgtgaggtgctctggacagtcgctgaaatcactgaatgcctcctcaggtcatttagcacttattttatccagtatctttgggctccttctcctggttctgtttattctatttctcacgtggtgccgagttcagaaacaaaaacatctgcccctcagagatgacacccccaaccatggttgtgaagatgctagcgacacatcgctgttgggagttcttcctgcctctgaagccacaaaatgactttagacttccagggctcaccagatcaacctctaaatatctttgaaggagacaacaacttttaaatgaataaagaggaagtcaagttgccctatggaaaacttgtccaaataacatttcttgaacaataggagaacagctaaattgataaagactggtgataataaaaattgaattatgtatatcactgtt

SEQ ID NO: 1022 - DNA, 1592 bp, Homo sapiens
  source 1..1592: mol_type = genomic DNA
aggatgccctcccagttcctcctgcctctaggttcctctttccctgctgattccaggagcctatcaacccagataaagcgggacctcctctctggtagaggtgcagggggcagtactcaacatgatcacagagggagcgcaggcccctcgattgttgctgccgccgctgctcctgctgctcaccctgccagccacaggctcagaccccgtgctctgcttcacccagtatgaagaatcctccggcaagtgcaagggcctcctggggggtggtgtcagcgtggaagactgctgtctcaacactgcctttgcctaccagaaacgtagtggtgggctctgtcagccttgcaggtccccacgatggtccctgtggtccacatgggccccctgttcggtgacgtgctctgagggctcccagctgcggtaccggcgctgtgtgggctggaatgggcagtgctctggaaaggtggcacctgggaccctggagtggcagctccaggcctgtgaggaccagcagtgctgtcctgagatgggcggctggtctggctgggggccctgggagccttgctctgtcacctgctccaaagggacccggacccgcaggcgagcctgtaatcaccctgctcccaagtgtgggggccactgcccaggacaggcacaggaatcagaggcctgtgacacccagcaggtctgccccacacacggggcctgggccacctggggcccctggaccccctgctcagcctcctgccacggtggaccccacgaacctaaggagacacgaagccgcaagtgttctgcacctgagccctcccagaaacctcctgggaagccctgcccggggctagcctacgagcagcggaggtgcaccggcctgccaccctgcccagtggctgggggctgggggccttggggccctgtgagcccctgccctgtgacctgtggcctgggccagaccatggaacaacggacgtgcaatcaccctgtgccccagcatgggggccccttctgtgctggcgatgccacccggacccacatctgcaacacagctgtgccctgccctgtggatggggagtgggactcgtggggggagtggagcccctgtatccgacggaacatgaagtccatcagctgtcaagaaatcccgggccagcagtcacgcgggaggacctgcaggggccgcaagtttgacggacatcgatgtgccgggcaacagcaggatatccggcactgctacagcatccagcactgccccttgaaaggatcatggtcagagtggagtacctgggggctgtgcatgcccccctgtggacctaatcctacccgtgcccgccagcgcctctgcacacccttgctccccaagtacccgcccaccgtttccatggtcgaaggtcagggcgagaagaacgtgaccttctgggggagaccgctgccacggtgtgaggagctacaagggcagaagctggtggtggaggagaaacgaccatgtctacacgtgcctgcttgcaaagaccctgaggaagaggaactctaacacttctctcctccactctgagccccctgaccttccaaacctcaataaactagcctcttcg

SEQ ID NO: 1023 - DNA, 1647 bp, Homo sapiens
  source 1..1647: mol_type = genomic DNA
tcctctgctgggcctgggggtctgggccagcaacaagttagtattgcagacatgggccaaggagccagaggccatgcagtggctcagggtccgtgagtcgcctggggaggccacaggacacagggtcaccatggggacagccgccctgggtcccgtctgggcagcgctcctgctctttctcctgatgtgtgagatccctatggtggagctcacctttgacagagctgtggccagcggctgccaacggtgctgtgactctgaggaccccctggatcctgcccatgtatcctcagcctcttcctccggccgcccccacgccctgcctgagatcagaccctacattaatatcaccatcctgaagggtgacaaaggggacccaggcccaatgggcctgccagggtacatgggcagggagggtccccaaggggagcctggccctcagggcagcaagggtgacaagggggagatgggcagccccggcgccccgtgccagaagcgcttcttcgccttctcagtgggccgcaagacggccctgcacagcggcgaggacttccagacgctgctcttcgaaagggtctttgtgaaccttgatgggtgctttgacatggcgaccggccagtttgctgctcccctgcgtggcatctacttcttcagcctcaatgtgcacagctggaattacaaggagacgtacgtgcacattatgcataaccagaaagaggctgtcatcctgtacgcgcagcccagcgagcgcagcatcatgcagagccagagtgtgatgctggacctggcctacggggaccgcgtctgggtgcggctcttcaagcgccagcgcgagaacgccatctacagcaacgacttcgacacctacatcaccttcagcggccacctcatcaaggccgaggacgactgagggcctctgggccaccctcccggctggagagctcagctgatacggcatcctgcgagaagacctgccctcctcactgggatccccttcctgcctcctcccagggctctgccagggccttgctcagtcccttccaccaaagtcatctgaacttccgtttccccagggcctccagctgccctcagacactgatgtctgtccccaggtgctctctgcccctcatgcccctctcaccggcccagtgccccgactctccaggctttatcaaggtgctaaggcccgggtgggcagctcctcgtctcagagccctcctccggcctggtgctgcctttacaaacacctgcaggagaagggccacggaagccccaggctttagagccctcagcaggtctggggagctagagcaaaggagggacctcaggccttccgtttcttcttccagggtggggtggcctggtgttcccctagccttccaaacccaggtggcctgcccttctccccagagggaggcggcctccgcccattggtgctcatgcagactctggggctgaggtgccccggggggtgatctctggtgctcacagccgaggagccgtggctccatggccagatgacggaaacagggtctgaccaagtgccaggaagacctgtgctataaaccaccctgcctgatcctgcccctgcctgaccccgccacgccctgccgtccagcatgattaaagaatgctgtctcctcttgg

SEQ ID NO: 1024 - DNA, 2398 bp, Homo sapiens
  source 1..2398: mol_type = genomic DNA
gagacggctgcagaccatggggcagggagcatatggagcacggatatgccagacagagggatgattcatatcccaggcaggatggagcagggcagtgtgctatttcatcgtgctactcagaacttatgaattgtttatttctggaatttcccatttaatatttttggactgtggttgatcgagggtaaatgaaattgcagaaagcaaaaatacagataagggggactgcttgctgtacaaagatagagacaagaggaaggagctgtcctcaagggccttttgtgtgaagacatctggcacacagatacgctgcatgcaggtggcttgagagaacatgcatccaggtttaattgtggaactggggttgccatcatcgtaagtgagaccaaaatcaaactagggggttggcacacggttatgctctacagagatgggctgaacgggctgctgcagctgaacaatggcaccccagtgacaggccagtctcaggggaatgcagcagtggaatctgtgatgaggcctcgtgcatccatggtggcacctgcacagcaatcaaagccgactcctacatttgcctctgtccccttgggtttaaaggtcgacactgtgaagatgctttcaccttgaccattcctcagttcagagagtctctgagatcttacgctgcaactccctggccactggagccccagcattacctttccttcatggaatttgagatcacatttcggccagactcaggagatggtgtcctcctgtacagctatgacacaggcagcaaagacttcctgtccatcaacttggcagggggccacgtggagttccgctttgactgtggctctgggaccggtgtcctcaggagtgaagatcccctcaccctgggcaactggcacgagcttcgtgtatctcgcacagcaaagaatggaatcttacaggtggataagcagaagatagtggagggaatggcagagggaggcttcacacagattaagtgcaacacagacattttcattggcggagtccccaattatgatgatgtgaagaagaactcgggtgtcctgaagcctttcagcgggagcatccagaagatcatcctgaatgaccgaaccatccatgtgaagcatgacttcacctccggagtgaatgtggagaatgcggcccacccctgtgtgagagccccttgtgcccatgggggcagctgccggcccaggaaggagggctatgactgtgactgccccttgggctttgaggggcttcactgccagaaagcgatcatagaagccattgagatcccgcagtttatcggccgcagttacctgacgtatgacaacccagatatcttgaagagggtgtcaggatcaagatcaaatgtgttcatgaggtttaaaacaactgccaaggatggccttttgctgtggaggggagacagccccatgagacccaacagcgacttcatttccttgggccttcgggatggagccctcgtgttcagctataacctgggcagtggtgtggcatccatcatggtgaatggctccttcaacgatggtcggtggcaccgagttaaggccgttagggatggccagtcaggaaagataaccgtggatgactatggagccagaacaggcaaatccccaggcatgatgcggcagcttaacatcaatggagctctgtatgtgggtggaatgaaggaaattgctctgcacactaacaggcaatatatgagagggctcgtgggctgtatctctcacttcaccctgtccaccgattaccacatttccctcgtggaagatgccgtggatgggaaaaacatcaacacttgtggagccaagtaacaccagctggccttgtccaagggacagagccttctattctgagaatcccaggggccctcagaccctgcctgatgctatatgcagaggcccagggaccaggtgtgtttcctctcaccaagaagaaagtacacactgatgagaaactgagaaccaagacaggcatccctgggtggcctttcctgctgacactccacgagctgacccagcagaattctctgtgtaggaagcatcggactttgtccattgaatatgtagcggctgccagagatcacacatcaatgcaaattccagagcctgtctgctatagctcagtgactgtgttgtgattcatagtacattaaaaagagagagagagagaaagaatcccacagggcactattaaaatacttctctccttccctgactcatgacactcttcctgacagcagaatgactgtgtgaccttgaacttcacatttcccacattggcccttggattgttcggattaaccccttccactcctcactggctggttcactgtgttctgactagtccataaaaataaagatggaaggagatcaaa

SEQ ID NO: 1025 - DNA, 1299 bp, Homo sapiens
  source 1..1299: mol_type = genomic DNA
gacgttctggactctcgggcagagctttgtgagagaaacaaggctggcttcaagtgatctgcaaccagagtaattgggatttgacaaggactgtgaaaggctgactctccctgttctctttcatgctggcaccgggcagagtgtgggaactactgcctcaatacgatcatagaagccattgagatcccgcagtttatcggccgcagttacctgacgtatgacaacccagatatcttgaagagggtgtcaggatcaagatcaaatgtgttcatgaggtttaaaacaactgccaaggatggccttttgctgtggaggggagacagccccatgagacccaacagcgacttcatttccttgggccttcgggatggagccctcgtgttcagctataacctgggcagtggtgtggcatccatcatggtgaatggctccttcaacgatggtcggtggcaccgagttaaggccgttagggatggccagtcaggaaagataaccgtggatgactatggagccagaacaggcaaatccccaggcatgatgcggcagcttaacatcaatggagctctgtatgtgggtggaatgaaggaaattgctctgcacactaacaggcaatatatgagagggctcgtgggctgtatctctcacttcaccctgtccaccgattaccacatttccctcgtggaagatgccgtggatgggaaaaacatcaacacttgtggagccaagtaacaccagctggccttgtccaagggacagagccttctattctgagaatcccaggggccctcagaccctgcctgatgctatatgcagaggcccagggaccaggtgtgtttcctctcaccaagaagaaagtacacactgatgagaaactgagaaccaagacaggcatccctgggtggcctttcctgctgacactccacgagctgacccagcagaattctctgtgtaggaagcatcggactttgtccattgaatatgtagcggctgccagagatcacacatcaatgcaaattccagagcctgtctgctatagctcagtgactgtgttgtgattcatagtacattaaaaagagagagagagagaaagaatcccacagggcactattaaaatacttctctccttccctgactcatgacactcttcctgacagcagaatgactgtgtgaccttgaacttcacatttcccacattggcccttggattgttcggattaaccccttccactcctcactggctggttcactgtgttctgactagtccataaaaataaagatggaaggagatcaaacacagaa

SEQ ID NO: 1026 - DNA, 1548 bp, Homo sapiens
  source 1..1548: mol_type = genomic DNA
cgcaccaagcgggtggctgcaggagctcgcccatcgcccctgcgctgctcggaccgcggccacagccggactggcgggtacggcggcgacagacggattggccgagagtcccagtccgcagagtagccccggcctcgaggcggtggcgtccgcgtcctctcgtccaggagccaggacaggtgtcgcgcggcgggcgctccagggaccgcgctgaggccgcggtcgccgcccgtcccgccccgccccgccgcccgccgcccgccgagcccagcctccttgccgtcggggcgtccccaggccctgggtcggccgcggagccgatgcgcgcccgctgagcgccccagctgagcgcccccggcctgccatgaccgcgctccccggcccgctctggctcctgggcctggcgctatgcgcgctgggcgggggcggccccggcctgcgacccccgcccggctgtccccagcgacgtctgggcgcgcgcgagcgccgggacgtgcagcgcgagatcctggcggtgctcgggctgcctgggcggccccggccccgcgcgccacccgccgcctcccggctgcccgcgtccgcgccgctcttcatgctggacctgtaccacgccatggccggcgacgacgacgaggacggcgcgcccgcggagcggcgcctgggccgcgccgacctggtcatgagcttcgttaacatggtggagcgagaccgtgccctgggccaccaggagccccattggaaggagttccgctttgacctgacccagatcccggctggggaggcggtcacagctgcggagttccggatttacaaggtgcccagcatccacctgctcaacaggaccctccacgtcagcatgttccaggtggtccaggagcagtccaacagggagtctgacttgttctttttggatcttcagacgctccgagctggagacgagggctggctggtgctggatgtcacagcagccagtgactgctggttgctgaagcgtcacaaggacctgggactccgcctctatgtggagactgaggacggagagacgtggactggctggggctggaccaaggactccaggcttcagatgtggaaactgaggctcagcaggaccccttgggtcctcagcctccacgctcctggacctgcccaggccccggcagagagaccgctgctgtgtctgctgcagggccactgcccggccagtccgagtcccatccgcacccctcgggcagtgaggccactgaggaggaggcagccgaagaaaagcaacgagctgccgcaggccaaccgactcccagggatctttgatgacgtccacggctcccacggccggcaggtctgccgtcggcacgagctctacgtcagcttccaggacctcggctggctggtaattgctgactcttcttgtttctgaaatgacaatcaccacctgtagatcagaagtgaatctgcagggaggacatagaatcatggtgacttcaattttcttatgtatttttttcttctgtgttttccaagttttctaaagtgagaatatggtgagaaagg

SEQ ID NO: 1027 - DNA, 1949 bp, Homo sapiens
  source 1..1949: mol_type = genomic DNA
cgaatacaaagagccatacgaccttcggtttcaggtttagctgtgcctcccagtgactataatgacaaggaagctgtaaatgtatttgagttaagcttttgcgagaaaccctacagcttggggcctgggctcctctgaccatcctcattgagaaaggaaagtgagtccagagaagttgatgcttcctacctgttggagcggcccagcagtgtaagcgtggttgttactgccccatccgccatgtccttcagtgccaccattctcttctcccctcccagtggcagcgaggccagatgctgctgctgcgcctgtaagagtgagactaatggaggcaacacaggctcccagggtgggaatcctcctcccagcacccccatcacagtgactggacatggcttggctgttcagagctcagagcagctcctgcatgttatctaccagcgggtcgataaggcagtgggtttggctgaagctgctctgggtcttgccagggccaacaatgagttgttaaaacgtctccaggaggaagtgggtgacctgaggcaagggaaagtgtccatccctgatgaagatggggaaagccgggcacatagttccccacctgaggagcctgggcctctcaaggaaagtcccggggaagcctttaaggctctgtctgccgtggaagaggagtgtgacagcgtgggcagcggcgtgcaggtggtgattgaggagctgcggcagctgggagcagcctcagtggggcctgggcctttgggcttcccagcaactcagagggacatgcggctcccagggtgcacgctggctgccagcgaggcggcccccctgctcaatcctctggtggatgattacgtggcctctgagggtgcagtacagcgagttctggtccctgcttatgccaagcaactctcaccagccacacaactggcaatccagcgggcaaccccagagacaggaccagaaaatggaaccaagctgccaccaccccgccctgaggacatgctcaatgccgctgctgcgctggacagtgccttggaagagtcaggccctgggagcactggggagctgagacactctctagggctgaccgtttccccatgcaggaccagaggaagtgggcagaagaactccaggcgcaagcgggatcttgtactctctaaactggtccacaatgtgcataaccacatcaccaatgacaagagattcaatgggtctgaaagcatcaagtcctcttggaatatttcagtagtgaagtttcttctggaaaagctcaagcaagagctggtgaccagtccccacaattacactgataaggagctaaaaggagcctgtgtggcctacttccttactaagaggcgtgagtaccgcaactccctgaacccctttaaaggcctgaaggaaaaagaggagaagaaacttcgaagtcgccgatatcggctttttgccaaccgatccagtatcatgaggcattttggacctgaggaccaacgtctgtggaatgatgtgacagaggaactgatgtcagatgaagaggacagtcttaacgagccaggtgtgtgggtggcccgccctccccgtttccgggcccagcgcctcacagagctctgctaccacctggatgctaactctaagcatggcaccaaagccaaccgtgtgtatgggcctccctcagacagactgccttctgctgaagcccagctccttccaccagaactttacaatcctaatttccaagaagaggaagatgagggaggggatgagaatgcacctggctccccatcttttgaccaaccccacaaaacctgctgtcctgacttgaactcattcattgaaatcaaggtggaaaaggatgaataaaatctacagccaagaataactctggcttccgccatgccccatgtctcagaaataggtggccatggggcttcacaaaataatgagatgctctg

SEQ ID NO: 1028 - DNA, 899 bp, Homo sapiens
  source 1..899: mol_type = genomic DNA
accaacctgggcaacatagcaagaccccgcctcttaaaaaaaaaaagattaaggaatcaggtttcaggtttagctgtgcctcccagtgactataatgacaaggaagctgtaaatgtatttgagttaagcttttgcgagaaaccctacagcttggggcctgggctcctctgaccatcctcattgagaaaggaaagtgagtccagagaagttgatgcttcctacctgttggagcggcccagcagtgtaagcgtggttgttactgccccatccgccatgtccttcagtgccaccattctcttctcccctcccagtggcagcgaggccagatgctgctgctgcgcctgtaagagtgagactaatggaggcaacacaggctcccagggtgggaatcctcctcccagcacccccatcacagtgactggacatggcttggctgttcagagctcagagcagctcctgcatgttatctaccagcgggtcgataaggcagtgggtttggctgaagctgctctgggtcttgccagggccaacaatgagttgttaaaacgtctccaggaggaagtgggtgacctgaggcaagggaaagtgtccatccctgatgaagatggggaaagccgggcacatagttccccacctgaggagcctgggcctctcaaggaaagtcccggggaagcctttaaggctctgtctgccgtggaagaggagtgtgacagcgtgggcagcggcgtgcaggtggtgattgaggagctgcggcagctgggagcagcctcagtggggcctgggcctttgggcttcccagcaactcagagggacatgcggctcccagggtgcacgctggctgccagcgaggcggcccccctgctcaatcctctggtggatgattacgtggcctctgaggg

SEQ ID NO: 1029 - DNA, 1986 bp, Homo sapiens
  source 1..1986: mol_type = genomic DNA
cggctcgggctccgcgagtcctcctttttgcacacacacgaatacaaagagccatacgaccttcgggtatcctttttccattttttttcctccttaatcttgtgtgtgttttcaaattttttaaaaatagagatctgtagcagtgttgggaccctacagcttggggcctgggctcctctgaccatcctcattgagaaaggaaagtgagtccagagaagttgatgcttcctacctgttggagcggcccagcagtgtaagcgtggttgttactgccccatccgccatgtccttcagtgccaccattctcttctcccctcccagtggcagcgaggccagatgctgctgctgcgcctgtaagagtgagactaatggaggcaacacaggctcccagggtgggaatcctcctcccagcacccccatcacagtgactggacatggcttggctgttcagagctcagagcagctcctgcatgttatctaccagcgggtcgataaggcagtgggtttggctgaagctgctctgggtcttgccagggccaacaatgagttgttaaaacgtctccaggaggaagtgggtgacctgaggcaagggaaagtgtccatccctgatgaagatggggaaagccgggcacatagttccccacctgaggagcctgggcctctcaaggaaagtcccggggaagcctttaaggctctgtctgccgtggaagaggagtgtgacagcgtgggcagcggcgtgcaggtggtgattgaggagctgcggcagctgggagcagcctcagtggggcctgggcctttgggcttcccagcaactcagagggacatgcggctcccagggtgcacgctggctgccagcgaggcggcccccctgctcaatcctctggtggatgattacgtggcctctgagggtgcagtacagcgagttctggtccctgcttatgccaagcaactctcaccagccacacaactggcaatccagcgggcaaccccagagacaggaccagaaaatggaaccaagctgccaccaccccgccctgaggacatgctcaatgccgctgctgcgctggacagtgccttggaagagtcaggccctgggagcactggggagctgagacactctctagggctgaccgtttccccatgcaggaccagaggaagtgggcagaagaactccaggcgcaagcgggatcttgtactctctaaactggtccacaatgtgcataaccacatcaccaatgacaagagattcaatgggtctgaaagcatcaagtcctcttggaatatttcagtagtgaagtttcttctggaaaagctcaagcaagagctggtgaccagtccccacaattacactgataaggagctaaaaggagcctgtgtggcctacttccttactaagaggcgtgagtaccgcaactccctgaacccctttaaaggcctgaaggaaaaagaggagaagaaacttcgaagtcgccgatatcggctttttgccaaccgatccagtatcatgaggcattttggacctgaggaccaacgtctgtggaatgatgtgacagaggaactgatgtcagatgaagaggacagtcttaacgagccaggtgtgtgggtggcccgccctccccgtttccgggcccagcgcctcacagagctctgctaccacctggatgctaactctaagcatggcaccaaagccaaccgtgtgtatgggcctccctcagacagactgccttctgctgaagcccagctccttccaccagaactttacaatcctaatttccaagaagaggaagatgagggaggggatgagaatgcacctggctccccatcttttgaccaaccccacaaaacctgctgtcctgacttgaactcattcattgaaatcaaggtggaaaaggatgaataaaatctacagccaagaataactctggcttccgccatgccccatgtctcagaaataggtggccatggggcttcacaaaataatgagat

SEQ ID NO: 1030 - DNA, 2091 bp, Homo sapiens
  source 1..2091: mol_type = genomic DNA
atcttggctttttagcagctgagtttaaggcgcaaggtggagaacacatcagcttcaaaggcagagagaatcgaaggtgctctccagctttggacacttcctctgcttgagatgtgtacaaagacaatcccagtcctctggggatgtttcctcctgtggaatctctatgtctcatcctctcagaccatttaccctggaatcaaggcaaggattactcagagggcacttgactatggtgttcaagctggaatgaagatgattgagcaaatgctaaaagaaaagaaactcccagatttaagcggttctgagtctcttgaatttctaaaagttgattatgtaaactacaatttttcaaatataaaaatcagtgccttttcatttccaaatacctcattggcttttgtgcctggagtgggaatcaaagcgctaaccaaccatggcactgccaacatcagcacagactgggggttcgagtctccacttttccaagacacaggaggggctgatctgtttctctccggagtctactttaccggtatcattatcctaacccgaaatgactttggtcatcctaccctgaagctccaagattgctacgcccaactgagccatgcccacgtctcattttccggagaactcagtgttctgtataactcctttgctgagcccatggagaaacccattttaaagaacttaaatgaaatgctctgtcccattattgcaagtgaagtcaaagcgctaaatgccaacctcagcacactggaggttttaaccaagattgacaactacactctgctggattactccctaatcagttctccagaaattactgagaactaccttgacctgaacttgaagggtgtattctacccactggaaaacctcaccgacccccccttctcaccagttccttttgtgctcccagaacgcagcaactccatgctctacattggaatcgccgagtatttctttaaatctgcgtcctttgctcatttcacagctggggttttcaatgtcactctctccaccgaagagatttccaaccattttgttcaaaactctcaaggccttggcaacgtgctctcccggattgcagagatctacatcttgtcccagcccttcatggtgaggatcatggccacagagcctcccataatcaatctacaaccaggcaatttcaccctggacatccctgcctccatcatgatgctcacccaacccaagaactccacagttgaaaccatcgtttccatggacttcgttgctagtaccagtgttggcctggttattttgggacaaagactggtctgctccttgtctctgaacagattccgccttgctttgccagagtccaatcgcagcaacattgaggtcttgaggtttgaaaatattctatcgtccattcttcactttggagtcctcccactggccaatgcaaaattgcagcaaggatttcctctgtccaatccacacaaattcttattcgtcaattcagatattgaagttcttgagggtttccttttgatttccaccgacctgaagtatgaaacatcctcaaagcagcagccaagtttccacgtatgggaaggtctgaacctgataagcagacagtggagggggaagtcagccccttgattgccggtttgcaattcaccccaggaagtaaatggtccttaatcctacaactactgtaaacccagaagggaaagacagtacacactggaattgtaaagcccttgtgaattgcttaggcagaaagttttctttcttaagccttcaggaacccagaataaggcagactctgttaaagggataaatagaggtgtctgaatgtgagtgtatgcatgctgcgtgtgtctgtgtttatgtttgtttgtttgtttggggcaagaaagattctaggacaagagctaggcatgtacttctgaccaggtgggtaagcaactctaagtctgtatttgtattggtcattctcagtggaaatcccttaggccctctagtggttttcccctacctgcatattggttttcatgttttatattcactgttactatcttctgtgtttaattaaaattgttttctatcaacttc

SEQ ID NO: 1031 - DNA, 790 bp, Homo sapiens
  source 1..790: mol_type = genomic DNA
gcccgagccatggcgtccgagcggctccctaacaggcccgcctgtctgctcgtggccagcggcgccgccgaaggtgtgtcggcccagtccttcctccactgtttcacgatggccagcaccgccttcaacctgcaggtggccacccctggggggaaagccatggaatttgtggatgtgactgagagcaatgcacgctgggtgcaagacttccgcctcaaggcttacgccagccccgccaagctcgagtccatcgatggtgcccggtaccatgccctcctgatccccagctgtcctggggccctgaccgacctggccagcagtggctccctggcccgtatcctgcagcacttccactctgagagcaaacccatctgcgccgtcggccacggtgtcgccgccctgtgctgtgccaccaacgaggacagatcctgggtgttcgacagctacagcctgacagggccctctgtgtgtgagctcgtcagggcccccggcttcgcccgcctgccgctcgtggtggaggacttcgtgaaggattcgggcgcctgcttcagtggagcagcagcctcctgccccaaggccgaccggcactggcagcactttcctgttgaagaaatcttcctggcgtgtggtttcaaagtggcagggcttggggcagcaccaggctggggcagaggaggaaagcaagaggacagacctccagaagagcagcggagggcgggtgaggatttccccatataccagtgtgtgttcatctacccatgaggaataaaaccatgcagcagcatgcaaa

SEQ ID NO: 1032 - DNA, 1722 bp, Homo sapiens
  source 1..1722: mol_type = genomic DNA
cgagccggctcgaacacgcccgcgccgctgactggcgggtggggttgtcgacacgttcaacccgttctgctggctcgagaacgaagtaggccgtctcgctctgggtctccaggcccgcgaccgtccgccagtcgtcccgaggccactcttcacctccaccatgagcctggacatccagagcctggacatccagtgtgaggagctgagcgacgctagatgggccgagctcctccctctgctccagcagtgccaagtggtcaggctggacgactgtggcctcacggaagcacggtgcaaggacatcagctctgcacttcgagtcaaccctgcactggcagagctcaacctgcgcagcaacgagctgggcgatgtcggcgtgcattgcgtgctccagggcctgcagaccccctcctgcaagatccagaagctgagcctccagaactgctgcctgacgggggccggctgcggggtcctgtccagcacactacgcaccctgcccaccctgcaggagctgcacctcagcgacaacctcttgggggatgcgggcctgcagctgctctgcgaaggactcctggacccccagtgccgcctggaaaagctgcagctggagtattgcagcctctcggctgccagctgcgagcccctggcctccgtgctcagggccaagccggacttcaaggagctcacggttagcaacaacgacatcaatgaggctggcgtccgtgtgctgtgccagggcctgaaggactccccctgccagctggaggcgctcaagctggagagctgcggtgtgacatcagacaactgccgggacctgtgcggcattgtggcctccaaggcctcgctgcgggagctggccctgggcagcaacaagctgggtgatgtgggcatggcggagctgtgcccagggctgctccaccccagctccaggctcaggaccctgtggatctgggagtgtggcatcactgccaagggctgcggggatctgtgccgtgtcctcagggccaaggagagcctgaaggagctcagcctggccggcaacgagctgggggatgagggtgcccgactgctgtgtgagaccctgctggaacctggctgccagctggagtcgctgtgggtgaagtcctgcagcttcacagccgcctgctgctcccacttcagctcagtgctggcccagaacaggtttctcctggagctacagataagcaacaacaggctggaggatgcgggcgtgcgggagctgtgccagggcctgggccagcctggctctgtgctgcgggtgctctggttggccgactgcgatgtgagtgacagcagctgcagcagcctcgccgcaaccctgttggccaaccacagcctgcgtgagctggacctcagcaacaactgcctgggggacgccggcatcctgcagctggtggagagcgtccggcagccgggctgcctcctggagcagctggtcctgtacgacatttactggtctgaggagatggaggaccggctgcaggccctggagaaggacaagccatccctgagggtcatctcctgaggctcttcctgctgctgctctccctggacgaccggcctcgaggcaaccctggggcccaccagcccctgccatgctctcaccctgcatatcctaggtttgaagagaaacgctcagatccgcttatttctgccagtatattttggacactttataatcattaaagcactttcttggca

SEQ ID NO: 1033 - DNA, 1864 bp, Homo sapiens
  source 1..1864: mol_type = genomic DNA
ggctgcgcctgcgtggttcgtcctcacgtggccgtcaagccctctagtgccttagattccagcgagctacgcaagcaatcctggcccagccgagcttgcttccccaaatcccgtaatccttgaccttattcccccaaagaagcggcctcccgggaaggagcgccctggcggagaagactcgaacggctcccacagccgggcgttgggggaaagaatctccggcctgtgaaactgtgaggggattcggccaagacgtcctcttccctctgcctcccacccaggccactcttcacctccaccatgagcctggacatccagagcctggacatccagtgtgaggagctgagcgacgctagatgggccgagctcctccctctgctccagcagtgccaagtggtcaggctggacgactgtggcctcacggaagcacggtgcaaggacatcagctctgcacttcgagtcaaccctgcactggcagagctcaacctgcgcagcaacgagctgggcgatgtcggcgtgcattgcgtgctccagggcctgcagaccccctcctgcaagatccagaagctgagcctccagaactgctgcctgacgggggccggctgcggggtcctgtccagcacactacgcaccctgcccaccctgcaggagctgcacctcagcgacaacctcttgggggatgcgggcctgcagctgctctgcgaaggactcctggacccccagtgccgcctggaaaagctgcagctggagtattgcagcctctcggctgccagctgcgagcccctggcctccgtgctcagggccaagccggacttcaaggagctcacggttagcaacaacgacatcaatgaggctggcgtccgtgtgctgtgccagggcctgaaggactccccctgccagctggaggcgctcaagctggagagctgcggtgtgacatcagacaactgccgggacctgtgcggcattgtggcctccaaggcctcgctgcgggagctggccctgggcagcaacaagctgggtgatgtgggcatggcggagctgtgcccagggctgctccaccccagctccaggctcaggaccctgtggatctgggagtgtggcatcactgccaagggctgcggggatctgtgccgtgtcctcagggccaaggagagcctgaaggagctcagcctggccggcaacgagctgggggatgagggtgcccgactgctgtgtgagaccctgctggaacctggctgccagctggagtcgctgtgggtgaagtcctgcagcttcacagccgcctgctgctcccacttcagctcagtgctggcccagaacaggtttctcctggagctacagataagcaacaacaggctggaggatgcgggcgtgcgggagctgtgccagggcctgggccagcctggctctgtgctgcgggtgctctggttggccgactgcgatgtgagtgacagcagctgcagcagcctcgccgcaaccctgttggccaaccacagcctgcgtgagctggacctcagcaacaactgcctgggggacgccggcatcctgcagctggtggagagcgtccggcagccgggctgcctcctggagcagctggtcctgtacgacatttactggtctgaggagatggaggaccggctgcaggccctggagaaggacaagccatccctgagggtcatctcctgaggctcttcctgctgctgctctccctggacgaccggcctcgaggcaaccctggggcccaccagcccctgccatgctctcaccctgcatatcctaggtttgaagagaaacgctcagatccgcttatttctgccagtatattttggacactttataatcattaaagcactttcttggcagg

SEQ ID NO: 1034 - DNA, 2014 bp, Homo sapiens
  source 1..2014: mol_type = genomic DNA
cctcacgtggccgtcaagccctctagtgccttagattccagcgagctacgcaagcaatcctggcccagccgagcttgcttccccaaatcccgtaatccttgaccttattcccccaaagaagcggcctcccgggaaggagcgccctggcggagaagactcgaacggctcccacagccgggcgttgggggaaaggcatgaagaactcttgactgacagaaacggagggtgtgtccaaagttttgaggacggccgagcggcgctccaaaacccgtcctcacagcctcgccccgttcgcctcagctacaacaaatcatcgtcaacctgttccaccttctccagtctggtagcaaaaaggggtgtctcagaatctccggcctgtgaaactgtgaggggattcggccaagacgtcctcttccctctgcctcccacccaggccactcttcacctccaccatgagcctggacatccagagcctggacatccagtgtgaggagctgagcgacgctagatgggccgagctcctccctctgctccagcagtgccaagtggtcaggctggacgactgtggcctcacggaagcacggtgcaaggacatcagctctgcacttcgagtcaaccctgcactggcagagctcaacctgcgcagcaacgagctgggcgatgtcggcgtgcattgcgtgctccagggcctgcagaccccctcctgcaagatccagaagctgagcctccagaactgctgcctgacgggggccggctgcggggtcctgtccagcacactacgcaccctgcccaccctgcaggagctgcacctcagcgacaacctcttgggggatgcgggcctgcagctgctctgcgaaggactcctggacccccagtgccgcctggaaaagctgcagctggagtattgcagcctctcggctgccagctgcgagcccctggcctccgtgctcagggccaagccggacttcaaggagctcacggttagcaacaacgacatcaatgaggctggcgtccgtgtgctgtgccagggcctgaaggactccccctgccagctggaggcgctcaagctggagagctgcggtgtgacatcagacaactgccgggacctgtgcggcattgtggcctccaaggcctcgctgcgggagctggccctgggcagcaacaagctgggtgatgtgggcatggcggagctgtgcccagggctgctccaccccagctccaggctcaggaccctgtggatctgggagtgtggcatcactgccaagggctgcggggatctgtgccgtgtcctcagggccaaggagagcctgaaggagctcagcctggccggcaacgagctgggggatgagggtgcccgactgctgtgtgagaccctgctggaacctggctgccagctggagtcgctgtgggtgaagtcctgcagcttcacagccgcctgctgctcccacttcagctcagtgctggcccagaacaggtttctcctggagctacagataagcaacaacaggctggaggatgcgggcgtgcgggagctgtgccagggcctgggccagcctggctctgtgctgcgggtgctctggttggccgactgcgatgtgagtgacagcagctgcagcagcctcgccgcaaccctgttggccaaccacagcctgcgtgagctggacctcagcaacaactgcctgggggacgccggcatcctgcagctggtggagagcgtccggcagccgggctgcctcctggagcagctggtcctgtacgacatttactggtctgaggagatggaggaccggctgcaggccctggagaaggacaagccatccctgagggtcatctcctgaggctcttcctgctgctgctctccctggacgaccggcctcgaggcaaccctggggcccaccagcccctgccatgctctcaccctgcatatcctaggtttgaagagaaacgctcagatccgcttatttctgccagtatattttggacactttataatcattaaagcactttcttggca

SEQ ID NO: 1035 - DNA, 1951 bp, Homo sapiens
  source 1..1951: mol_type = genomic DNA
atccgccccctgcctcatccaggcttcgccccagtcagtctccggcagcttctcgcggcttcgcaagccccttcccgtgatgccccgcgcctggctgtcgcggttgccgggcaacgcgctgtccatgtcgcgggcctcgctgggactccctgggagatgaggccgcgaggtctcccgccgctcctggtggtgctcctgggctgctgggcctccgtgagcgcccagaccgatgccaccccggcggtgacgacagagggcctcaactccaccgaggcagccctggccaccttcggaactttcccgtcgaccaggccccccgggactcccagggctccagggccctcctccggccccaggcctaccccagtcacggacgggtctcactctgtcactcaggctggagtatagtggcatgatcacagctcactgcagcctcgacctcctaggctcagttgctgttctctgtgtctgtgacttatccccagcacagtgtgacatcaactgctgctgtgatcccgactgcagctccgtggatttcagtgtcttttctgcctgctcagttccagttgtcacgggcgacagccagttttgtagtcaaaaagcagtcatctattcattgaattttacagcaaacccacctcaaagagtatttgaacttgttgaccagattaatccatctattttctgcattcatattacaaactataaacctgcattatcctttattaatccagaagtacctgatgaaaacaattttgatacattgatgaaaacatctgatggttttacattgaatgctgaatcatatgtttccttcacaaccaaactggatattcctactgctgctaaatatgagtatggggttcctctgcagacttcagattcgtttctgagatttccttcgtccctgacatcatctctgtgcactgataataaccctgcagcgtttctggtgaaccaggctgttaagtgcaccagaaaaataaatttagaacagtgtgaagaaattgaagccctcagcatggctttttacagcagcccggaaattctgagggtacctgattcaagaaaaaaggtccctatcactgttcagtccatcgtcattcagtctctaaataaaacgctcacccgacgggaggacactgatgtgctgcagccgactctcgtcaacgctggacactttagcctttgcgtgaatgttgttcttgaggtaaagtacagcctcacatacacagatgcaggtgaagtcaccaaagctgatctctcattcgttctggggacagttagcagcgtagtggtcccactgcagcaaaagtttgaaattcattttcttcaggaaaatacccagccagtccctctcagtggaaaccctggttatgtcgtggggctcccattagctgctggattccagcctcataagactggagctctcccgtgtcagctcgtagcacagaaggtgaagagcctgctgtggggccagggcttcccagattacgtggccccttttggaaattcccaggcccaggacatgctggactgggtgcccatccacttcatcacccagtcattcaacaggaagcattttgttttgcaggattcctgccagctcccaggggctttggttatagaagtgaagtggactaaatacggatccctgctgaatccacaggccaaaatagtcaatgtaactgcaaatctaatttcatcctcctttcctgaggccaactcaggaaatgaaaggacgattcttatttccactgcggttacttttgtggatgtgtctgcacctgcagaggcaggcttcagagctccaccagccatcaatgccaggctgccctttaacttcttcttcccgtttgtttgacaatgctcagatgcatcagttccttaatatacacgtgaaatttgaaaactgtacattcggtgagattaaattttatatacaactagc

SEQ ID NO: 1036 - DNA, 1680 bp, Homo sapiens
  source 1..1680: mol_type = genomic DNA
atgtgccagctcctggagtccacagtgatccaacctcaaggggacagccccgttgctgttctctgtgtctgtgacttatccccagcacagtgtgacatcaactgctgctgtgatcccgactgcagctccgtggatttcagtgtcttttctgcctgctcagttccagttgtcacgggcgacagccagttttgtagtcaaaaagcagtcatctattcattgaattttacagcaaacccacctcaaagagtatttgaacttgttgaccagattaatccatctattttctgcattcatattacaaactataaacctgcattatcctttattaatccagaagtacctgatgaaaacaattttgatacattgatgaaaacatctgatggttttacattgaatgctgaatcatatgtttccttcacaaccaaactggatattcctactgctgctaaatatgagtatggggttcctctgcagacttcagattcgtttctgagatttccttcgtccctgacatcatctctgtgcactgataataaccctgcagcgtttctggtgaaccaggctgttaagtgcaccagaaaaataaatttagaacagtgtgaagaaattgaagccctcagcatggctttttacagcagcccggaaattctgagggtacctgattcaagaaaaaaggtccctatcactgttcagtccatcgtcattcagtctctaaataaaacgctcacccgacgggaggacactgatgtgctgcagccgactctcgtcaacgctggacactttagcctttgcgtgaatgttgttcttgaggtaaagtacagcctcacatacacagatgcaggtgaagtcaccaaagctgatctctcattcgttctggggacagttagcagcgtagtggtcccactgcagcaaaagtttgaaattcattttcttcaggaaaatacccagccagtccctctcagtggaaaccctggttatgtcgtggggctcccattagctgctggattccagcctcataagatgtctgggattattcagaccacaaatagatatggacagcttactattcttcatagcacaactgagcaagactgcttagcactggagggggtccggaccccagtattatttggttacactatgcaatctggctgtaaactaagactgactggagctctcccgtgtcagctcgtagcacagaaggtgaagagcctgctgtggggccagggcttcccagattacgtggccccttttggaaattcccaggcccaggacatgctggactgggtgcccatccacttcatcacccagtcattcaacaggaaggattcctgccagctcccaggggctttggttatagaagtgaagtggactaaatacggatccctgctgaatccacaggccaaaatagtcaatgtaactgcaaatctaatttcatcctcctttcctgaggccaactcaggaaatgaaaggacgattcttatttccactgcggttacttttgtggatgtgtctgcacctgcagaggcaggcttcagagctccaccagccatcaatgccaggctgccctttaacttcttcttcccgtttgtttgacaatgctcagatgcatcagttccttaatatacacgtgaaatttgaaaactgtacattcggtgagattaaattttatatacaact

SEQ ID NO: 1037 - DNA, 1879 bp, Homo sapiens
  source 1..1879: mol_type = genomic DNA
gcgcctggctgtcgcggttgccgggcaacgcgctgtccatgtcgcgggcctcgctgggactccctgggagatgaggccgcgaggtctcccgccgctcctggtggtgctcctgggctgctgggcctccgtgagcgcccagaccgatgccaccccggcggtgacgacagagggcctcaactccaccgaggcagccctggccaccttcggaactttcccgtcgaccaggccccccgggactcccagggctccagggccctcctccggccccaggcctaccccagtcacggacgttgctgttctctgtgtctgtgacttatccccagcacagtgtgacatcaactgctgctgtgatcccgactgcagctccgtggatttcagtgtcttttctgcctgctcagttccagttgtcacgggcgacagccagttttgtagtcaaaaagcagtcatctattcattgaattttacagcaaacccacctcaaagagtatttgaacttgttgaccagattaatccatctattttctgcattcatattacaaactataaacctgcattatcctttattaatccagaagtacctgatgaaaacaattttgatacattgatgaaaacatctgatggttttacattgaatgctgaatcatatgtttccttcacaaccaaactggatattcctactgctgctaaatatgagtatggggttcctctgcagacttcagattcgtttctgagatttccttcgtccctgacatcatctctgtgcactgataataaccctgcaggccaggcgtactggttcacacctgtaatcccagcactctgggaggccgaggcgagaggatcacttgaggtacctgattcaagaaaaaaggtccctatcactgttcagtccatcgtcattcagtctctaaataaaacgctcacccgacgggaggacactgatgtgctgcagccgactctcgtcaacgctggacactttagcctttgcgtgaatgttgttcttgaggtaaagtacagcctcacatacacagatgcaggtgaagtcaccaaagctgatctctcattcgttctggggacagttagcagcgtagtggtcccactgcagcaaaagtttgaaattcattttcttcaggaaaatacccagccagtccctctcagtggaaaccctggttatgtcgtggggctcccattagctgctggattccagcctcataaggggtctgggattattcagaccacaaatagatatggacagcttactattcttcatagcacaactgagcaagactgcttagcactggagggggtccggaccccagtattatttggttacactatgcaatctggctgtaaactaagactgactggagctctcccgtgtcagctcgtagcacagaaggtgaagagcctgctgtggggccagggcttcccagattacgtggccccttttggaaattcccaggcccaggacatgctggactgggtgcccatccacttcatcacccagtcattcaacaggaaggattcctgccagctcccaggggctttggttatagaagtgaagtggactaaatacggatccctgctgaatccacaggccaaaatagtcaatgtaactgcaaatctaatttcatcctcctttcctgaggccaactcaggaaatgaaaggacgattcttatttccactgcggttacttttgtggatgtgtctgcacctgcagaggcaggcttcagagctccaccagccatcaatgccaggctgccctttaacttcttcttcccgtttgtttgacaatgctcagatgcatcagttccttaatatacacgtgaaatttgaaaactgtacattcggtgagattaaattttatatacaactagc

SEQ ID NO: 1038 - DNA, 2042 bp, Homo sapiens
  source 1..2042: mol_type = genomic DNA
ctcgctgggactccctgggagatgaggccgcgaggtctcccgccgctcctggtggtgctcctgggctgctgggcctccgtgagcgcccagaccgatgccaccccggcggtgacgacagagggcctcaactccaccgaggcagccctggccaccttcggaactttcccgtcgaccaggccccccgggactcccagggctccagggccctcctccggccccaggcctaccccagtcacggacgttgctgttctctgtgtctgtgacttatccccagcacagtgtgacatcaactgctgctgtgatcccgactgcagctccgtggatttcagtgtcttttctgcctgctcagttccagttgtcacgggcgacagccagttttgtagtcaaaaagcagtcatctattcattgaattttacagcaaacccacctcaaagagtatttgaacttgttgaccagattaatccatctattttctgcattcatattacaaactcacattttactccaggactttcacggtggctgtgtgagagtagaagtcggattctttcattcccatagccatccggagagagcttctccttacaggttgatacagcaaactcatcagtccaggggctagagaaatagacggattattattggcttctgttgtgctgtttacttataaacctgcattatcctttattaatccagaagtacctgatgaaaacaattttgatacattgatgaaaacatctgatggttttacattgaatgctgaatcatatgtttccttcacaaccaaactggatattcctactgctgctaaatatgagtatggggttcctctgcagacttcagattcgtttctgagatttccttcgtccctgacatcatctctgtgcactgataataaccctgcagcgtttctggtgaaccaggctgttaagtgcaccagaaaaataaatttagaacagtgtgaagaaattgaagccctcagcatggctttttacagcagcccggaaattctgagggtacctgattcaagaaaaaaggtccctatcactgttcagtccatcgtcattcagtctctaaataaaacgctcacccgacgggaggacactgatgtgctgcagccgactctcgtcaacgctggacactttagcctttgcgtgaatgttgttcttgaggtaaagtacagcctcacatacacagatgcaggtgaagtcaccaaagctgatctctcattcgttctggggacagttagcagcgtagtggtcccactgcagcaaaagtttgaaattcattttcttcaggaaaatacccagccagtccctctcagtggaaaccctggttatgtcgtggggctcccattagctgctggattccagcctcataaggggtctgggattattcagaccacaaatagatatggacagcttactattcttcatagcacaactgagcaagactgcttagcactggagggggtccggaccccagtattatttggttacactatgcaatctggctgtaaactaagactgactggagctctcccgtgtcagctcgtagcacagaaggtgaagagcctgctgtggggccagggcttcccagattacgtggccccttttggaaattcccaggcccaggacatgctggactgggtgcccatccacttcatcacccagtcattcaacaggaaggattcctgccagctcccaggggctttggttatagaagtgaagtggactaaatacggatccctgctgaatccacaggccaaaatagtcaatgtaactgcaaatctaatttcatcctcctttcctgaggccaactcaggaaatgaaaggacgattcttatttccactgcggttacttttgtggatgtgtctgcacctgcagaggcaggcttcagagctccaccagccatcaatgccaggctgccctttaacttcttcttcccgtttgtttgacaatgctcagatgcatcagttccttaatatacacgtgaaatttgaaaactgtacattcggtgagattaaattttatatacaact

SEQ ID NO: 1039 - DNA, 1885 bp, Homo sapiens
  source 1..1885: mol_type = genomic DNA
cgctgggactccctgggagatgaggccgcgaggtctcccgccgctcctggtggtgctcctgggctgctgggcctccgtgagcgcccagaccgatgccaccccggcggtgacgacagagggcctcaactccaccgaggcagccctggccaccttcggaactttcccgtcgaccaggccccccgggactcccagggctccagggccctcctccggccccaggcctaccccagtcacggacgttgctgttctctgtgtctgtgacttatccccagcacagtgtgacatcaactgctgctgtgatcccgactgcagctccgtggatttcagtgtcttttctgcctgctcagttccagttgtcacgggcgacagccagttttgtagtcaaaaagcagtcatctattcattgaattttacagcaaacccacctcaaagagtatttgaacttgttgaccagattaatccatctattttctgcattcatattacaaactataaacctgcattatcctttattaatccagaagtacctgatgaaaacaattttgatacattgatgaaaacatctgatggttttacattgaatgctgaatcatatgtttccttcacaaccaaactggatattcctactgctgctaaatatgagtatggggttcctctgcagacttcagattcgtttctgagatttccttcgtccctgacatcatctctgtgcactgataataaccctgcagcgtttctggtgaaccaggctgttaagtgcaccagaaaaataaatttagaacagtgtgaagaaattgaagccctcagcatggctttttacagcagcccggaaattctgagggtacctgattcaagaaaaaaggtccctatcactgttcagtccatcgtcattcagtctctaaataaaacgctcacccgacgggaggacactgatgtgctgcagccgactctcgtcaacgctggacactttagcctttgcgtgaatgttgttcttgaggtaaagtacagcctcacatacacagatgcaggtgaagtcaccaaagctgatctctcattcgttctggggacagttagcagcgtagtggtcccactgcagcaaaagtttgaaattcattttcttcaggaaaatacccagccagtccctctcagtggaaaccctggttatgtcgtggggctcccattagctgctggattccagcctcataaggggtctgggattattcagaccacaaatagatatggacagcttactattcttcatagcacaactgagcaagactgcttagcactggagggggtccggaccccagtattatttggttacactatgcaatctggctgtaaactaagactgactggagctctcccgtgtcagctcgtagcacagaaggtgaagagcctgctgtggggccagggcttcccagattacgtggccccttttggaaattcccaggcccaggacatgctggactgggtgcccatccacttcatcacccagtcattcaacaggaagcattttgttttgcaggattcctgccagctcccaggggctttggttatagaagtgaagtggactaaatacggatccctgctgaatccacaggccaaaatagtcaatgtaactgcaaatctaatttcatcctcctttcctgaggccaactcaggaaatgaaaggacgattcttatttccactgcggttacttttgtggatgtgtctgcacctgcagaggcaggcttcagagctccaccagccatcaatgccaggctgccctttaacttcttcttcccgtttgtttgacaatgctcagatgcatcagttccttaatatacacgtgaaatttgaaaactgtacattcggtgagattaaattttatatacaactagc

SEQ ID NO: 1040 - DNA, 2148 bp, Homo sapiens
  source 1..2148: mol_type = genomic DNA
gcaaaccttaagctgaatgaacaacttttcttctcttgaatatatcttaacgccaaattttgagtgcttttttgttacccatcctcatatgtcccagctagaaagaatcctgggttggagctactgcatgttgattgttttgtttttccttttggctgttcattttggtggctactataaggaaatctaacacaaacagcaactgttttttgttgtttacttttgcatctttacttgtggagctgtggcaagtcctcatatcaaatacagaacatgatcttcctcctgctaatgttgagcctggaattgcagcttcaccagatagcagctttattcacagtgacagtccctaaggaactgtacataatagagcatggcagcaatgtgaccctggaatgcaactttgacactggaagtcatgtgaaccttggagcaataacagccagtttgcaaaaggtggaaaatgatacatccccacaccgtgaaagagccactttgctggaggagcagctgcccctagggaaggcctcgttccacatacctcaagtccaagtgagggacgaaggacagtaccaatgcataatcatctatggggtcgcctgggactacaagtacctgactctgaaagtcaaaggtcagatggaacccaggacccatccaacttggctgcttcacattttcatccccttctgcatcattgctttcattttcatagccacagtgatagccctaagaaaacaactctgtcaaaagctgtattcttcaaaagacacaacaaaaagacctgtcaccacaacaaagagggaagtgaacagtgctatctgaacctgtggtcttgggagccagggtgacctgatatgacatctaaagaagcttctggactctgaacaagaattcggtggcctgcagagcttgccatttgcacttttcaaatgcctttggatgacccagcactttaatctgaaacctgcaacaagactagccaacacctggccatgaaacttgccccttcactgatctggactcacctctggagcctatggctttaagcaagcactactgcactttacagaattaccccactggatcctggacccacagaattccttcaggatccttcttgctgccagactgaaagcaaaaggaattatttcccctcaagttttctaagtgatttccaaaagcagaggtgtgtggaaatttccagtaacagaaacagatgggttgccaatagagttattttttatctatagcttcctctgggtactagaagaggctattgagactatgagctcacagacagggcttcgcacaaactcaaatcataattgacatgttttatggattactggaatcttgatagcataatgaagttgttctaattaacagagagcatttaaatatacactaagtgcacaaattgtggagtaaagtcatcaagctctgtttttgaggtctaagtcacaaagcatttgttttaacctgtaatggcaccatgtttaatggtggttttttttttgaactacatctttcctttaaaaattattggtttctttttatttgtttttaccttagaaatcaattatatacagtcaaaaatatttgatatgctcatacgttgtatctgcagcaatttcagataagtagctaaaatggccaaagccccaaactaagcctccttttctggccctcaatatgactttaaatttgacttttcagtgcctcagtttgcacatctgtaatacagcaatgctaagtagtcaaggcctttgataattggcactatggaaatcctgcaagatcccactacatatgtgtggagcagaagggtaactcggctacagtaacagcttaattttgttaaatttgttctttatactggagccatgaagctcagagcattagctgacccttgaactattcaaatgggcacattagctagtataacagacttacataggtgggcctaaagcaagctccttaactgagcaaaatttggggcttatgagaatgaaagggtgtgaaattgactaacagacaaatcatacatctcagtttctcaattctcatgtaaatcagagaatgcctttaaagaataaaactcaattgttattcttcaacgttctttatatattctacttttgggta

SEQ ID NO: 1041 - DNA, 2363 bp, Homo sapiens
  source 1..2363: mol_type = genomic DNA
ttttcttctcttgaatatatcttaacgccaaattttgagtgcttttttgttacccatcctcatatgtcccagctagaaagaatcctgggttggagctactgcatgttgattgttttgtttttccttttggctgttcattttggtggctactataaggaaatctaacacaaacagcaactgttttttgttgtttacttttgcatctttacttgtggagctgtggcaagtcctcatatcaaatacagaacatgatcttcctcctgctaatgttgagcctggaattgcagcttcaccagatagcagctttattcacagtgacagtccctaaggaactgtacataatagagcatggcagcaatgtgaccctggaatgcaactttgacactggaagtcatgtgaaccttggagcaataacagccagtttgcaaaaggtggaaaatgatacatccccacaccgtgaaagagccactttgctggaggagcagctgcccctagggaaggcctcgttccacatacctcaagtccaagtgagggacgaaggacagtaccaatgcataatcatctatggggtcgcctgggactacaagtacctgactctgaaagtcaaagcttcctacaggaaaataaacactcacatcctaaaggttccagaaacagatgaggtagagctcacctgccaggctacaggttatcctctggcagaagtatcctggccaaacgtcagcgttcctgccaacaccagccactccaggacccctgaaggcctctaccaggtcaccagtgttctgcgcctaaagccaccccctggcagaaacttcagctgtgtgttctggaatactcacgtgagggaacttactttggccagcattgaccttcaaagtcagatggaacccaggacccatccaacttggctgcttcacattttcatccccttctgcatcattgctttcattttcatagccacagtgatagccctaagaaaacaactctgtcaaaagctgtattcttcaaaagacacaacaaaaagacctgtcaccacaacaaagagggaagtgaacagtgctatctgaacctgtggtcttgggagccagggtgacctgatatgacatctaaagaagcttctggactctgaacaagaattcggtggcctgcagagcttgccatttgcacttttcaaatgcctttggatgacccagcactttaatctgaaacctgcaacaagactagccaacacctggccatgaaacttgccccttcactgatctggactcacctctggagcctatggctttaagcaagcactactgcactttacagaattaccccactggatcctggacccacagaattccttcaggatccttcttgctgccagactgaaagcaaaaggaattatttcccctcaagttttctaagtgatttccaaaagcagaggtgtgtggaaatttccagtaacagaaacagatgggttgccaatagagttattttttatctatagcttcctctgggtactagaagaggctattgagactatgagctcacagacagggcttcgcacaaactcaaatcataattgacatgttttatggattactggaatcttgatagcataatgaagttgttctaattaacagagagcatttaaatatacactaagtgcacaaattgtggagtaaagtcatcaagctctgtttttgaggtctaagtcacaaagcatttgttttaacctgtaatggcaccatgtttaatggtggttttttttttgaactacatctttcctttaaaaattattggtttctttttatttgtttttaccttagaaatcaattatatacagtcaaaaatatttgatatgctcatacgttgtatctgcagcaatttcagataagtagctaaaatggccaaagccccaaactaagcctccttttctggccctcaatatgactttaaatttgacttttcagtgcctcagtttgcacatctgtaatacagcaatgctaagtagtcaaggcctttgataattggcactatggaaatcctgcaagatcccactacatatgtgtggagcagaagggtaactcggctacagtaacagcttaattttgttaaatttgttctttatactggagccatgaagctcagagcattagctgacccttgaactattcaaatgggcacattagctagtataacagacttacataggtgggcctaaagcaagctccttaactgagcaaaatttggggcttatgagaatgaaagggtgtgaaattgactaacagacaaatcatacatctcagtttctcaattctcatgtaaatcagagaatgcctttaaagaataaaactcaattgttattcttc

SEQ ID NO: 1042 - DNA, 680 bp, Homo sapiens
  source 1..680: mol_type = genomic DNA
acatacatcgggtgtgagcacggaatagctgggcggcggctggtccacagacactgggagacagaaggggccggtcctcaggcgcccgtgctgcagcagtgggatccactggggagaggctggagatggaggaggatattctgcagctgcaggcagaggccacagctgaggtgctgggggaggtggcccaggcacagaaggtgctacgggacagcgtgcagcggctagaagtccagctgaggagcgcctggctgggccctgcctaccgagaatttgaggtcttaaaggctcacgctgacaagcagagccacatcctatgggccctcacaggccacgtgcagcggcagaggcgggagatggtggcacagcagcatcggctgcgacagatccaggagagactccacacagcggcgctcccagcctgaatctgcctggatggaactgaggaccaatcatgctgcaaggaacacttccacgccccgtgaggcccctgtgcagggaggagctgcctgttcactgggatcagccagggcgccgggccccacttctgagcacagagcagagacagacgcaggcggggacaaaggcagaggatgtagccccattggggaggggtggaggaaggacatgtaccctttcatgcctacacacccctcattaaagcagagtcgtggcatctc

SEQ ID NO: 1043 - DNA, 2013 bp, Homo sapiens
  source 1..2013: mol_type = genomic DNA
ggatggagggttgaatgccaaaacttcgtaatcgtagaaaattctggaaagccgccggcggggcaaggccacgaggatcctcctcgcagcaccgcgccgcgcggggcccaggggccgcgctcacgcccgccgctcggcgcagacacgagtgcccccgacttgagccgaacctctagccgatgccggcgccgccgccgccggggatgcgtaagccgactgggaagcgagggggggaggcggcctgcgcggcaccgcccgacctggccgcggcgggctgagccccaggttccggaggaatgctcgctccccgctggagtcctaccagcccaacacggacctgagccgcgaccacgcgggctgcagcctgcagcacatcagctacccggagaacgcggacgcggaagcaccgctgctcagcacccccgaagaaacacggaatccagagaggcacaggcaccgccccggcgcgcacagctgcactcagcggcttccttcctactacatacatacataggagtgggagccgaggaccacttgttgcttgcggacttcctctagcataaaagatggaaagaaaacacacaccgaagcaagggaccaaaggaacagaaaagaaacgcagagatcataggaaaactgcaaagaaatacttgataatatcttccaaacgattagagaagacataacattcattaagaatacacatatagatgtatatatacgtatgaagaaaacctgcttgatatcacacagtcaggagtcaactgagttggggctttgaacttaggtttatctgatgccaaagtttgtgatgctcttcaaccatttagggtaccgcagagtgtggattttgaatcacctgcatcagcatcattttaaaatatagattctgtggtcctgaccaggtctctgaagtcagaatatgaagtggagctaggaatctaacttcttaacaagttccctagatgcctaagggtatccctgaatgatacagttttgtttgaaagactgaaaagcccaaagctggcccttttgggaaatagcagtaaatcattgatatgtgaaggttcccagcaggaggatgaaaatttacaggaattcggaggaaaatatttcagtggtcattactaaaacgctcagagtcagatacattcagcatcataccgtaagtcccgttagtcaaagcataaacaagcgcagggcctggcatggcttccttcaagttggctgactcagtctgggaggattcactcagcaagaggcagaggaaccaaggcaggatgaagacattgcctgtgctcgtgctgtctcttaccttactgactgtcttctcagagacctccccgattttgacagagaagcaggccaaacagctcctaagatctcggcgacaggatagaccaagcaaacccggattccccgatgagccaatgcgggaatacatgcaccacctgctcgccctggagcatcgcgctgaggagcagttcctggagcactggctgaaccctcactgcaaaccccactgtgacaggaacaggattcatcctgtgtaaggggatcaggaccagcctcgcaagcattttaatagacaacaagctggataatgtcgaagcaagacaaggctgcttctttcacttgtttttaaattgcagaaatggatgtcttcagacctcgtgaactgtgggcatatcaaagattgccttggaaatggcaaatatatatactgcttcattttactaacctgcatagatcactaaaaccaatagcttaaagcatagacacctcccaaaggtcttcccatcagtttgcaagagtgggaacaaccagaatcttacctggggttgatggagctggaactcccagaccaggagttggggcaggctgcctgccctaaggaatttggggaatccttgttcagagtagtgaagcataccacttggggttgctgagttgttttgtcctctatttttttcctcttcttttctgccctaataaacattggtattaaattta

SEQ ID NO: 1044 - DNA, 811 bp, Homo sapiens
  source 1..811: mol_type = genomic DNA
gcctggcatggcttccttcaagttggctgactcagtctgggaggattcactcagcaagaggcagaggaaccaaggcaggatgaagacattgcctgtgctcgtgctgtctcttaccttactgactgtcttctcagagacctccccgattttgacagagaagcaggccaaacagctcctaagatctcggcgacaggatagaccaagcaaacccggattccccgatgagccaatgcgggaatacatgcaccacctgctcgccctggagcatcgcgctgaggagcagttcctggagcactggctgaaccctcactgcaaaccccactgtgacaggaacaggattcatcctgtgtaaggggatcaggaccagcctcgcaagcattttaatagacaacaagctggataatgtcgaagcaagacaaggctgcttctttcacttgtttttaaattgcagaaatggatgtcttcagacctcgtgaactgtgggcatatcaaagattgccttggaaatggcaaatatatatactgcttcattttactaacctgcatagatcactaaaaccaatagcttaaagcatagacacctcccaaaggtcttcccatcagtttgcaagagtgggaacaaccagaatcttacctggggttgatggagctggaactcccagaccaggagttggggcaggctgcctgccctaaggaatttggggaatccttgttcagagtagtgaagcataccacttggggttgctgagttgttttgtcctctatttttttcctcttcttttctgccctaataaacattggtattaaattt

SEQ ID NO: 1045 - DNA, 853 bp, Homo sapiens
  source 1..853: mol_type = genomic DNA
gtacacacactcacacaaggacgccaaccccacctagatgcaaagcaggattcaaaagaacatctttgcgttttctaccggctccccatcatcgtactagggaggaagaagcgggcacctctaagatactgatggctctgcagaggacccattcattgcttctgcttttgctgctgaccctgctggggctggggctggtccagccctcctatggccaggatggcatgtaccagcgattcctgcggcaacacgtgcaccctgaggagacaggtggcagtgatcgctactgcaacttgatgatgcaaagacggaagatgactttgtatcactgcaagcgcttcaacaccttcatccatgaagatatctggaacattcgtagtatctgcagcaccaccaatatccaatgcaagaacggcaagatgaactgccatgagggtgtagtgaaggtcacagattgcagggacacaggaagttccagggcacccaactgcagatatcgggccatagcgagcactagacgtgttgtcattgcctgtgagggtaacccacaggtgcctgtgcactttgacggttagatgccaccatgtagggattatcgcgagtggttgaccttacacttactccttaaatagcagtgagtaatgcatttgagctgtcccaggctctgtctcctcagctcatttcctactctttttctctatataactcattctattaaatacattgcaccaaagagatatggagacataaacctgtaatgaatgaggctgggcttttctgtaataagcttccttttataatactggtcagcttagctctctcagatcctatcctgtggaatttagttattatg

SEQ ID NO: 1046 - DNA, 4655 bp, Homo sapiens
  source 1..4655: mol_type = genomic DNA
ctctttggccaagccctgcctctgtacagcctcgagtggacagccagaggctgcagctggagcccagagcccaagatggagccccagctggggcctgaggctgccgccctccgccctggctggctggccctgctgctgtgggtctcagccctgagctgttctttctccttgccagcttcttccctttcttctctggtgccccaagtcagaaccagctacaattttggaaggactttcctcggtcttgataaatgcaatgcctgcatcgggacatctatttgcaagaagttctttaaagaagaaataagatctgacaactggctggcttcccaccttggactgcctcccgattccttgctttcttatcctgcaaattactcagatgattccaaaatctggcgccctgtggagatctttagactggtcagcaaatatcaaaacgagatctcagacaggagaatctgtgcctctgcatcagccccaaagacctgcagcattgagcgtgtcctgcggaaaacagagaggttccagaaatggctgcaggccaagcgcctcacgccggacctggtgcagggcctggccagcccgctcctgcgctgcccttcgcagcgactcctggatcgcgtggtcaggcgctatgcagaggtggccgacgccggcagcatcttcatggaccacttcaccgaccgtgacaagctgcgcctgctctacacgctggctgtcaactcgcaccccatcctcctacagatcttccctggggctgagggatggccgctgcccaagtacctgggctcctgtggcagattcctcgtcagcaccagcaccagaccgctgcaggaattctatgatgcacccccagatcaggcagccgaccttgcctaccagctcctgggtgtcctggagtctttgaggagcaacgatttgaactatttcttctacttcacccacattgatgcaggcatgttcggcgtctttaacaacgggcatctgttcatccgggatgccagtgcagtgggcgtcatcgacaagcaggaaggcagccaagaagccaacagggcaggagagaataaagacatttttagctgcctggtttccggctgccaggcccagctgccctcctgcgaaagcatctctgagaagcagagcctggtgctggtgtgtcagaagttgctgcctcgacttctccaggggaggttcccctccccagtgcaagacgacatagactccatccttgttcagtgtggggacagcatccgcccagacccagaagtccttggggccgccagccagctgaaagacatcttgaggcccctgagaacgtgtgactccagatttgcctatcgttacccagattgcaaatataacgataagttctgaagggctggtgtctagctggccttggggacaacacgcttggctctccattctcccagtcgggttgctgcaaggtagaaagaagcagctcttttttaaagatgagaagaaaggcacactcatttcttagggactgagaggggagttgtgagataccacgtggctgtctctgctggctgggacgtcctggcaaagcccgcggtgggcatcagaagacctgggtgtggacgctcactcaatgtctttgagcctcagtttcctctgttctccaccagactctcctgagggtgaaagaagacacagatggagccaccactgagcatatatcccaagcatgggtcttgggacacatgctcaccacctccatcccaggtggttacaaagtgtgttctggaaaagcacagaggcggggagcatgagaaagagctgctcaggtcaggaggctggagtggagggaaggcaggggaaggacaggctccctgccactaccactttagactcggacaagaggggcccccttcctgctccctatggccctgcgtcactccccacaccatcgcgggatgaggagactgcaggccaaggggacatgcctgccaccacctagagcctggtacctgaggctccatacacctgcgcatggggcttctcgtggtgtgggaagaagccaggggtaagaagataaaggggggccggcgggggaccaatgtgttagcccaagtcttccaagaatatgtgtcaagatagagtgaatggaacaaagatttgttaggggaaatgattgtgtgtaaggaaagaaggagggagccggagaagattgggaggaccagtaagtcgagctgcaagctgagccccggtgaaggagagaatgtctggcaggagcttgctaagctcaaaatcaaagaaaggttcagcaaggctgtcagggtgtcctcaagacaaaggcagccatcagaagagccccgtgtctcccacaaatagaccccgttagcatccctgctgcactcagtggttggcggaaacagcaaagatagatttcagagcacagcagcaggggtccctggtcagccccgctccctagagcaggagatcttgagtgggagaacattcttgttgtagccacagctgaggccctggaccagctctctccacaccgcatgctccgagttgggactctaaggagtctaggaattttcattcaaacttggccttacaggtcactcatcagaaaaatacttttttcaaggtcaaccaatagaacatactttattcaacagtttgttagtttgctttttaaatatttagccacatggtatgtaggcttccatgtacactcttgccctggcccctgaaacataagcagggggctcttctgtacatttgcccagcttccctgccagcctttaaccccaggaacctctcagtctacctcctcttttctgcctctgaatccctacctttaaagtcagaacaggccaggcccggtggctcacgcctgtaatcccagcactttgggaggctgaggtgggtggatcacttgacatcagtagttcaagaccagcctggccaacatggtgaaaccccatccttactaaaaatacaaaaattagccaggtgtggtggcgggcacctgtaatcccagctactcaggaggctgaggcaggagaatcacttgaacccaggaggcagagtttgcagtcagccaagatcacgccactgtactccagcctggatgacacagcgagactccgtctcaaaataaataaataaaaataaagtcagaacacctggcttaataggcctcactgtgcagatgaggaaactgaggcccagggaggaagagcgatctgtggagatatttctagaacccctgcaagctgagccccagtgaaggagagaaggtccagtaggagcttgctaagctcaaaatcgaagaaaggttcagcaagactgtcagggtgacctcaaagcaatggcagccatcagaggagccccattgctattaggaggctcctattgccctccccttcagcctctgactttcacctgtgctacccaattctggttccttcactcccattcaaaaatggaccccagaaaagccttattttgtggagtacctagttcccttttgggtttgtctcttgactgctacgggcattgccccagggcaaccatgacagtgaagatgactggccaagcttgtggactggccagcaagcttgggctgcctgagacgctttgaaatggctgccttctgagttggtcttgagggtgaagactgaccacccttctcacctgcacagtcacagtccctctcctgctggcctgactgcagctgtcctcccagctggccacctgaccagagaccaggagagaggccacagcctccagaccctccagagtcccacggaggaagaaggcttaccagagagaccctctgatgcatgagccaggccccagcccttctccctgcatccaggtgtgtttccaccgcaaaatgcctccacacaatgagcgactttggccctgcgtgggtcagcatgtggtctgaggtaaccctcaaatgcctccaccacacatctgtccacctgcacgggttcaaggtaagcacttgcccccttctctcctccagaccagtcgcctgaaattctgagcaacattccttcaagactatcatgtaacccttggtgatgctgagtccagacaggaaatgcagacttgggacccacctgtatcagcagaaagaggccttgtgccccgtttgtccgagtcccagaacggagcaaatgagaaaaccggcgagctgtcccccgaggagctgtagggagattggtttttagtataaattacaataaaattttgtgtatgtgtacagctgtgttcacatccacagtgtaagctgtgatatggtttggatgtttgtcccctccaaatctcatgttgaaatgtgatccccagcattggaggtggggcctgatgggaggtgattgggtgatgggggaagttgcctcatgaatgacttggtgccctcctggaagtgatgagtgagttctcgctgagctcactcaagatgtggttgtttaaaagagtgtggcacgtccctcccccaactctccctctcactcccgctctcaccatgtgacacacctgctcccccttcgccttccaccatgattggaagcttcctgaagcccttaccagaagcagatgccagccccacacttcctgtaccacctgcagaaccataaaccaaaataaagctcttttctttatcaatt

SEQ ID NO: 1047 - DNA, 872 bp, Homo sapiens
  source 1..872: mol_type = genomic DNA
gagcaggcatgggtgggtcacaggctttggagagcactctctgtcctgatcttttcagttgagagacttcagctgttcattgctcatttggacttagttcaagaattttgggtgtcaccaggtaaacagagccctcagcatctgaatagaaactgaacaggaacagaagagattacactacatctgagatggagacctttcctctgctgctgctcagcctgggcctggttcttgcagaagcatcagaaagcacaatgaagataattaaagaagaatttacagacgaagagatgcaatatgacatggcaaaaagtggccaagaaaaacagaccattgagatattaatgaacccgatcctgttagttaaaaataccagcctcagcatgtccaaggatgatatgtcttccacattactgacattcagaagtttacattataatgaccccaagggaaacagttcgggtaatgacaaagagtgttgcaatgacatgacagtctggagaaaagtttcagaagcaaacggatcgtgcaagtggagcaataacttcatccgcagctccacagaagtgatgcgcagggtccacagggcccccagctgcaagtttgtacagaatcctggcataagctgctgtgagagcctagaactggaaaatacagtgtgccagttcactacaggcaaacaattccccaggtgccaataccatagtgttacctcattagagaagatattgacagtgctgacaggtcattctctgatgagctggttagtttgtggctctaagttgtaaatcccacagagctttaggactagggtcttactaaagaaggacctcttcttgttcattcttgtttaaacctttccttaatatcta

SEQ ID NO: 1048 - DNA, 1034 bp, Homo sapiens
  source 1..1034: mol_type = genomic DNA
agctatggcatttcaatcctgtatgtgagagctagagactcatacagtgacctagagcaggcatggaattttgggtgtcaccaggtaaacagagccctcagcatctgaatagaaactgaacaggaacagttagacacaacagcagaaactcccaggaaacaaacacgatttcacttttagctctgcaacaaagtggaatcttcctctacaggatcaacttgccgaaggaactgaagagattacactacatctgagatggagacctttcctctgctgctgctcagcctgggcctggttcttgcagaagcatcagaaagcacaatgaagataattaaagaagaatttacagacgaagagatgcaatatgacatggcaaaaagtggccaagaaaaacagaccattgagatattaatgaacccgatcctgttagttaaaaataccagcctcagcatgtccaaggatgatatgtcttccacattactgacattcagaagtttacattataatgaccccaagggaaacagttcgggtaatgacaaagagtgttgcaatgacatgacagtctggagaaaagtttcagaagcaaacggatcgtgcaagtggagcaataacttcatccgcagctccacagaagtgatgcgcagggtccacagggcccccagctgcaagtttgtacagaatcctggcataagctgctgtgagagcctagaactggaaaatacagtgtgccagttcactacaggcaaacaattccccaggtgccaataccatagtgttacctcattagagaagatattgacagtgctgacaggtcattctctgatgagctggttagtttgtggctctaagttgtaaatcccacagagctttaggactagggtcttactaaagaaggacctcttcttgttcattcttgtttaaacctttccttaatatctactctttagcactatagtgaactcctgattatttattctaactggaggagtgaaaaatccaaaattgtggataattcaattaaaagttatgactga

SEQ ID NO: 1049 - DNA, 624 bp, Homo sapiens
  source 1..624: mol_type = genomic DNA
atgctgccttgcctcgccctgcttctcctgatggagctgtccgtgtgcactgtggcaggtgatggtggagaggaacagacactcagcactgaagcagagacctgggaaggcgctggccccagcattcagctccagctgcaggaggtgaagacgggcaaggcaagccagttctttgggctgatggggaagcgagtgggagcatatcagctggaacacacgttccagggcctcctgggcaagagaagcctgttcacagaaggcagagaggatgaggcccaaggttcagagtaaaagcccccaccacagacttcccagaggacacggtgccgcttcttcctacctggatgtcacagctgacaagccggcaggccaactctcttctctgtgtctcctgtcctcatcgctggcacttcacacaaggcccacactgaacccactgggcttcttcctggactctcagtgtcaagcagcagtcctgcataaatgcacagcttcgccgtagcaagctgcactgactctgccctccctcacactcagagttggcatctcactgcacagcagtgaggagactcgcacactctgtatcctgtgcctagcacacagtaggcactcaataaatgagtg

SEQ ID NO: 1050 - DNA, 1715 bp, Homo sapiens
  source 1..1715: mol_type = genomic DNA
cctttcctcatgggacacagaactaggcagaacaggatcaggaagcgatcaaacctaccaaggcagtctcacttctcaatgactggactgtgtgggtactctgctccagacatgcgtggcctcagactcatcatgataccagttgagctgctactttgctacctcctgctgcaccctgtggatgccacttcatatggaaagcagacaaatgtcttgatgcactttcccttgtccttggaatcccagacaccctcctcagaccccttgtcctgccaatttctgcacccaaagtcactgcctggtttcagccacatggcccctctacccaagttcttggtaagcctggctctaaggaatgccctggaggaagctggttgtcaggctgatgtttgggctctacagctacagctctaccgccagggtggtgtgaatgctacacaggtcctcatccagcatcttcgagggctccagaaaggcagaagcacagagaggaacgtgtcagtggaagccctggcctctgctctgcagctgttagccagggagcagcaaagcacaggaagggtcgggcgctccctcccgacagaggactgtgagaatgagaaggagcaagctgtgcacaatgtagtccagctgctgccaggagtgggaaccttctacaacctgggcacagctttgtattatgctactcaaaactgcctgggcaaggccagggaacgaggccgagatggggccatagatctgggatatgaccttctgatgaccatggctgggatgtcaggggggcctatgggtctagcgatcagtgctgcacttaaacctgcattaaggtctggggttcagcagttgatccagtattaccaagatcagaaagacgcaaacatctctcagccggagaccaccaaggagggtttgagggccatctcagatgtgagtgacttggaagaaacaactactctggcttctttcatatcagaagtagtaagttcagctccctactgggggtgggccataatcaagagctatgacttagatcctggggctgggagtcttgagatataaaagaatgtggtaaccacagaattaataactgtactaccctgacaagctatatacatgtcttcaaaattttaatctgatttatccaggaggaaggctgtacagtaaaacgtaagaacgtaaatgtttgggtgttgaagtcacagggtttggtttcgaatctaggctccacttgttagagcctcggtgatcactgaatagtaacttctttcttgaactaagatcagttttgaagtttctaaaggagatagaatgattttaacctcaatgagttgccctgtaaatttaaaatgatacaatgaatctaaaatgcttatcacagtactttcaataaatagctattagccaggtgcggtggctcacgcctgtaatcccagcactgtgagaggctgaggcgggatgatcacctgaggtcaggagttcaagatcagcctgggcaacatggcgaaaccccgtctctacaataaatacaaaaaattatcctggcggagttatgcacgcttgtagtcccaactacctgggaggctgaggcgggagaatcacctgagcctgggaggtcgaggctgcagcgagccgagatcgcgccgctgcattccagcctgggtgacagagcgagaccatgtctcaaaaaataaaaataaaaaaaaattgttttcatt

SEQ ID NO: 1051 - DNA, 2135 bp, Homo sapiens
  source 1..2135: mol_type = genomic DNA
agtgttgccatcactcctgcccacagcaggagctggctggagcatgaggtggattctgtgctggagcctcaccctctgcctgatggcgcagacggccttgggtgccttgcacaccaagaggcctcaagtggtcaccaaatatggaaccctgcaaggaaaacagatgcatgtggggaagacacccatccaagtctttttaggagtccccttctccagacctcctctaggtatcctcaggtttgcacctccagaacccccggagccctggaaaggaatcagagatgctaccacctacccgcctgggtgcctgcaggagtcctggggccagctggcctcgatgtacgtcagcacgcgggaacggtacaagtggctgcgcttcagcgaggactgtctgtacctgaacgtgtacgcgccggcgcgcgcgcccggggatccccagctgccagtgatggtctggttcccgggaggcgccttcatcgtgggcgctgcttcttcgtacgagggctctgacttggccgcccgcgagaaagtggtgctggtgtttctgcagcacaggctcggcatcttcggcttcctgagcacggacgacagccacgcgcgcgggaactgggggctgctggaccagatggcggctctgcgctgggtgcaggagaacatcgcagccttcgggggagacccaggaaatgtgaccctgttcggccagtcggcgggggccatgagcatctcaggactgatgatgtcacccctagcctcgggtctcttccatcgggccatttcccagagtggcaccgcgttattcagacttttcatcactagtaacccactgaaagtggccaagaaggttgcccacctggctggatgcaaccacaacagcacacagatcctggtaaactgcctgagggcactatcagggaccaaggtgatgcgtgtgtccaacaagatgagattcctccaactgaacttccagagagacccggaagagattatctggtccatgagccctgtggtggatggtgtggtgatcccagatgaccctttggtgctcctgacccaggggaaggtttcatctgtgccctaccttctaggtgtcaacaacctggaattcaattggctcttgccttataatatcaccaaggagcaggtaccacttgtggtggaggagtacctggacaatgtcaatgagcatgactggaagatgctacgaaaccgtatgatggacatagttcaagatgccactttcgtgtatgccacactgcagactgctcactaccaccgaggcctttccatgggtaaggagaaggcacttagcctccagatgatgaaatactgggccaactttgcccgcacaggaaaccccaatgatgggaatctgccctgctggccacgctacaacaaggatgaaaagtacctgcagctggattttaccacaagagtgggcatgaagctcaaggagaagaagatggctttttggatgagtctgtaccagtctcaaagacctgagaagcagaggcaattctaagggtggctatgcaggaaggagccaaagaggggtttgcccccaccatccaggccctggggagactagccatggacatacctggggacaagagttctacccaccccagtttagaactgcaggagctccctgctgcctccaggccaaagctagagcttttgcctgttgtgtgggacctgcactgccctttccagcctgacatcccatgatgcccctctacttcactgttgacatccagttaggccaggccctgtcaacaccacactgtgctcagctctccagcctcaggacaacctctttttttcccttcttcaaatcctcccacccttcaatgtctccttgtgactccttcttatgggaggtcgacccagactgccactgcccctgtcactgcacccagcttggcatttaccatccatcctgctcaaccttgtgcctgtctgttcacattggcctggaggcctagggcaggttgtgacatggagcaaacttttggtagtttgggatcttctctcccacccacacttatctcccccagggccactccaaagtctatacacaggggtggtctcttcaataaagaagtgttgattagacctgaatttctccacctataaaa

SEQ ID NO: 1052 - DNA, 509 bp, Homo sapiens
  source 1..509: mol_type = genomic DNA
gcaggcccatattcagccacctcatccaggccttatcaaagaagagtcttatatgagatcaaatggctgcctttccccacaagattatatttttcctggtatgctctactttgacacatgtggctttctcaggaattttcaataaacgtgacttcactaggtggcctaagccccgatgtaaaatgtatatcccactggaccctgattacaatgcagactgccccaatgtgacagcacctgtttgtgcctcaaatggccacactttccagaatgagtgtttcttttgtgttgaacagagggaatttcattatcgtataaaatttgaaaaatatggaaaatgtgattaatgggtaccagagtaactacacttgcttattctttttctacttaattcagaatagtatttcttttagagtgtgagaatgtaaattaaataacatccctatgctgtacttaaatgtcgaacaaaatgagagacaaaaatgaaggaatcaaactgacaagaacca

SEQ ID NO: 1053 - DNA, 655 bp, Homo sapiens
  source 1..655: mol_type = genomic DNA
tccacattgtcctttgagaatgagaagtcatcctggagcacagctcttcccacgctccgggcccacacacccagcctcactccatcaaaggagccccgctgcctgcccacccaccctgggtgctttctggcttgcagtgctcttggcagacatgaggcaacgattgctcccgtccgtcaccagccttctccttgtggccctgctgtttccaggatcgtctcaagccagacatgtgaaccactcagccactgaggctctcggagaactcagggaaagagcccctgggcaaggcacaaacgggtttcagctgctacgccacgcagtgaaacgggacctcttaccaccgcgcaccccaccttaccaaggggatgttccaccgggaattagaaataccatctgccatatgcagcaagggatctgcagactttttttctgccattctggtgagaaaaagcgtgacatttgctctgatccctggaataggtgttgcgtatcaaatacagatgaagaaggaaaagagaaaccagagatggatggcagatctgggatctaaaatataagctcccggaaggcagggatgttgaagtatcccaagggcttaaaggaatgtgtggcttatagtaggtgttcaataaatatttgttgaatgaattta

SEQ ID NO: 1054 - DNA, 1183 bp, Homo sapiens
  source 1..1183: mol_type = genomic DNA
ctacctgctccaccctcaacccaccagaaccatgggctgctgtggctgctctggaggctgtggctccggctgtgggggctgcggctctggctgtgggggatgtggctctagctgctgtgtgcccatctgctgctgcaagcccgtgtgctgctgtgtgccagcctgttcctgctccagctgtggctcctgtgggggctccaaggggggccgtggctcctgtgggggctccaagggggactgtggctcctgtgggggctccaagggaggctgtggttcttgtggctgctcccagtgcagctgctataagccctgctgttgctcctcaggctgtgggtcatcctgctgccagtccagctgctgcaaaccctgctgttcccagtccagctgttgtaagccctgcagctgctcttcaggctgtgggtcatcctgctgccagtccagctgctgcaagccctgctgttcccagtccagctgctgtaagccctgctgctgctcttcaggctgtgggtcatcctgctgccagtccagctgctgcaagccctgctgttcccagtccagctgctgtgtcccaatttgctgccagtgcaagatctgaggctctgcctacaaatctcagctggtcccacagatctgggctctccaggaatgactgtagctgtgtcctgaattcctgaagcacatctctgagtctgtcctcctctggactaaggcagcctagcgtccagggctcagtactcagctgctcagcctctgaggtcatgagggcttctggcatgctgggtgctgcccatcaaccctcccagaatcccctcttcctttcctgacctcatcacttcaaccttctcagggcttcaagatcccacatccctgggcccctcctgtgagcctgctggaaacacactgaaactggaatcctccgacctgctgccgcctctccccggtccctgcaacctcctggctcctccacccttcatcttcatcctgcctgagctgccacagctccgattgtttttggagttgacctagaggactcagaattattagagaccccaggatcctctcctgaggaggaggggcgcccagtctcctcttctacctctgacctggccttgtttctttccccagggcttcgccttgtaagtgcctaggctgaatcttctaaataaatacgatccacacctcc

SEQ ID NO: 1055 - DNA, 864 bp, Homo sapiens
  source 1..864: mol_type = genomic DNA
gggctccgctggctgcggtcgcctgggagctgccgccagggccaggaggggagcggcacctggaagatgcgcccattggctggtgctccagtccccaaaaggcaaaaatgtgaccactggactccctgcccatctgacacctatgcctacaggttactcagcggaggtggcagaagcaagtacgccaaaatctgctttgaggataacctacttatgggagaacagctgggaaatgttgccagaggaataaacattgccattgtcaactatgtaactgggaatgtgacagcaacacgatgttttgatatgtatgaaggtgataactctggaccgatgacaaagtttattcagagtgctgctccaaaatccctgctcttcatggtgacctatgacgacggaagcacaagactgaataacgatgccaagaatgccatagaagcacttggaagtaaagaaatcaggaacatgaaattcaggtctagctgggtatttattgcagcaaaaggcttggaactcccttccgaaattcagagagaaaagatcaaccactctgatgctaagaacaacagatattctggctggcctgcagagatccagatagaaggctgcatacccaaagaacgaagctgacactgcagggtcctgagtaaatgtgttctgtataaacaaatgcagctggaatcgctcaagaatcttatttttctaaatccaacagcccatatttgatgagtattttgggtttgttgtaaaccaatgaacatttgctagttgtatcaaatcttggtacgcagtatttttataccagtattttatgtagtgaagatgtcaattagcaggaaactaaaatgaatggaaattcttaaa

SEQ ID NO: 1056 - DNA, 249 bp, Homo sapiens
  source 1..249: mol_type = genomic DNA
atgaagatactttgtatttttctgacctttgtcttcactgtgtcttgtggtccatcagttccacagaaaaaaacaagagaagttgcagagagaaaaagagaatgtcagcttgttcgtggtgcttgcaagccggaatgcaacagctgggaatatgtatattattactgcaatgttaacccctgctgtgcggtatgggaataccaaaagccaatcattaacaaaatcactagtaaactccatcaaaaataa

SEQ ID NO: 1057 - DNA, 186 bp, Homo sapiens
  source 1..186: mol_type = genomic DNA
atgaagattcacgtctttctctttgttttatttttctttctggtccccattgccaccagggtgaaatgtgccgtgaaagacacctatagttgctttatcatgagaggcaaatgtcgacatgagtgtcatgattttgaaaaaccaattggtttctgcacaaaactaaatgccaactgttatatgtag

SEQ ID NO: 1058 - DNA, 1498 bp, Homo sapiens
  source 1..1498: mol_type = genomic DNA
gggcgatggggaacctgtttatgctctgggcagctctgggcatatgctgtgctgcattcagtgcctctgcctggtcagtgaacaatttcctgataacaggtcccaaggcctatctgacctacacgactagtgtggccttgggtgcccagagtggcatcgaggagtgcaagttccagtttgcttgggaacgctggaactgccctgaaaatgctcttcagctctccacccacaacaggctgagaagtgctaccagagagacttccttcatacatgctatcagctctgctggagtcatgtacatcatcaccaagaactgtagcatgggtgacttcgaaaactgtggctgtgatgggtcaaacaatggaaaaacaggaggccatggctggatctggggaggctgcagcgacaatgtggaatttggggaaaggatctccaaactctttgtggacagtttggagaaggggaaggatgccagagccctgatgaatcttcacaacaacagggccggcagactggcagtgagagccaccatgaaaaggacatgcaaatgtcatggcatctctgggagctgcagcatacagacatgctggctgcagctggctgaattccgggagatgggagactacctaaaggccaagtatgaccaggcgctgaaaattgaaatggataagcggcagctgagagctgggaacagcgccgagggccactgggtgcccgctgaggccttccttcctagcgcagaggcggaactgatctttttagaggaatcaccagattactgtacctgcaattccagcctgggcatctatggcacagagggtcgtgagtgcctacagaacagccacaacacatccaggtgggagcgacgtagctgtgggcgcctgtgcactgagtgtgggctgcaggtggaagagaggaaaactgaggtcataagcagctgtaactgcaaattccagtggtgctgtacggtcaagtgtgaccagtgtaggcatgtggtgagcaagtattactgcgcacgctccccaggcagtgcccagtccctgggtaagggcagtgcctgataataccccacacaagttcacttgattaattgcatcagtggaaggggacatagcttctctcttagagagaacagattggaaagcaatcggaaaattgcagttttggtctgtagtcctcatgatatctgctatcagtggggaaaatggaggcccaagattctacagcatattcctggcggggctgaaattggaacctgggcctcctgactttggcagacccccatttcatctttcctgcaaactactttcccatctttgtgcctgtacttatgcagctttctacagggagagtttggtttggggtctatatctagagggaccttcaaagtatttgttcctttaaatttcagaccatgtccaacccagctgtgctgctgggaatcaggagaatagaagcaaaaaacgaaagagttctgttcagacttctgaagagcagc

SEQ ID NO: 1059 - DNA, 1513 bp, Homo sapiens
  source 1..1513: mol_type = genomic DNA
cacggtgcctgcacgggacgccgctcgatccccgagccccctcgccgtccccgacagcccccccggcgccatgcaatcccggcttctactcctcggggcacccggaggccacggcggcccggcctcgcggcgcatgcggctgctcctgcggcaggtggtgcagcgcaggccgggtggcgacaggcagcggccggaggtcagactgttgcacgccggctcgggggccgacacaggtgatacagttaatattggagatgtatcctacaagttgaaaattcctaagaatccagaacttgtgccacagaactacatttcagactctctggctcaatctgtagttcagcatctaagatggataatgcagaaggatcttttggggcaagatgtttttctaataggacctcctgggcctcttcgacgctctattgctatgcagtacttggagctgaccaaacgggaggtcgaatacattgccctgtcaagggacaccactgaaactgatctcaaacagcgacgagagatccgtgcaggcacagccttttacattgatcagtgtgcagttcgtgcagccacagaaggcagaactctcattttggaaggtttggaaaaggcagagaggaatgttttgcctgttttgaacaacttgctggaaaacagagagatgcagcttgaagatggacgcttcctgatgtctgctgagcgttacgacaaacttctccgagatcataccaaaaaagagttggattcttggaaaattgtccgagttagtgaaaatttccgagtgattgccttgggcttgccagtgccaaggtattctgggaatccattagacccccctcttcgttctcgatttcaagccagggatatttattatttacccttcaaggaccaacttaagttgttatattcaattggagccaatgtttctgctgagaaagtttctcagctcttgtcctttgccacaactctgtgttcccaagaatcttctactcttggacttccagactttcctttagatagtttagcagctgcggttcaaatcttggattcctttcctatgatgccaatcaaacatgcaatccagtggctttatccatatagtattttactaggtcatgaagggaagatggctgtggaaggtgttttaaagcgctttgaacttcaagattcaggaagctctctacttcctaaagagattgtaaaagtagagaagatgatggaaaaccatgtgtcccaagcttctgtgaccatccggattgcagataaagaggtgaccattaaggtgccagccgggaccaggctattaagtcaaccttgtgcgtcagaccgtttcatacagactttgagccataagcagctacaggctgaaatgatgcagtctcacatggttaaagatatatgtttaattggaggaaagggttgtggaaaaacagtgatcgctaagaactttgccgataccttaggatacaacatagaacctattatgctctatcagcataaagtacctcatata

SEQ ID NO: 1060 - DNA, 2144 bp, Homo sapiens
  source 1..2144: mol_type = genomic DNA
aggcggggtcacgcggaaggccgggcagcgcagggcgaaaggaggctgtgtcctcagcctcctccctcggcacgcgcctcccatcctgacggggactgagagcccaggagagctcggggcgtgtccaaactgccgcgccgccctgctccgggtttgtcttcctccctccgtttctccttccgctgtatctagcatttcggttcctggaaaggttaccggagctgcgattggggctgggaccaaagttgagtcctggaaagggagcctggagagcggcggtgctgggaggcccggccagctcgatcgcaggcttccacctggcggccaatgcttgtttgctactgatgggtgtgagcaagttagatattctataccggagacttctcctaacaaaactttttatcagaggatggggaaggccagaagatctcaaaagactctttgaattcagaaagatgattggaaatcgggaaagatgccagaatctggtttcaagcgattatccagtacacattgataaggttccaatttattgtgcctaaagaatggaacagcaaatatagacctgtatgcattcatcttgctggaacaggagatcatcattactggaggcgacgaacactaatggcccgtcctatgattaaagaagcccgaatggcttctttattgttagaaaacccttattatggctgcaggaaacccaaggaccaagtaaggtccagcttaaaaaatgtgtccgacctttttgtgatgggaggagctcttgttttagaatctgcagctctcttgcactggctagagagggaaggttacggccctttaggaatgactggaatatccatgggaggacacatggcttccttagcggtatccaactggcctaagcccatgccattgattccatgcctgtcttggtccacagcatctggggtcttcactacgggtgtgttgagtaaatcaattaattggagggagctggaaaagcaatattatacccagacagtttatgaagaagaaattattcacatgcttgaatactgtggaacagattctttcaaaatgggacaagagtttgtgaaacacttcactagcagtgcagacaagctaactaaccttaatctggtttccagaactttaaatttagatatatcaaaccaagttgtatcccaaaaacctgctgactgccataattctagcaaaacatctgtcagtgcgacatcagaaggactcttattgcaagatacctctaagatgaagcgcttcaatcaaacactttcaaccaacaaaagtggttatacaagtcgcaaccctcagtcataccacctacttagtaaagaacaaagcagaaacagtcttcggaaagagtctttaatatttatgaaaggagtcatggatgaatgtactcatgtagcaaatttctcagtcccagttgatccaagcctcattatagtggttcaagccaaagaagatgcctatattccacgaacaggagttcgaagtttacaagaaatttggcctggttgtgaaatccgatacttagaagggggtcatattagtgcttatctttttaaacaaggactcttcagacaagccatctatgatgcatttgaccgcttcctccataaatacgctaactagttggattattatatgtaaccagtgtggccatgatgtttcttacaaaagggagcttcatcctgtgatcatgtgaaggacaagcagacagcactaatatatctaatcgctatcaatttggtctggaattcattgttacacatcagttaactataaacttcgaatacatttgaataatttcaagataatatttgaagtaaataatgttaaagtgtttttactattgtttattggaatcccatatattcagtgtttagtctgttgttactgtttatgaaaaactaaatttttaatcatgaataatttattaaattaaataaatttattcatagaaacttttctgggttttagtaaaattgctaaatcaaaccaagattttaatatatcagcatttactttgtacccttataacatttcactcttgacttgatttgagaaacatgtttattttttgaatgttcttgtgttcaactaattttctgctgtggaaataaatacttatgatatat

SEQ ID NO: 1061 - DNA, 2177 bp, Homo sapiens
  source 1..2177: mol_type = genomic DNA
agcgcagggcgaaaggaggctgtgtcctcagcctcctccctcggcacgcgcctcccatcctgacggggactgagagcccaggagagctcggggcgtgtccaaactgccgcgccgccctgctccgggtttgtcttcctccctccgtttctccttccgctgtatctagcatttcggttcctggaaaggttaccggagctgcgattggggctgggaccaaagttgagtcctggaaagggagcctggagagcggcggtgctgggaggcccggccagctcgatcgcaggcttccacctggcggccaatgcttgtttgctactgatgggtgtgagcaagttagatattctataccggagacttctcctaacaaaactttttatcagaggatggggaaggccagaagatctcaaaagactctttgaattcagaaagatgattggaaatcgggaaagatgccagaatctggtttcaagcgattatccagtacacattgataagattgaagagcaatcagattgtaagatcttagatggacactttgtttcccccatggctcactatgtgcctgatatcatgccaattgaatctgttattgcaaggttccaatttattgtgcctaaagaatggaacagcaaatatagacctgtatgcattcatcttgctggaacaggagatcatcattactggaggcgacgaacactaatggcccgtcctatgattaaagaagcccgaatggcttctttattgttagaaaacccttattatggctgcaggaaacccaaggaccaagtaaggtccagcttaaaaaatgtgtccgacctttttgtgatgggaggagctcttgttttagaatctgcagctctcttgcactggctagagagggaaggttacggccctttaggaatgactggaatatccatgggaggacacatggcttccttagcggtatccaactggcctaagcccatgccattgattccatgcctgtcttggtccacagcatctggggtcttcactacgacagattctttcaaaatgggacaagagtttgtgaaacacttcactagcagtgcagacaagctaactaaccttaatctggtttccagaactttaaatttagatatatcaaaccaagttgtatcccaaaaacctgctgactgccataattctagcaaaacatctgtcagtgcgacatcagaaggactcttattgcaagatacctctaagatgaagcgcttcaatcaaacactttcaaccaacaaaagtggttatacaagtcgcaaccctcagtcataccacctacttagtaaagaacaaagcagaaacagtcttcggaaagagtctttaatatttatgaaaggagtcatggatgaatgtactcatgtagcaaatttctcagtcccagttgatccaagcctcattatagtggttcaagccaaagaagatgcctatattccacgaacaggagttcgaagtttacaagaaatttggcctggttgtgaaatccgatacttagaagggggtcatattagtgcttatctttttaaacaaggactcttcaggtaagacggctggtctaaacatgtattcgttcatttgttgtttgttttctggattttttgcttcaacaaatgtaaaagatcacatatttttatagtctgtttcaatctttgaattccctcctcacctcccacaaatctcacagagttacttttccctctttcctagaatttgatcttcttattttcttctagagaactaagcatgatgcatattataggcatgctttatcgtgtggctttcccctcttcaaatattaatggccaggtattttaggatgtgagaaggaagatcatggcttgttaaagttgctttggtgcatcaagagttttttcactctattctgatgttttttcagaatggcctgaacatctgtggaataatttagcaatgtttttcagttagcaagtgaatattgaaccttaaataagaagtgcttttaatgtgaacaaccttatatgactccactattttagttagaacttataaaaacttttatgctggctgggcgcggtggcttacgcctgtaatcccagcactttgggaggcggaggcgggtgtatcacgaggtcaggagatcaaggccatcctggctaacacggtgaaaccccgtctctagt

SEQ ID NO: 1062 - DNA, 1040 bp, Homo sapiens
  source 1..1040: mol_type = genomic DNA
aactccaataaaaatccagacagaggtatttaagaagaaaggcttttctatcaaagttctttctcttcttggacttttaaattgtggctacctaaattgagtatctggcaagagtaagattaagcagtaatttgttccaaagaagaatcttctaccaaggagcaactttaaagaatgaaattaactttcttcttgggcctgttggctcttatttcatgtttcacacccagtgagagtcaaagattctccagaagaccatatctacctggccagctgccaccacctccactctacaggccaagatgggttccaccaagtcccccacctccctatgactcaagacttaattcaccactttctcttccctttgtcccagggcgagttccaccatcttctttctctcgatttagccaagcagtcattctatctcaactctttccattggaatctattagacaacctcgactctttccgggttatccaaacctacatttcccactaagaccttactatgtaggacctattaggatattaaaacccccatttcctcctattcctttttttcttgctatttaccttcctatctctaaccctgagccccaaataaacatcaccaccgcagatacaacaatcaccacaaatccccccaccactgcaacagcaaccaccagcacttccacaaaacccacaatgacgatcagctcctcaacagtacctatctcttcaacaccagagcctgccacctccatatcagcagcaacccccgcagcatctactgaaaatactactcaaattctcgccaaccgtcctcacacagtattgctcaatgccactgtccaagttacgacttccaaccaaactatattaagcagcccagcctttaaaagtttttggcaaaaactctttgccatttttggttgaacatgcaataaatgatattttccaaactgctctgatatcttagaagaaataaactgcaatgattttgatggaaccaaccctgatctaaccagcacactaaataaagtatttgagcaata

SEQ ID NO: 1063 - DNA, 1082 bp, Homo sapiens
  source 1..1082: mol_type = genomic DNA
gcggccgcggaggaggtgcggccccaaggggaggaggtgcccgctcaccgcagaccgcccgcggcagaggccgccccggtcgcgccgcggcgggagcggccggtggaggctgcgcggccgagggggagggccgggggagcggacgtcgcctctgctggtctcccacctcccgccgccccccgcccgcaggctcccaagccttagtcggcgccgagcatcccgctgccccggaccctcccgcgggcgcgcaccaggctcaactcaggctcaggactgcaggtagacatctccactgcccaggaatcactgagcgtgcagacagcacagcctcctctgaaggccggccataccagagtcctgcctcggcatgggcctcaccattgaggcagctccactgtctgtgctggtctgagggtgctgcctgtcatgggggcagccatctcccagggggccctcatcgccatcgtctgcaacggtctcgtgggcttcttgctgctgctgctctgggtcatcctctgctgggcctgccattctcgctctgccgacgttgactctctctctgaatccagtcccaactccagccctggcccctgtcctgagaaggccccaccaccccagaagcccagccatgaaggcagctacctgctgcagccctgaaggcccctggcctagcctggagcccaggacctaagtccacctcacctagagcctggaattaggatcccagagttcagccagcctggggtccagaactcaagagtccgcctgcttggagctggacccagcggcccagagtctagccagcttggctccaataggagctcagtggccctaaggagatgggcctggggtgggggcttatgagttggtgctagagccagggccatctggactatgctccatcccaagggccaagggtcaggggccgggtccactctttccctaggctgagcacctctaggccctctaggctggggaagcaaactggaacccatggcaataataggagggtgtccaggctgggcccctcccctggtcctcccagtgtttgctggataataaatggaactatggctctaccc

SEQ ID NO: 1064 - DNA, 1603 bp, Homo sapiens
  source 1..1603: mol_type = genomic DNA
agtttctggagctgttccgagtcccgtggagtctccatctgagccctttcctagtccaggcatcccgatgttggtggatggcccatctgagcggccagccctgtgcttcttgctgttggctgtggcaatgtctttcttcggctcagctctatccatagatgaaacacgggcgcatctgttgttgaaagaaaagatgatgcggctgggggggcggctggtgctgaacaccaaggaggagctggccaatgagaggctcatgacgctcaaaatcgctgagatgaaggaggccatgaggaccctgatattcccacccagcatgcactttttccaggccaagcatctcattgagagaagtcaagtgtttaatattctaaggatgatgccaaaaggggctgccttgcacctccatgacattggcatcgtgactatggactggctggtgaggaatgtcacctacaggcctcactgccacatctgtttcaccccaagggggatcatgcagttcagatttgctcacccaactccccgtccatcagaaaaatgttccaagtggattctgctggaggattatcggaagcgggtgcagaacgtcactgagtttgatgacagcttgctgaggaatttcactctggtgacccagcacccggaggtgatttacacaaaccaaaatgttgtctggtcgaaatttgaaaccatcttcttcaccatctctggtctcatccattacgcaccagtgttcagagactatgtcttccggagcatgcaggagttctacgaggacaacgtgctctacatggagatcagagccaggctgctgccggtgtatgagctcagtggagagcaccatgacgaagagtggtcagtgaagacttaccaggaagtagctcagaagtttgtggaaactcaccctgagtttattggaatcaaaatcatttattcggatcacagatccaaagatgtggctgtcatcgcagaatccatccgaatggccatggggctccgaatcaagttccccacggtggtggcagggtttgacctggtggggcatgaggacactggccactccttgcatgactacaaggaagctctgatgatccccgccaaggatggcgttaagctgccttacttcttccacgccggagaaacagactggcagggtacttccatagacaggaacattctggatgctctgatgctgaacactaccagaatcggccatggatttgctttgagcaaacaccccgcagtcaggacttactcctggaaaaaggacatccccatagaagtctgtcccatctctaaccaggtgctgaaactggtgtctgacttgaggaaccaccctgtagccactctgatggccactgggcaccccatggtgatcagctctgatgacccagctatgtttggtgccaaaggcttgtcctatgatttctatgaggtcttcatgggcattggggggatgaaggctgacctgaggaccctcaaacagctggccatgaactctatcaagtacagtaccctgttggagagtgagaaaaatactttcatggaaatctggaagaagagatgggataagttcatagcagatgtggctacaaagtga

SEQ ID NO: 1065 - DNA, 3986 bp, Homo sapiens
  source 1..3986: mol_type = genomic DNA
attcttcccgaatggcctcacgtgtgctccctatcatcacgccttttcagctaggcaacgctcagagtcacacctgagtggaggccgacgcccctttggaggcgactccagccataaaaagtcctgcttggagctggttttagccacagagggccaataaatggccccttctgaatgaggtgcccctgcacctctgcagagcctgctgccagcctccaggatctaactgggctctgattcaccgctcccaaccccacatccaggcatcccgatgttggtggatggcccatctgagcggccagccctgtgcttcttgctgttggctgtggcaatgtctttcttcggctcagctctatccatagatgaaacacgggcgcatctgttgttgaaagaaaagatgatgcggctgggggggcggctggtgctgaacaccaaggaggagctggccaatgagaggctcatgacgctcaaaatcgctgagatgaaggaggccatgaggaccctgatattcccacccagcatgcactttttccaggccaagcatctcattgagagaagtcaagtgtttaatattctaaggatgatgccaaaaggggctgccttgcacctccatgacattggcatcgtgactatggactggctggtgaggaatgtcacctacaggcctcactgccacatctgtttcaccccaagggggatcatgcagttcagatttgctcacccaactccccgtccatcagaaaaatgttccaagtggattctgctggaggattatcggaagcgggtgcagaacgtcactgagtttgatgacagcttgctgaggaatttcactctggtgacccagcacccggaggtgatttacacaaaccaaaatgttgtctggtcgaaatttgaaaccatcttcttcaccatctctggtctcatccattacgcaccagtgttcagagactatgtcttccggagcatgcaggagttctacgaggacaacgtgctctacatggagatcagagccaggctgctgccggtgtatgagctcagtggagagcaccatgacgaagagtggtcagtgaagacttaccaggaagtagctcagaagtttgtggaaactcaccctgagtttattggaatcaaaatcatttattcggatcacagatccaaagatgtggctgtcatcgcagaatccatccgaatggccatggggctccgaatcaagttccccacggtggtggcagggtttgacctggtggggcatgaggacactggccactccttgcatgactacaaggaagctctgatgatccccgccaaggatggcgttaagctgccttacttcttccacgccggagaaacagactggcagggtacttccatagacaggaacattctggatgctctgatgctgaacactaccagaatcggccatggatttgctttgagcaaacaccccgcagtcaggacttactcctggaaaaaggacatccccatagaagtctgtcccatctctaaccaggtgctgaaactggtgtctgacttgaggaaccaccctgtagccactctgatggccactgggcaccccatggtgatcagctctgatgacccagctatgtttggtgccaaaggcttgtcctatgatttctatgaggtcttcatgggcattggggggatgaaggctgacctgaggaccctcaaacagctggccatgaactctatcaagtacagtaccctgttggagagtgagaaaaatactttcatggaaatctggaagaagagatgggataagttcatagcagatgtggctacaaagtgaggagaagctagccagccctctacaagctgtcttcttgcacacgctgtcacttcctctcactcgttcttgaatcagctccatgtgcccatgaaatcaatggcctctgtatggagcgaccctgtgagaagcacttggctggctgagcaaattcatcctctggaaatattctctctcagccacagtgacattgaccctcttggttttctcctgtctctggccatttcttccagtttccctatttcagagtcttctcctctctctgatctctgtgctgtttcctcaggactcagtcctgggctctcttctattctggtctctttatttttttatttttgtattttttcgagatggagttttgctcttgttgcccaggctggagtacaatggtgcgatctcagctcagtgcaacctccgccacccgggttcaggcaattctcttgcatcagcctcgcgagtagttggaattataggcatgtgccaccacacccagctgatttttgcatttttagtagagacaggttttcaccatgttggcgaggctggtatccaactcttgacctcaggtgatccactcgccccttggctcccaaagtgctggaattacaggcattagccaccatgcctggcctattctggtctctttaactctctcctctttatttctcttctctctctgtacacttttcctgggtggtctcatccattcctttgctttttcataccatttatttgttaatgattcccacatttatttatgcacttggagagctcacaggaatctcagaaactgatgaggtacaattctgaaccctcagtctcttccctttaaacctttctttttctctactttaatttttctaaagagtgtcttgctatgttgcccaggctggtctccaactcaagtgatcctcctgccgcagtctcccgaagtgctgggattactgacatgagccaccacactcagccctttaaacctttccctggcctttcccatagctggtgaaggacacctccatccattccacgcagttgctcaaagcagaaattttcagtgcaagtcttgatgctgcgccgtcccccactccctacatcagaacgcatccctcatctggactccagcggtggcttcttgatgctgcgcggtcccccactccctacatcagaatgcatcccgcatccagactccagcggtggtgctctacctgcacgctgttgccaagtccaagctaccatactcctgcctgagctatgacaacagcctcctcactgatctcccctttcttccctttgcctcctccagctcatttttcacagtgtagaatgacattttgtttgtttgttttgttttgtttgagatggagtctcgctctgttgcccagggtggagtgcagcggtgcgatctcggctcactgcaacctccacctcccgggttcaagcggattctcgtgcctcagcctcctgagtagctgggattacaggcatgcaccaccatgcccggataatttttgtatttttagtagagatggggtttcactatgttggccaggctggtctcgaacacctgacctcgtggtccacccgcctcggcctcccaaagcactgggattacaggcgtgagccacccggcctggcctagaatgacttttaaaagatcaaattaaatcaggtcactcctttgcttacaacgcagtgcgtttagaggtacaccccatgtctccacagggcatacagcatccgatttaatctggatccattccggcgccttcctctcccagtcacccagagggccccaaccccggcggccctttcttcctcaaatgtcctcggctctataccgtgcctgggtcttttctctttctctctgcctggaagattccttctttccccttttgtcttgcccactcctgtttacccttcaagtttcaagttcatgtcactgtctcagagaggttttcctgtgctcgccctgtttctctcaggaagccttgctcttttccatcatgcctctaatcacagcttataatcggatatttatttctgtgtctacagtcttgccctgccagactgtatgccccatgtgggcaggcgctcatgattgtttctgattgtttcacgcatgctgctaacccagagcctgggcccaaagctagttagtactcaataaacaatgcattgaatg

SEQ ID NO: 1066 - DNA, 240 bp, Homo sapiens
  source 1..240: mol_type = genomic DNA
atgaaactccattcccttatttctgttctcctcctctttgtgactttaataccaaaaggaaagactggcgttattccaggacaaaaacagtgtattgctttgaaaggggtgtgcagagacaaactatgcagcacactagatgataccattggtatatgtaatgaaggaaaaaaatgttgtagaaggtggtggatacttgagccctatccaactccggttcccaaaggaaaatctccttag

SEQ ID NO: 1067 - DNA, 709 bp, Homo sapiens; identical to SEQ ID NO: 820
  source 1..709: mol_type = genomic DNA

SEQ ID NO: 1068 - DNA, 996 bp, Homo sapiens
  source 1..996: mol_type = genomic DNA
caggtgatccccatcaactctggggacctctttgtgcatccactctggaaccgctcgtgtgtggcctgtggcaatgacatcgccctcatcaagctctcacgcagcgcccagctgggagacgccgtccagctcgcctcactccctccggctggtgacatccttcccaacgagacaccctgctacatcaccggctggggccgtctctataccaacgggccactcccagacaagctgcaggaggccctgctgccggtggtggactatgaacactgctccaggtggaactggtggggttcctccgtgaagaagaccatggtgtgtgctggaggggacatccgctccggctgcaatggtgactctggaggacccctcaactgccccacagaggatggtggctggcaggtccatggcgtgaccagctttgtttctgcctttggctgcaacacccgcaggaagcccacggtgttcactcgagtctccgccttcattgactggattgaggagaaactacagggcaacaaggcaccagagtcccggacttaggaccactgtgtgtgattcaccgtgaacactggcatattaaaggctctgagaagtcctgtaggaaaggacaatttgaactttgtttgagctcatattttccaatcccatctgacctttagttcttcactgagtgcccactgggttatattctgggagccgaggccacagcagtgaacaaagcacacaaaaccccccgccccatgggggctccgttctagtgggtccatttatcatcaaacatctattaatatctctagaatgtgcccatcaggacaccatccagatgctgctgcgcttttccaggccacacagaggggacaccctccaggtgcatcctgcatgaatatcaggctcaaccgtgctttcagggtaggaagcggagggcatttgaagagtcctttcccttccttcattcatttgttgtctccttgaataaatgctgttgaaaaccta

SEQ ID NO: 1069 - DNA, 1275 bp, Homo sapiens
  source 1..1275: mol_type = genomic DNA
ccagcttccagcctaccctgcatctcttccctctgaattgcaggaaccctcccagcctccatgccgcctttcctgatcaccctcttcctctttcactcttgctgcctccgagcaaatggccacctccgtgaaggaatgacattgctgaagactgagtttgcacttcacctctaccagagtgtggccgcgtgtagaaatgagacgaactttgtcatctctcctgctggtgtgtccctccccctggagatcctgcagtttggagcagaagggagcactggtcagcagctggcagatgccctggggtacactgtccatgacaaaagggtgaaagatttcttgcatgctgtttatgccacactacccacctccagccaaggcaccgagatggagctggcctgcagcctttttgtgcaagtgggaacgccactgtccccctgctttgtggagcacgtctcctggtgggctaacagcagcctggaaccagccgacctcagtgagcccaatagcaccgccatccagactagcgaaggggcctccagagagactgcaggtgggggccccagtgagggccctggtggctggccgtgggagcaagtcagtgcagcatttgctcagcttgtgcttgtgagcaccatgtccttccaaggcacttggcgaaagagattctcctccacagacacacagatcctgcctttcacctgtgcctatggcctcgtccttcaggtccccatgatgcaccaaacgaccgaggtcaactacggtcagttccaggacactgcaggccatcaggtgggggtgctggagcttccttacctgggaagtgcagtgagtctgttcctggtgctgccccgtgacaaagacacccccctgagccacatcgagccacacctcacagccagcaccatccacctctggaccaccagcctgaggagagccaggatggatgtgttcctgcccaggtttaggatccaaaatcaattcaacttaaaaagcattttaaattcttggggagtcaccgatctttttgatccactcaaagctaacttgaaaggaatttcaggccaagatggcttttatgtttctgaagcaatccacaaggccaagattgaagttttggaggaaggcaccaaggcatctggagccacagctctgttgttattgaaaaggtctcggattcctatttttaaagcagatcggccattcatctatttcctgagagaacctaacacagggtttgtcttcagtattgggagagtttcaaatcccctagactaa

SEQ ID NO: 1070 - DNA, 560 bp, Homo sapiens
  source 1..560: mol_type = genomic DNA
cgttggaacgtccttgggcttctgaactagtgcccatgtgtgcctcggcctttcccaagggccagcttcttcctgagatgctgcccccacccccttaggcccgagggatcaggagctatgggaccagaggccctgtcatctttactgctgctgctcttggtggcaagtggagatgctgacatgaagggacattttgatcctgccaagtgccgctatgccctgggcatgcaggaccggaccatcccagacagtgacatctctgcttccagctcctggtcagattccactgccgcccgccacagcaggttggagagcagtgacggggatggggcctggtgccccgcagggtcggtgtttcccaaggaggaggagtacttgcaggtggatctacaacgactgcacctggtggctctggtgggcacccagggacggcatgccgggggcctgggcaaggagttctcccggagctaccggctgcgttactcccgggatggtcgccgctggatgggctggaaggaccgctggggtcaggaggtgatctcaggcaatgaggaccctga

SEQ ID NO: 1071 - DNA, 3832 bp, Homo sapiens
  source 1..3832: mol_type = genomic DNA
ggctttaggaagttatttaactgatctctgccctagtttcttcatgtgttaaatatggatagtaatagtatctaccttatgaagtgactgtgaagataaaattatggattctgtttaagggtttaggccagtgtctggcacaggggaagcattctaaaaatatagctgatgctgttaaacaatgactgttgttgttgttttactgttattatccccaaagcggcccattctgtctgttgctgtcagctatgactcagtcccctgattaacttacgcaccacccattttatcccctgcagagatgctgcccccacccccttaggcccgagggatcaggagctatgggaccagaggccctgtcatctttactgctgctgctcttggtggcaagtggagatgctgacatgaagggacattttgatcctgccaagtgccgctatgccctgggcatgcaggaccggaccatcccagacagtgacatctctgcttccagctcctggtcagattccactgccgcccgccacagcaggttggagagcagtgacggggatggggcctggtgccccgcagggtcggtgtttcccaaggaggaggagtacttgcaggtggatctacaacgactgcacctggtggctctggtgggcacccagggacggcatgccgggggcctgggcaaggagttctcccggagctaccggctgcgttactcccgggatggtcgccgctggatgggctggaaggaccgctggggtcaggaggtgatctcaggcaatgaggaccctgagggagtggtgctgaaggaccttgggccccccatggttgcccgactggttcgcttctacccccgggctgaccgggtcatgagcgtctgtctgcgggtagagctctatggctgcctctggagggatggactcctgtcttacaccgcccctgtggggcagacaatgtatttatctgaggccgtgtacctcaacgactccacctatgacggacataccgtgggcggactgcagtatgggggtctgggccagctggcagatggtgtggtggggctggatgactttaggaagagtcaggagctgcgggtctggccaggctatgactatgtgggatggagcaaccacagcttctccagtggctatgtggagatggagtttgagtttgaccggctgagggccttccaggctatgcaggtccactgtaacaacatgcacacgctgggagcccgtctgcctggcggggtggaatgtcgcttccggcgtggccctgccatggcctgggagggggagcccatgcgccacaacctagggggcaacctgggggaccccagagcccgggctgtctcagtgccccttggcggccgtgtggctcgctttctgcagtgccgcttcctctttgcggggccctggttactcttcagcgaaatctccttcatctctgatgtggtgaacaattcctctccggcactgggaggcaccttcccgccagccccctggtggccgcctggcccacctcccaccaacttcagcagcttggagctggagcccagaggccagcagcccgtggccaaggccgaggggagcccgaccgccatcctcatcggctgcctggtggccatcatcctgctcctgctgctcatcattgccctcatgctctggcggctgcactggcgcaggctcctcagcaaggctgaacggagggtgttggaagaggagctgacggttcacctctctgtccctggggacactatcctcatcaacaaccgcccaggtcctagagagccacccccgtaccaggagccccggcctcgtgggaatccgccccactctgctccctgtgtccccaatggctctgcctacagtggggactatatggagcctgagaagccaggcgccccgcttctgcccccacctccccagaacagcgtcccccattatgccgaggctgacattgttaccctgcagggcgtcaccgggggcaacacctatgctgtgcctgcactgcccccaggggcagtcggggatgggccccccagagtggatttccctcgatctcgactccgcttcaaggagaagcttggcgagggccagtttggggaggtgcacctgtgtgaggtcgacagccctcaagatctggtcagtcttgatttcccccttaatgtgcgtaagggacaccctttgctggtagctgtcaagatcttacggccagatgccaccaagaatgccaggaatgatttcctgaaagaggtgaagatcatgtcgaggctcaaggacccaaacatcattcggctgctgggcgtgtgtgtgcaggacgaccccctctgcatgattactgactacatggagaacggcgacctcaaccagttcctcagtgcccaccagctggaggacaaggcagccgagggggcccctggggacgggcaggctgcgcaggggcccaccatcagctacccaatgctgctgcatgtggcagcccagatcgcctccggcatgcgctatctggccacactcaactttgtacatcgggacctggccacgcggaactgcctagttggggaaaatttcaccatcaaaatcgcagactttggcatgagccggaacctctatgctggggactattaccgtgtgcagggccgggcagtgctgcccatccgctggatggcctgggagtgcatcctcatggggaagttcacgactgcgagtgacgtgtgggcctttggtgtgaccctgtgggaggtgctgatgctctgtagggcccagccctttgggcagctcaccgacgagcaggtcatcgagaacgcgggggagttcttccgggaccagggccggcaggtgtacctgtcccggccgcctgcctgcccgcagggcctatatgagctgatgcttcggtgctggagccgggagtctgagcagcgaccacccttttcccagctgcatcggttcctggcagaggatgcactcaacacggtgtgaatcacacatccagctgcccctccctcagggagcgatccaggggaagccagtgacactaaaacaagaggacacaatggcacctctgcccttcccctcccgacagcccatcacctctaatagaggcagtgagactgcaggtgggctgggcccacccagggagctgatgccccttctccccttcctggacacactctcatgtccccttcctgttcttccttcctagaagcccctgtcgcccacccagctggtcctgtggatgggatcctctccaccctcctctagccatcccttggggaagggtggggagaaatataggatagacactggacatggcccattggagcacctgggccccactggacaacactgattcctggagaggtggctgcgcccccagcttctctctccctgtcacacactggaccccactggctgagaatctgggggtgaggaagacaagaaggagaggaaaatgtttccttgtgcctgctcctgtacttgtcctcagcttgggcttcttcctcctccatcacctgaaacactggacctgggggtagccccgccccagccctcagtcacccccacttcccacttgcagtcttgtagctagaacttctctaagcctatacgtttctgtggagtaaatattgggattggggggaaagagggagcaacggcccatagccttggggttggacatctctagtgtagctgccacattgatttttctataatcacttggggtttgtacatttttggggggagagacacagatttttacactaatatatggacctagcttgaggcaattttaatcccctgcactaggcaggtaataataaaggttgagttttccacaa

SEQ ID NO: 1072 - DNA, 3678 bp, Homo sapiens
  source 1..3678: mol_type = genomic DNA
ctcccgacacccgagccccgccggcgcctcccgctcccggctcccggctcctggctccctccgcctcccccgcccctcgccccgccgccgaagaggccccgctcccgggtcggacgcctgggtctgccgggaagagcgatgagagagatgctgcccccacccccttaggcccgagggatcaggagctatgggaccagaggccctgtcatctttactgctgctgctcttggtggcaagtggagatgctgacatgaagggacattttgatcctgccaagtgccgctatgccctgggcatgcaggaccggaccatcccagacagtgacatctctgcttccagctcctggtcagattccactgccgcccgccacagcaggttggagagcagtgacggggatggggcctggtgccccgcagggtcggtgtttcccaaggaggaggagtacttgcaggtggatctacaacgactgcacctggtggctctggtgggcacccagggacggcatgccgggggcctgggcaaggagttctcccggagctaccggctgcgttactcccgggatggtcgccgctggatgggctggaaggaccgctggggtcaggaggtgatctcaggcaatgaggaccctgagggagtggtgctgaaggaccttgggccccccatggttgcccgactggttcgcttctacccccgggctgaccgggtcatgagcgtctgtctgcgggtagagctctatggctgcctctggagggatggactcctgtcttacaccgcccctgtggggcagacaatgtatttatctgaggccgtgtacctcaacgactccacctatgacggacataccgtgggcggactgcagtatgggggtctgggccagctggcagatggtgtggtggggctggatgactttaggaagagtcaggagctgcgggtctggccaggctatgactatgtgggatggagcaaccacagcttctccagtggctatgtggagatggagtttgagtttgaccggctgagggccttccaggctatgcaggtccactgtaacaacatgcacacgctgggagcccgtctgcctggcggggtggaatgtcgcttccggcgtggccctgccatggcctgggagggggagcccatgcgccacaacctagggggcaacctgggggaccccagagcccgggctgtctcagtgccccttggcggccgtgtggctcgctttctgcagtgccgcttcctctttgcggggccctggttactcttcagcgaaatctccttcatctctgatgtggtgaacaattcctctccggcactgggaggcaccttcccgccagccccctggtggccgcctggcccacctcccaccaacttcagcagcttggagctggagcccagaggccagcagcccgtggccaaggccgaggggagcccgaccgccatcctcatcggctgcctggtggccatcatcctgctcctgctgctcatcattgccctcatgctctggcggctgcactggcgcaggctcctcagcaaggctgaacggagggtgttggaagaggagctgacggttcacctctctgtccctggggacactatcctcatcaacaaccgcccaggtcctagagagccacccccgtaccaggagccccggcctcgtgggaatccgccccactctgctccctgtgtccccaatggctctgcctacagtggggactatatggagcctgagaagccaggcgccccgcttctgcccccacctccccagaacagcgtcccccattatgccgaggctgacattgttaccctgcagggcgtcaccgggggcaacacctatgctgtgcctgcactgcccccaggggcagtcggggatgggccccccagagtggatttccctcgatctcgactccgcttcaaggagaagcttggcgagggccagtttggggaggtgcacctgtgtgaggtcgacagccctcaagatctggtcagtcttgatttcccccttaatgtgcgtaagggacaccctttgctggtagctgtcaagatcttacggccagatgccaccaagaatgccaggaatgatttcctgaaagaggtgaagatcatgtcgaggctcaaggacccaaacatcattcggctgctgggcgtgtgtgtgcaggacgaccccctctgcatgattactgactacatggagaacggcgacctcaaccagttcctcagtgcccaccagctggaggacaaggcagccgagggggcccctggggacgggcaggctgcgcaggggcccaccatcagctacccaatgctgctgcatgtggcagcccagatcgcctccggcatgcgctatctggccacactcaactttgtacatcgggacctggccacgcggaactgcctagttggggaaaatttcaccatcaaaatcgcagactttggcatgagccggaacctctatgctggggactattaccgtgtgcagggccgggcagtgctgcccatccgctggatggcctgggagtgcatcctcatggggaagttcacgactgcgagtgacgtgtgggcctttggtgtgaccctgtgggaggtgctgatgctctgtagggcccagccctttgggcagctcaccgacgagcaggtcatcgagaacgcgggggagttcttccgggaccagggccggcaggtgtacctgtcccggccgcctgcctgcccgcagggcctatatgagctgatgcttcggtgctggagccgggagtctgagcagcgaccacccttttcccagctgcatcggttcctggcagaggatgcactcaacacggtgtgaatcacacatccagctgcccctccctcagggagcgatccaggggaagccagtgacactaaaacaagaggacacaatggcacctctgcccttcccctcccgacagcccatcacctctaatagaggcagtgagactgcaggtgggctgggcccacccagggagctgatgccccttctccccttcctggacacactctcatgtccccttcctgttcttccttcctagaagcccctgtcgcccacccagctggtcctgtggatgggatcctctccaccctcctctagccatcccttggggaagggtggggagaaatataggatagacactggacatggcccattggagcacctgggccccactggacaacactgattcctggagaggtggctgcgcccccagcttctctctccctgtcacacactggaccccactggctgagaatctgggggtgaggaagacaagaaggagaggaaaatgtttccttgtgcctgctcctgtacttgtcctcagcttgggcttcttcctcctccatcacctgaaacactggacctgggggtagccccgccccagccctcagtcacccccacttcccacttgcagtcttgtagctagaacttctctaagcctatacgtttctgtggagtaaatattgggattggggggaaagagggagcaacggcccatagccttggggttggacatctctagtgtagctgccacattgatttttctataatcacttggggtttgtacatttttggggggagagacacagatttttacactaatatatggacctagcttgaggcaattttaatcccctgcactaggcaggtaataataaaggttgagttttccacaa

SEQ ID NO: 1073 - DNA, 3968 bp, Homo sapiens
  source 1..3968: mol_type = genomic DNA
gaggaactgagaggagaaggagaagagagtgggcccgccttcagggtctggggccttccaggttgggtcgtaggggcgggagcgcacaggctgcgagagaggagcaaaggttggtggagggagaagagcagtctggggcctggctggacaggcccccgacagctgctctcgggagccgcctcccgacacccgagccccgccggcgcctcccgctcccggctcccggctcctggctccctccgcctcccccgcccctcgccccgccgccgaagaggccccgctcccgggtcggacgcctgggtctgccgggaagagcgatgagagagatgctgcccccacccccttaggcccgagggatcaggagctatgggaccagaggccctgtcatctttactgctgctgctcttggtggcaagtggagatgctgacatgaagggacattttgatcctgccaagtgccgctatgccctgggcatgcaggaccggaccatcccagacagtgacatctctgcttccagctcctggtcagattccactgccgcccgccacagcaggttggagagcagtgacggggatggggcctggtgccccgcagggtcggtgtttcccaaggaggaggagtacttgcaggtggatctacaacgactgcacctggtggctctggtgggcacccagggacggcatgccgggggcctgggcaaggagttctcccggagctaccggctgcgttactcccgggatggtcgccgctggatgggctggaaggaccgctggggtcaggaggtgatctcaggcaatgaggaccctgagggagtggtgctgaaggaccttgggccccccatggttgcccgactggttcgcttctacccccgggctgaccgggtcatgagcgtctgtctgcgggtagagctctatggctgcctctggagggatggactcctgtcttacaccgcccctgtggggcagacaatgtatttatctgaggccgtgtacctcaacgactccacctatgacggacataccgtgggcggactgcagtatgggggtctgggccagctggcagatggtgtggtggggctggatgactttaggaagagtcaggagctgcgggtctggccaggctatgactatgtgggatggagcaaccacagcttctccagtggctatgtggagatggagtttgagtttgaccggctgagggccttccaggctatgcaggtccactgtaacaacatgcacacgctgggagcccgtctgcctggcggggtggaatgtcgcttccggcgtggccctgccatggcctgggagggggagcccatgcgccacaacctagggggcaacctgggggaccccagagcccgggctgtctcagtgccccttggcggccgtgtggctcgctttctgcagtgccgcttcctctttgcggggccctggttactcttcagcgaaatctccttcatctctgatgtggtgaacaattcctctccggcactgggaggcaccttcccgccagccccctggtggccgcctggcccacctcccaccaacttcagcagcttggagctggagcccagaggccagcagcccgtggccaaggccgaggggagcccgaccgccatcctcatcggctgcctggtggccatcatcctgctcctgctgctcatcattgccctcatgctctggcggctgcactggcgcaggctcctcagcaaggctgaacggagggtgttggaagaggagctgacggttcacctctctgtccctggggacactatcctcatcaacaaccgcccaggtcctagagagccacccccgtaccaggagccccggcctcgtgggaatccgccccactctgctccctgtgtccccaatggctctgcgttgctgctctccaatccagcctaccgcctccttctggccacttacgcccgtccccctcgaggcccgggcccccccacacccgcctgggccaaacccaccaacacccaggcctacagtggggactatatggagcctgagaagccaggcgccccgcttctgcccccacctccccagaacagcgtcccccattatgccgaggctgacattgttaccctgcagggcgtcaccgggggcaacacctatgctgtgcctgcactgcccccaggggcagtcggggatgggccccccagagtggatttccctcgatctcgactccgcttcaaggagaagcttggcgagggccagtttggggaggtgcacctgtgtgaggtcgacagccctcaagatctggtcagtcttgatttcccccttaatgtgcgtaagggacaccctttgctggtagctgtcaagatcttacggccagatgccaccaagaatgccaggaatgatttcctgaaagaggtgaagatcatgtcgaggctcaaggacccaaacatcattcggctgctgggcgtgtgtgtgcaggacgaccccctctgcatgattactgactacatggagaacggcgacctcaaccagttcctcagtgcccaccagctggaggacaaggcagccgagggggcccctggggacgggcaggctgcgcaggggcccaccatcagctacccaatgctgctgcatgtggcagcccagatcgcctccggcatgcgctatctggccacactcaactttgtacatcgggacctggccacgcggaactgcctagttggggaaaatttcaccatcaaaatcgcagactttggcatgagccggaacctctatgctggggactattaccgtgtgcagggccgggcagtgctgcccatccgctggatggcctgggagtgcatcctcatggggaagttcacgactgcgagtgacgtgtgggcctttggtgtgaccctgtgggaggtgctgatgctctgtagggcccagccctttgggcagctcaccgacgagcaggtcatcgagaacgcgggggagttcttccgggaccagggccggcaggtgtacctgtcccggccgcctgcctgcccgcagggcctatatgagctgatgcttcggtgctggagccgggagtctgagcagcgaccacccttttcccagctgcatcggttcctggcagaggatgcactcaacacggtgtgaatcacacatccagctgcccctccctcagggagcgatccaggggaagccagtgacactaaaacaagaggacacaatggcacctctgcccttcccctcccgacagcccatcacctctaatagaggcagtgagactgcaggtgggctgggcccacccagggagctgatgccccttctccccttcctggacacactctcatgtccccttcctgttcttccttcctagaagcccctgtcgcccacccagctggtcctgtggatgggatcctctccaccctcctctagccatcccttggggaagggtggggagaaatataggatagacactggacatggcccattggagcacctgggccccactggacaacactgattcctggagaggtggctgcgcccccagcttctctctccctgtcacacactggaccccactggctgagaatctgggggtgaggaagacaagaaggagaggaaaatgtttccttgtgcctgctcctgtacttgtcctcagcttgggcttcttcctcctccatcacctgaaacactggacctgggggtagccccgccccagccctcagtcacccccacttcccacttgcagtcttgtagctagaacttctctaagcctatacgtttctgtggagtaaatattgggattggggggaaagagggagcaacggcccatagccttggggttggacatctctagtgtagctgccacattgatttttctataatcacttggggtttgtacatttttggggggagagacacagatttttacactaatatatggacctagcttgaggcaattttaatcccctgcactaggcaggtaataataaaggttgagttttccacaa

SEQ ID NO: 1074 - DNA, 560 bp, Homo sapiens; identical to SEQ ID NO: 1070
  source 1..560: mol_type = genomic DNA

SEQ ID NO: 1075 - DNA, 3832 bp, Homo sapiens; identical to SEQ ID NO: 826
  source 1..3832: mol_type = genomic DNA

SEQ ID NO: 1076 - DNA, 3678 bp, Homo sapiens
  source 1..3678: mol_type = genomic DNA
ctcccgacacccgagccccgccggcgcctcccgctcccggctcccggctcctggctccctccgcctcccccgcccctcgccccgccgccgaagaggccccgctcccgggtcggacgcctgggtctgccgggaagagcgatgagagagatgctgcccccacccccttaggcccgagggatcaggagctatgggaccagaggccctgtcatctttactgctgctgctcttggtggcaagtggagatgctgacatgaagggacattttgatcctgccaagtgccgctatgccctgggcatgcaggaccggaccatcccagacagtgacatctctgcttccagctcctggtcagattccactgccgcccgccacagcaggttggagagcagtgacggggatggggcctggtgccccgcagggtcggtgtttcccaaggaggaggagtacttgcaggtggatctacaacgactgcacctggtggctctggtgggcacccagggacggcatgccgggggcctgggcaaggagttctcccggagctaccggctgcgttactcccgggatggtcgccgctggatgggctggaaggaccgctggggtcaggaggtgatctcaggcaatgaggaccctgagggagtggtgctgaaggaccttgggccccccatggttgcccgactggttcgcttctacccccgggctgaccgggtcatgagcgtctgtctgcgggtagagctctatggctgcctctggagggatggactcctgtcttacaccgcccctgtggggcagacaatgtatttatctgaggccgtgtacctcaacgactccacctatgacggacataccgtgggcggactgcagtatgggggtctgggccagctggcagatggtgtggtggggctggatgactttaggaagagtcaggagctgcgggtctggccaggctatgactatgtgggatggagcaaccacagcttctccagtggctatgtggagatggagtttgagtttgaccggctgagggccttccaggctatgcaggtccactgtaacaacatgcacacgctgggagcccgtctgcctggcggggtggaatgtcgcttccggcgtggccctgccatggcctgggagggggagcccatgcgccacaacctagggggcaacctgggggaccccagagcccgggctgtctcagtgccccttggcggccgtgtggctcgctttctgcagtgccgcttcctctttgcggggccctggttactcttcagcgaaatctccttcatctctgatgtggtgaacaattcctctccggcactgggaggcaccttcccgccagccccctggtggccgcctggcccacctcccaccaacttcagcagcttggagctggagcccagaggccagcagcccgtggccaaggccgaggggagcccgaccgccatcctcatcggctgcctggtggccatcatcctgctcctgctgctcatcattgccctcatgctctggcggctgcactggcgcaggctcctcagcaaggctgaacggagggtgttggaagaggagctgacggttcacctctctgtccctggggacactatcctcatcaacaaccgcccaggtcctagagagccacccccgtaccaggagccccggcctcgtgggaatccgccccactccgctccctgtgtccccaatggctctgcctacagtggggactatatggagcctgagaagccaggcgccccgcttctgcccccacctccccagaacagcgtcccccattatgccgaggctgacattgttaccctgcagggcgtcaccgggggcaacacctatgctgtgcctgcactgcccccaggggcagtcggggatgggccccccagagtggatttccctcgatctcgactccgcttcaaggagaagcttggcgagggccagtttggggaggtgcacctgtgtgaggtcgacagccctcaagatctggttagtcttgatttcccccttaatgtgcgtaagggacaccctttgctggtagctgtcaagatcttacggccagatgccaccaagaatgccaggaatgatttcctgaaagaggtgaagatcatgtcgaggctcaaggacccaaacatcattcggctgctgggcgtgtgtgtgcaggacgaccccctctgcatgattactgactacatggagaacggcgacctcaaccagttcctcagtgcccaccagctggaggacaaggcagccgagggggcccctggggacgggcaggctgcgcaggggcccaccatcagctacccaatgctgctgcatgtggcagcccagatcgcctccggcatgcgctatctggccacactcaactttgtacatcgggacctggccacgcggaactgcctagttggggaaaatttcaccatcaaaatcgcagactttggcatgagccggaacctctatgctggggactattaccgtgtgcagggccgggcagtgctgcccatccgctggatggcctgggagtgcatcctcatggggaagttcacgactgcgagtgacgtgtgggcctttggtgtgaccctgtgggaggtgctgatgctctgtagggcccagccctttgggcagctcaccgacgagcaggtcatcgagaacgcgggggagttcttccgggaccagggccggcaggtgtacctgtcccggccgcctgcctgcccgcagggcctatatgagctgatgcttcggtgctggagccgggagtctgagcagcgaccacccttttcccagctgcatcggttcctggcagaggatgcactcaacacggtgtgaatcacacatccagctgcccctccctcagggagcgatccaggggaagccagtgacactaaaacaagaggacacaatggcacctctgcccttcccctcccgacagcccatcacctctaatagaggcagtgagactgcaggtgggctgggcccacccagggagctgatgccccttctccccttcctggacacactctcatgtccccttcctgttcttccttcctagaagcccctgtcgcccacccagctggtcctgtggatgggatcctctccaccctcctctagccatcccttggggaagggtggggagaaatataggatagacactggacatggcccattggagcacctgggccccactggacaacactgattcctggagaggtggctgcgcccccagcttctctctccctgtcacacactggaccccactggctgagaatctgggggtgaggaggacaagaaggagaggaaaatgtttccttgtgcctgctcctgtacttgtcctcagcttgggcttcttcctcctccatcacctgaaacactggacctgggggtagccccgccccagccctcagtcacccccacttcccacttgcagtcttgtagctagaacttctctaagcctatacgtttctgtggagtaaatattgggattggggggaaagagggagcaacggcccatagccttggggttggacatctctagtgtagctgccacattgatttttctataatcacttggggtttgtacatttttggggggagagacacagatttttacactaatatatggacctagcttgaggcaattttaatcccctgcactaggcaggtaataataaaggttgagttttccacaa

SEQ ID NO: 1077 - DNA, 3845 bp, Homo sapiens
  source 1..3845: mol_type = genomic DNA
gatcccagaagtaggaggggcgtcttcccctcgtgggccctgagcgggactgcagccagccccctggggcgccagctttggaggcccccgacagctgctctcgggagccgcctcccgacacccgagccccgccggcgcctcccgctcccggctcccggctcctggctccctccgcctcccccgcccctcgccccgccgccgaagaggccccgctcccgggtcggacgcctgggtctgccgggaagagcgatgagaggtgtctgaaggtggctattcactgagcgatggggttggacttgaaggaatgccaagagatgctgcccccacccccttaggcccgagggatcaggagctatgggaccagaggccctgtcatctttactgctgctgctcttggtggcaagtggagatgctgacatgaagggacattttgatcctgccaagtgccgctatgccctgggcatgcaggaccggaccatcccagacagtgacatctctgcttccagctcctggtcagattccactgccgcccgccacagcaggttggagagcagtgacggggatggggcctggtgccccgcagggtcggtgtttcccaaggaggaggagtacttgcaggtggatctacaacgactgcacctggtggctctggtgggcacccagggacggcatgccgggggcctgggcaaggagttctcccggagctaccggctgcgttactcccgggatggtcgccgctggatgggctggaaggaccgctggggtcaggaggtgatctcaggcaatgaggaccctgagggagtggtgctgaaggaccttgggccccccatggttgcccgactggttcgcttctacccccgggctgaccgggtcatgagcgtctgtctgcgggtagagctctatggctgcctctggagggatggactcctgtcttacaccgcccctgtggggcagacaatgtatttatctgaggccgtgtacctcaacgactccacctatgacggacataccgtgggcggactgcagtatgggggtctgggccagctggcagatggtgtggtggggctggatgactttaggaagagtcaggagctgcgggtctggccaggctatgactatgtgggatggagcaaccacagcttctccagtggctatgtggagatggagtttgagtttgaccggctgagggccttccaggctatgcaggtccactgtaacaacatgcacacgctgggagcccgtctgcctggcggggtggaatgtcgcttccggcgtggccctgccatggcctgggagggggagcccatgcgccacaacctagggggcaacctgggggaccccagagcccgggctgtctcagtgccccttggcggccgtgtggctcgctttctgcagtgccgcttcctctttgcggggccctggttactcttcagcgaaatctccttcatctctgatgtggtgaacaattcctctccggcactgggaggcaccttcccgccagccccctggtggccgcctggcccacctcccaccaacttcagcagcttggagctggagcccagaggccagcagcccgtggccaaggccgaggggagcccgaccgccatcctcatcggctgcctggtggccatcatcctgctcctgctgctcatcattgccctcatgctctggcggctgcactggcgcaggctcctcagcaaggctgaacggagggtgttggaagaggagctgacggttcacctctctgtccctggggacactatcctcatcaacaaccgcccaggtcctagagagccacccccgtaccaggagccccggcctcgtgggaatccgccccactccgctccctgtgtccccaatggctctgcctacagtggggactatatggagcctgagaagccaggcgccccgcttctgcccccacctccccagaacagcgtcccccattatgccgaggctgacattgttaccctgcagggcgtcaccgggggcaacacctatgctgtgcctgcactgcccccaggggcagtcggggatgggccccccagagtggatttccctcgatctcgactccgcttcaaggagaagcttggcgagggccagtttggggaggtgcacctgtgtgaggtcgacagccctcaagatctggttagtcttgatttcccccttaatgtgcgtaagggacaccctttgctggtagctgtcaagatcttacggccagatgccaccaagaatgccaggaatgatttcctgaaagaggtgaagatcatgtcgaggctcaaggacccaaacatcattcggctgctgggcgtgtgtgtgcaggacgaccccctctgcatgattactgactacatggagaacggcgacctcaaccagttcctcagtgcccaccagctggaggacaaggcagccgagggggcccctggggacgggcaggctgcgcaggggcccaccatcagctacccaatgctgctgcatgtggcagcccagatcgcctccggcatgcgctatctggccacactcaactttgtacatcgggacctggccacgcggaactgcctagttggggaaaatttcaccatcaaaatcgcagactttggcatgagccggaacctctatgctggggactattaccgtgtgcagggccgggcagtgctgcccatccgctggatggcctgggagtgcatcctcatggggaagttcacgactgcgagtgacgtgtgggcctttggtgtgaccctgtgggaggtgctgatgctctgtagggcccagccctttgggcagctcaccgacgagcaggtcatcgagaacgcgggggagttcttccgggaccagggccggcaggtgtacctgtcccggccgcctgcctgcccgcagggcctatatgagctgatgcttcggtgctggagccgggagtctgagcagcgaccacccttttcccagctgcatcggttcctggcagaggatgcactcaacacggtgtgaatcacacatccagctgcccctccctcagggagcgatccaggggaagccagtgacactaaaacaagaggacacaatggcacctctgcccttcccctcccgacagcccatcacctctaatagaggcagtgagactgcaggtgggctgggcccacccagggagctgatgccccttctccccttcctggacacactctcatgtccccttcctgttcttccttcctagaagcccctgtcgcccacccagctggtcctgtggatgggatcctctccaccctcctctagccatcccttggggaagggtggggagaaatataggatagacactggacatggcccattggagcacctgggccccactggacaacactgattcctggagaggtggctgcgcccccagcttctctctccctgtcacacactggaccccactggctgagaatctgggggtgaggaggacaagaaggagaggaaaatgtttccttgtgcctgctcctgtacttgtcctcagcttgggcttcttcctcctccatcacctgaaacactggacctgggggtagccccgccccagccctcagtcacccccacttcccacttgcagtcttgtagctagaacttctctaagcctatacgtttctgtggagtaaatattgggattggggggaaagagggagcaacggcccatagccttggggttggacatctctagtgtagctgccacattgatttttctataatcacttggggtttgtacatttttggggggagagacacagatttttacactaatatatggacctagcttgaggcaattttaatcccctgcactaggcaggtaataataaaggttgagttttccacaa

SEQ ID NO: 1078 - DNA, 3968 bp, Homo sapiens
  source 1..3968: mol_type = genomic DNA
gaggaactgagaggagaaggagaagagagtgggcccgccttcagggtctggggccttccaggttgggtcgtaggggcgggagcgcacaggctgcgagagaggagcaaaggttggtggagggagaagagcagtctggggcctggctggacaggcccccgacagctgctctcgggagccgcctcccgacacccgagccccgccggcgcctcccgctcccggctcccggctcctggctccctccgcctcccccgcccctcgccccgccgccgaagaggccccgctcccgggtcggacgcctgggtctgccgggaagagcgatgagagagatgctgcccccacccccttaggcccgagggatcaggagctatgggaccagaggccctgtcatctttactgctgctgctcttggtggcaagtggagatgctgacatgaagggacattttgatcctgccaagtgccgctatgccctgggcatgcaggaccggaccatcccagacagtgacatctctgcttccagctcctggtcagattccactgccgcccgccacagcaggttggagagcagtgacggggatggggcctggtgccccgcagggtcggtgtttcccaaggaggaggagtacttgcaggtggatctacaacgactgcacctggtggctctggtgggcacccagggacggcatgccgggggcctgggcaaggagttctcccggagctaccggctgcgttactcccgggatggtcgccgctggatgggctggaaggaccgctggggtcaggaggtgatctcaggcaatgaggaccctgagggagtggtgctgaaggaccttgggccccccatggttgcccgactggttcgcttctacccccgggctgaccgggtcatgagcgtctgtctgcgggtagagctctatggctgcctctggagggatggactcctgtcttacaccgcccctgtggggcagacaatgtatttatctgaggccgtgtacctcaacgactccacctatgacggacataccgtgggcggactgcagtatgggggtctgggccagctggcagatggtgtggtggggctggatgactttaggaagagtcaggagctgcgggtctggccaggctatgactatgtgggatggagcaaccacagcttctccagtggctatgtggagatggagtttgagtttgaccggctgagggccttccaggctatgcaggtccactgtaacaacatgcacacgctgggagcccgtctgcctggcggggtggaatgtcgcttccggcgtggccctgccatggcctgggagggggagcccatgcgccacaacctagggggcaacctgggggaccccagagcccgggctgtctcagtgccccttggcggccgtgtggctcgctttctgcagtgccgcttcctctttgcggggccctggttactcttcagcgaaatctccttcatctctgatgtggtgaacaattcctctccggcactgggaggcaccttcccgccagccccctggtggccgcctggcccacctcccaccaacttcagcagcttggagctggagcccagaggccagcagcccgtggccaaggccgaggggagcccgaccgccatcctcatcggctgcctggtggccatcatcctgctcctgctgctcatcattgccctcatgctctggcggctgcactggcgcaggctcctcagcaaggctgaacggagggtgttggaagaggagctgacggttcacctctctgtccctggggacactatcctcatcaacaaccgcccaggtcctagagagccacccccgtaccaggagccccggcctcgtgggaatccgccccactccgctccctgtgtccccaatggctctgcgttgctgctctccaatccagcctaccgcctccttctggccacttacgcccgtccccctcgaggcccgggcccccccacacccgcctgggccaaacccaccaacacccaggcctacagtggggactatatggagcctgagaagccaggcgccccgcttctgcccccacctccccagaacagcgtcccccattatgccgaggctgacattgttaccctgcagggcgtcaccgggggcaacacctatgctgtgcctgcactgcccccaggggcagtcggggatgggccccccagagtggatttccctcgatctcgactccgcttcaaggagaagcttggcgagggccagtttggggaggtgcacctgtgtgaggtcgacagccctcaagatctggttagtcttgatttcccccttaatgtgcgtaagggacaccctttgctggtagctgtcaagatcttacggccagatgccaccaagaatgccaggaatgatttcctgaaagaggtgaagatcatgtcgaggctcaaggacccaaacatcattcggctgctgggcgtgtgtgtgcaggacgaccccctctgcatgattactgactacatggagaacggcgacctcaaccagttcctcagtgcccaccagctggaggacaaggcagccgagggggcccctggggacgggcaggctgcgcaggggcccaccatcagctacccaatgctgctgcatgtggcagcccagatcgcctccggcatgcgctatctggccacactcaactttgtacatcgggacctggccacgcggaactgcctagttggggaaaatttcaccatcaaaatcgcagactttggcatgagccggaacctctatgctggggactattaccgtgtgcagggccgggcagtgctgcccatccgctggatggcctgggagtgcatcctcatggggaagttcacgactgcgagtgacgtgtgggcctttggtgtgaccctgtgggaggtgctgatgctctgtagggcccagccctttgggcagctcaccgacgagcaggtcatcgagaacgcgggggagttcttccgggaccagggccggcaggtgtacctgtcccggccgcctgcctgcccgcagggcctatatgagctgatgcttcggtgctggagccgggagtctgagcagcgaccacccttttcccagctgcatcggttcctggcagaggatgcactcaacacggtgtgaatcacacatccagctgcccctccctcagggagcgatccaggggaagccagtgacactaaaacaagaggacacaatggcacctctgcccttcccctcccgacagcccatcacctctaatagaggcagtgagactgcaggtgggctgggcccacccagggagctgatgccccttctccccttcctggacacactctcatgtccccttcctgttcttccttcctagaagcccctgtcgcccacccagctggtcctgtggatgggatcctctccaccctcctctagccatcccttggggaagggtggggagaaatataggatagacactggacatggcccattggagcacctgggccccactggacaacactgattcctggagaggtggctgcgcccccagcttctctctccctgtcacacactggaccccactggctgagaatctgggggtgaggaggacaagaaggagaggaaaatgtttccttgtgcctgctcctgtacttgtcctcagcttgggcttcttcctcctccatcacctgaaacactggacctgggggtagccccgccccagccctcagtcacccccacttcccacttgcagtcttgtagctagaacttctctaagcctatacgtttctgtggagtaaatattgggattggggggaaagagggagcaacggcccatagccttggggttggacatctctagtgtagctgccacattgatttttctataatcacttggggtttgtacatttttggggggagagacacagatttttacactaatatatggacctagcttgaggcaattttaatcccctgcactaggcaggtaataataaaggttgagttttccacaa

SEQ ID NO: 1079 - DNA, 3971 bp, Homo sapiens
  source 1..3971: mol_type = genomic DNA
gacgctcggacaaagccaggcagcgttggcagccccagacccgaccccaaaggcctgagactggggtgactgggacctaagagaatcctgagctggaggcccccgacagctgctctcgggagccgcctcccgacacccgagccccgccggcgcctcccgctcccggctcccggctcctggctccctccgcctcccccgcccctcgccccgccgccgaagaggccccgctcccgggtcggacgcctgggtctgccgggaagagcgatgagaggtgtctgaaggtggctattcactgagcgatggggttggacttgaaggaatgccaagagatgctgcccccacccccttaggcccgagggatcaggagctatgggaccagaggccctgtcatctttactgctgctgctcttggtggcaagtggagatgctgacatgaagggacattttgatcctgccaagtgccgctatgccctgggcatgcaggaccggaccatcccagacagtgacatctctgcttccagctcctggtcagattccactgccgcccgccacagcaggttggagagcagtgacggggatggggcctggtgccccgcagggtcggtgtttcccaaggaggaggagtacttgcaggtggatctacaacgactgcacctggtggctctggtgggcacccagggacggcatgccgggggcctgggcaaggagttctcccggagctaccggctgcgttactcccgggatggtcgccgctggatgggctggaaggaccgctggggtcaggaggtgatctcaggcaatgaggaccctgagggagtggtgctgaaggaccttgggccccccatggttgcccgactggttcgcttctacccccgggctgaccgggtcatgagcgtctgtctgcgggtagagctctatggctgcctctggagggatggactcctgtcttacaccgcccctgtggggcagacaatgtatttatctgaggccgtgtacctcaacgactccacctatgacggacataccgtgggcggactgcagtatgggggtctgggccagctggcagatggtgtggtggggctggatgactttaggaagagtcaggagctgcgggtctggccaggctatgactatgtgggatggagcaaccacagcttctccagtggctatgtggagatggagtttgagtttgaccggctgagggccttccaggctatgcaggtccactgtaacaacatgcacacgctgggagcccgtctgcctggcggggtggaatgtcgcttccggcgtggccctgccatggcctgggagggggagcccatgcgccacaacctagggggcaacctgggggaccccagagcccgggctgtctcagtgccccttggcggccgtgtggctcgctttctgcagtgccgcttcctctttgcggggccctggttactcttcagcgaaatctccttcatctctgatgtggtgaacaattcctctccggcactgggaggcaccttcccgccagccccctggtggccgcctggcccacctcccaccaacttcagcagcttggagctggagcccagaggccagcagcccgtggccaaggccgaggggagcccgaccgccatcctcatcggctgcctggtggccatcatcctgctcctgctgctcatcattgccctcatgctctggcggctgcactggcgcaggctcctcagcaaggctgaacggagggtgttggaagaggagctgacggttcacctctctgtccctggggacactatcctcatcaacaaccgcccaggtcctagagagccacccccgtaccaggagccccggcctcgtgggaatccgccccactccgctccctgtgtccccaatggctctgcgttgctgctctccaatccagcctaccgcctccttctggccacttacgcccgtccccctcgaggcccgggcccccccacacccgcctgggccaaacccaccaacacccaggcctacagtggggactatatggagcctgagaagccaggcgccccgcttctgcccccacctccccagaacagcgtcccccattatgccgaggctgacattgttaccctgcagggcgtcaccgggggcaacacctatgctgtgcctgcactgcccccaggggcagtcggggatgggccccccagagtggatttccctcgatctcgactccgcttcaaggagaagcttggcgagggccagtttggggaggtgcacctgtgtgaggtcgacagccctcaagatctggttagtcttgatttcccccttaatgtgcgtaagggacaccctttgctggtagctgtcaagatcttacggccagatgccaccaagaatgccaggaatgatttcctgaaagaggtgaagatcatgtcgaggctcaaggacccaaacatcattcggctgctgggcgtgtgtgtgcaggacgaccccctctgcatgattactgactacatggagaacggcgacctcaaccagttcctcagtgcccaccagctggaggacaaggcagccgagggggcccctggggacgggcaggctgcgcaggggcccaccatcagctacccaatgctgctgcatgtggcagcccagatcgcctccggcatgcgctatctggccacactcaactttgtacatcgggacctggccacgcggaactgcctagttggggaaaatttcaccatcaaaatcgcagactttggcatgagccggaacctctatgctggggactattaccgtgtgcagggccgggcagtgctgcccatccgctggatggcctgggagtgcatcctcatggggaagttcacgactgcgagtgacgtgtgggcctttggtgtgaccctgtgggaggtgctgatgctctgtagggcccagccctttgggcagctcaccgacgagcaggtcatcgagaacgcgggggagttcttccgggaccagggccggcaggtgtacctgtcccggccgcctgcctgcccgcagggcctatatgagctgatgcttcggtgctggagccgggagtctgagcagcgaccacccttttcccagctgcatcggttcctggcagaggatgcactcaacacggtgtgaatcacacatccagctgcccctccctcagggagcgatccaggggaagccagtgacactaaaacaagaggacacaatggcacctctgcccttcccctcccgacagcccatcacctctaatagaggcagtgagactgcaggtgggctgggcccacccagggagctgatgccccttctccccttcctggacacactctcatgtccccttcctgttcttccttcctagaagcccctgtcgcccacccagctggtcctgtggatgggatcctctccaccctcctctagccatcccttggggaagggtggggagaaatataggatagacactggacatggcccattggagcacctgggccccactggacaacactgattcctggagaggtggctgcgcccccagcttctctctccctgtcacacactggaccccactggctgagaatctgggggtgaggaggacaagaaggagaggaaaatgtttccttgtgcctgctcctgtacttgtcctcagcttgggcttcttcctcctccatcacctgaaacactggacctgggggtagccccgccccagccctcagtcacccccacttcccacttgcagtcttgtagctagaacttctctaagcctatacgtttctgtggagtaaatattgggattggggggaaagagggagcaacggcccatagccttggggttggacatctctagtgtagctgccacattgatttttctataatcacttggggtttgtacatttttggggggagagacacagatttttacactaatatatggacctagcttgaggcaattttaatcccctgcactaggcaggtaataataaaggttgagttttccacaa

SEQ ID NO: 1080 - DNA, 309 bp, Homo sapiens
  source 1..309: mol_type = genomic DNA
atgtcagtcatgaagccctgtttaatgaccattgccatccttatgatcctggctcaaaagactccaggtggcctgttcagatcccacaatggcaagagccgagagccttggaatccatgtgagctttaccaaggcatgtgcagaaacgcctgcagagaatatgaaatccaatacttaacctgcccaaatgatcaaaagtgctgcctgaaactttctgtgaaaataaccagttctaaaaatgtgaaggaggattacgactctaactccaacttgtcagttacaaacagttcaagctactctcacatttga

SEQ ID NO: 1081 - DNA, 267 bp, Homo sapiens
  source 1..267: mol_type = genomic DNA
atgctgccagatcatttctcacccctctcaggagacattaaactctctgtcctggccttagttgtccttgtggtcctggctcagactgccccagatggatggatcagaaggtgctattatggaactggcagatgcaggaaatcatgcaaagaaattgagaggaagaaagaaaaatgtggggaaaaacatatttgctgtgtccctaaagaaaaggataaactatcacacattcacgaccaaaaagagacaagtgagctatatatctag

SEQ ID NO: 1082 - DNA, 1936 bp, Homo sapiens
  source 1..1936: mol_type = genomic DNA
acctgcaggcccgggccgcggggttggtttccaccctggaggttgctgacaccctgtgccctcggctgacttccagccggtggcacagacgcctccagggggcagcactcaagcgcatcttaggaatgacagtaacagcgggaacatgaagccgccactcttggtgtttattgtgtgtctgctgtggttgaaagacagtcactgcgcacccacttggaaggacaaaactgctatcagtgaaaacctgaagagtttttctgaggtgggggagatagatgcagatgaagaggtgaagaaggctttgactggtattaagcaaatgaaaatcatgatggaaagaaaagagaaggaacacaccaatctaatgagcaccctgaagaaatgcagagaagaaaagcaggaggccctgaaacttctgaatgaagttcaagaacatctggaggaagaagaaaggctatgccgggagtctttggcagattcctggggtgaatgcaggtcttgcctggaaaataactgcatgagaatttatacaacctgccaacctagctggtcctctgtgaaaaataagattgaacggtttttcaggaagatatatcaatttctatttcctttccatgaagataatgaaaaagatctccccatcagtgaaaagctcattgaggaagatgcacaattgacccaaatggaggatgtgttcagccagttgactgtggatgtgaattctctctttaacaggagttttaacgtcttcagacagatgcagcaagagtttgaccagacttttcaatcacatttcatatcagatacagacctaactgagccttacttttttccagctttctctaaagagccgatgacaaaagcagatcttgagcaatgttgggacattcccaacttcttccagctgttttgtaatttcagtgtctctatttatgaaagtgtcagtgaaacaattactaagatgctgaaggcaatagaagatttaccaaaacaagacaaagctcctgaccacggaggcctgatttcaaagatgttacctgggcaggacagaggactgtgtggggaacttgaccagaatttgtcaagatgtttcaaatttcatgaaaaatgccaaaaatgtcaggctcacctatctgaagactgtcctgatgtacctgctctgcacacagaattagacgaggcgatcaggttggtcaatgtatccaatcagcagtatggccagattctccagatgacccggaagcacttggaggacaccgcctatctggtggagaagatgagagggcaatttggctgggtgtctgaactggcaaaccaggccccagaaacagagatcatctttaattcaatacaggtagttccaaggattcatgaaggaaatatttccaaacaagatgaaacaatgatgacagacttaagcattctgccttcctctaatttcacactcaagatccctcttgaagaaagtgctgagagttctaacttcattggctacgtagtggcaaaagctctacagcattttaaggaacattttaaaacctggtaagaagatctaatgcatcctatatccagtaagtagaattatctcttcatctgggacctggaaatcctgaaataaaaaaggataatgcaataaacacagttgcaggaaagtatgttagctatatactatgaagtactcttagtttacttatgttgaatggcttagctattaatactcaaattgagttaaaatgaaaattcctccttaaaaaatcaaacgtaatatgtattacatttcatggtacattagtagttctttgtatattgaataaatactaaatcacctaggtgtctatgttctatcacatctacaaacatgtcacttcctaattaacaaaatgttcttcctttagtttgcttttgcacttaaaatatatataattgacttttttgg

SEQ ID NO: 1083 - DNA, 441 bp, Homo sapiens
  source 1..441: mol_type = genomic DNA
ccctggggaagagaagctgagaggaactcctcactcagctagcttcaggagccatgacatcatctctaccatggaaattccactcactctcctgtgcccccacatttgtcctaggcctcagagtccctataaagagagattcccaactcagtatcagcacaggacacagctaggttctgaagcttctgagttctgcagcctcacctctgagaaaacctctttgccaccaataccatgaagctctgcgtgactgtcctgtctctcctcgtgctagtagctgccttctgctctctagcactctcagcaccaactaaatccagtgagtggaagttacagggagtctgcttccagtgctgctccgggaaggatcccatccaccagagctgccccacatggaccatggtcaggcagaggaagatgcctaccacaggcaagggataa

SEQ ID NO: 1084 - DNA, 458 bp, Homo sapiens
  source 1..458: mol_type = genomic DNA
caacagaagccaagaaggaagccgtctatcttgtggcgatcatgtataagctggcctcctgctgtttgcttttcataggattcttaaatcctctcttatctcttcctctccttgactccagggaaatatcctttcaactctcagcacctcatgaagacgcgcgcttaactccggaggagctagaaagagcttcccttctacagatactgccagagatgctgggtgcagaaagaggggatattctcaggaaagcagactcaagtaccaacatttttaacccaagaggaaatttgagaaagtttcaggatttctctggacaagatcctaacattttactgagtcatcttttggccagaatctggaaaccatacaagaaacagagaagaaagctgaggcaagatttaagattgtggaagaaagagcctggcttacgaatttttaaaaactatgtgtacatc

SEQ ID NO: 1085 - DNA, 2161 bp, Homo sapiens
  source 1..2161: mol_type = genomic DNA
ggatgggatttgtgatgcaggaaagcctaagggaaaaagaatattcattctgtgtggtgaaaattttttgaaaaaaaaattgccttcttcaaacaagggtgtcattctgatatttatgaggactgttgttctcactatgaaggcatctgttattgaaatgttccttgttttgctggtgactggagtacattcaaacaaagaaacggcaaagaagattaaaaggcccaagttcactgtgcctcagatcaactgcgatgtcaaagccggaaagatcatcgatcctgagttcattgtgaaatgtccagcaggatgccaagaccccaaataccatgtttatggcactgacgtgtatgcatcctactccagtgtgtgtggcgctgccgtacacagtggtgtgcttgataattcaggagggaaaatacttgttcggaaggttgctggacagtctggttacaaagggagttattccaacggtgtccaatcgttatccctaccacgatggagagaatcctttatcgtcttagaaagtaaacccaaaaagggtgtaacctacccatcagctcttacatactcatcatcgaaaagtccagctgcccaagcaggtgagaccacaaaagcctatcagaggccacctattccagggacaactgcacagccggtcactctgatgcagcttctggctgtcactgtagctgtggccacccccaccaccttgccaaggccatccccttctgctgcttctaccaccagcatccccagaccacaatcagtgggccacaggagccaggagatggatctctggtccactgccacctacacaagcagccaaaacaggcccagagctgatccaggtatccaaaggcaagatccttcaggagctgccttccagaaacctgttggagcggatgtcagcctggactgcaaaattgacttgtcgtttttaattgatgggagcaccagcattggcaaacggcgattccgaatccagaagcagctcctggctgatgttgcccaagctcttgacattggccctgccggtccactgatgggtgttgtccagtatggagacaaccctgctactcactttaacctcaagacacacacgaattctcgagatctgaagacagccatagagaaaattactcagagaggaggactttctaatgtaggtcgggccatctcctttgtgaccaagaacttcttttccaaagccaatggaaacagaagcggggctcccaatgtggtggtggtgatggtggatggctggcccacggacaaagtggaggaggcttcaagacttgcgagagagtcaggaatcaacattttcttcatcaccattgaaggtgctgctgaaaatgagaagcagtatgtggtggagcccaactttgcaaacaaggccgtgtgcagaacaaacggcttctactcgctccacgtgcagagctggtttggcctccacaagaccctgcagcctctggtgaagcgggtctgcgacactgaccgcctggcctgcagcaagacctgcttgaactcggctgacattggcttcgtcatcgacggctccagcagtgtggggacgggcaacttccgcaccgtcctccagtttgtgaccaacctcaccaaagagtttgagatttccgacacggacacgcgcatcggggccgtgcagtacacctacgaacagcggctggagtttgggttcgacaagtacagcagcaagcctgacatcctcaacgccatcaagagggtgggctactggagtggtggcaccagcacgggggctgccatcaacttcgccctggagcagctcttcaagaagtccaagcccaacaagaggaagttaatgatcctcatcaccgacgggaggtcctacgacgacgtccggatcccagccatggctgcccatctgaagggagtgatcacctatgcgataggcgttgcctgggctgcccaagaggagctagaagtcattgccactcaccccgccagagaccactccttctttgtggacgagtttgacaacctccatcagtatgtccccaggatcatccagaacatttgtacagagttcaactcacagcctcggaactgaattcagagcaggcagagcaccagcaagtgctgctttactaactgacgtgttggaccaccccaccgcttaatg

SEQ ID NO: 1086 - DNA, 4538 bp, Homo sapiens
  source 1..4538: mol_type = genomic DNA
atgcggcacggcgtcgcctgggcgctgctggtggccgcggccctggggcttggggcgcgcggggtgcgcggcgcggtggcccttgccgacttctacccgttcggcgccgagcgcggcgacgccgtcacccccaagcaggacgacggcggctcggggctgcggccgctctcggtgcccttcccgttcttcggtgccgagcactccggactctacgtgaacaacaacgggatcatctccttcctgaaggaggtttctcagttcaccccagtggccttccccattgccaaggaccgctgcgtggtggcagccttctgggcagatgtggacaaccggcgtgcaggcgacgtgtactaccgggaggccaccgacccagccatgctgcgccgagccacggaggacgtcaggcactacttccccgagctcctggacttcaatgccacctgggtttttgttgccacctggtaccgagtgaccttctttggaggcagttcctcatcccctgtcaacacattccagactgtgctcatcacagacggcaagctctccttcaccatcttcaactatgagtccatcgtgtggaccacaggcacacacgccagcagcgggggcaacgccactggcctcgggggcatcgcagcccaggctggcttcaacgcaggcgatgggcagcgttacttcagtatccccggctcgcgcacagcagacatggccgaggtggagaccaccaccaacgtgggtgtgcccgggcgctgggcgttcagaatcgatgatgcccaggtgcgcgtggggggctgcggccatacaacgtccgtgtgcctggccctgcgcccctgcctcaacggcggcaagtgcatcgacgactgcgtcacgggcaacccctcctacacctgctcctgcctctcgggcttcacggggcggaggtgccacctggacgtgaacgaatgtgcctcccagccctgtcagaatggtgggacctgtactcacggcatcaacagtttccgctgccagtgcccggctggctttgggggacccacctgtgagacagcccaatccccctgtgacaccaaagagtgtcaacatggtggccagtgccaggtggagaatggctctgcggtgtgtgtgtgccaggccggatacaccggagcagcctgcgagatggatgtggacgactgcagccctgacccctgcctgaatggaggctcttgtgttgacctagtggggaattacacctgcttgtgtgccgagcccttcaagggacttcgctgtgagacaggagaccatccagtgccagacgcctgcctctcggccccttgccacaatgggggcacctgtgtggatgcggaccagggctacgtgtgcgagtgccccgaaggcttcatgggcctggactgcagggagagagtccccgatgactgtgagtgccgcaacggaggcagatgcctgggcgccaacaccaccctctgccagtgccccctgggattctttgggcttctctgtgaatttgaaatcacagccatgccctgcaacatgaacacacagtgcccagatgggggctactgcatggagcacggcgggagctacctctgcgtctgccacaccgaccacaatgccagccactccctgccatcaccctgcgactcggacccctgcttcaacggaggctcctgcgatgcccatgacgactcctacacctgcgagtgcccgcgcgggttccacggcaagcactgcgagaaagcccggccacacctgtgcagctcagggccctgccggaacgggggcacgtgcaaggaggcgggcggcgagtaccactgcagctgcccctaccgcttcactgggaggcactgtgagatcgggaagccagactcgtgtgcctctggcccctgtcacaacggcggcacctgcttccactacattggcaaatacaagtgtgactgtcccccaggcttctccgggcggcactgcgagatagccccctccccctgcttccggagcccgtgtgtgaatgggggcacctgcgaggaccgggacacggatttcttctgccactgccaagcagggtacatgggacgccggtgccaggcagaggtggactgcggccccccggaggaggtgaagcacgccacactgcgcttcaacggcacgcggctgggcgcggtggccctgtatgcatgtgaccgtggctacagcctgagcgcccccagccgcatccgggtctgccagccacacggtgtctggagtgagcctccccagtgccttgaaatcgatgagtgccggtctcagccgtgcctgcatgggggctcttgtcaggaccgcgttgctgggtacctgtgcctctgcagcacaggctatgagggcgcccactgtgagctggagagggatgagtgccgagctcacccgtgcagaaatggagggtcctgcaggaacctcccaggggcctatgtctgccggtgccctgcaggcttcgttggagtccactgtgagacagaggtggacgcctgcgactccagcccctgccagcatggaggccggtgtgagagcggcggcggggcctacctgtgcgtctgcccagagagcttcttcggctaccactgcgagacagtgagtgacccctgcttctccagcccctgtgggggccgtggctattgcctggccagcaacggctcccacagctgcacctgcaaagtgggctacacgggcgaggactgcgccaaagagctcttcccaccgacggccctcaagatggagagagtggaggagagtggggtctctatctcctggaacccgcccaatggtccagccgccaggcagatgcttgatggctacgcggtcacctacgtctcctccgacggctcctaccgccgcacagactttgtggacaggacccgctcctcgcaccagctccaggccctggcggccggcagggcctacaacatctccgtcttctcagtgaagcgaaacagtaacaacaagaatgacatcagcaggcctgccgtgctgctggcccgcacgcgaccccgccctgtggaaggcttcgaggtcaccaatgtgacggctagcaccatctcagtgcagtgggccctgcacaggatccgccatgccaccgtcagtggggtccgtgtgtccatccgccaccctgaggccctcagggaccaggccaccgatgtggacaggagtgtggacaggttcacctttagggccctgctgcctgggaagaggtacaccatccagctgaccaccctcagtgggctcaggggagaggagcaccccacagagagcctggccaccgcgccgacgcacgtgtggacccggcccctgcctccagcaaacctgaccgccgcccgagtcactgccacctctgcccacgtggtctgggatgccccgactccaggcagcttgctggaggcttatgtcatcaatgtgaccaccagccagagcaccaagagccgctatgtccccaacgggaagctggcgtcctacacggtgcgcgacctgctgccgggacggcggtaccagctctctgtgatagcagtgcagagcacggagctcgggccgcagcacagcgagcccgcccacctctacatcatcacctcccccagggatggcgctgacagacgctggcaccagggaggacaccaccctcgggtgctcaagaacagaccgcccccggcgcgcctgccggagctgcgcctgctcaatgaccacagcgcccccgagacccccacccagccccccaggttctcggagcttgtggacggcagaggaagagtgagcgccaggttcggtggctcacccagcaaagcagccaccgtgagatcacaacccacagcctcggcgcagctcgagaacatggaggaagcccccaagcgggtcagcctggccctccagctccctgaacacggcagcaaggacatcggaagtgagtcagcagcgctggtggggactttgggactgactgactgctctcaggggccttagaggctgcaggcaggagggaccacccacggtgaggaatcaggaggcacagagcctacctgaggggaggctgagcaccaggcaccccggtgtgggaagatggggtgaagctacaccacccaagcagtgggaccccacagacgggaacaggccagggggcaggacccacccaaaccacccagagtctgagctagagagactggctttgatgctgcctcccctcccctctcctccttcgcctccacatgcagcagagcccaccccagcccctgcctctgggcccctcacccctcacttctccaaagaggagcaggcggagtcaggatgggagaagcagagggagcagccactgggcgagccccagcttgaggactagctgggccctgtggacactcaggttatgcaggacctgaactgtctcctagtccggggctctgcctcgtgaggatcgaggccagcacgtccctgcagggcaccaagcatctgctgagcacctgcagtaagagttcccagacgctcacgaggcagttccccttcgggcagcaccaatacatgtgtgttcctca

SEQ ID NO: 1087 - DNA, 3274 bp, Homo sapiens
  source 1..3274: mol_type = genomic DNA
agctgccaggtagctgaaagcaggcagccaggcagccgagacacttcccagcgattccagcctgggctccgcaggaagcctcgctgaatcccagccagctggttctaaccttccagaatcgcaatcccttctccccacagccagccctcgccaagcaagcagcaggatgtttgcagtgtcgcgcccagggctctgagactgagcctgccatccactcgcacgcctttctttcagggcttttcggctgttggctacactgatgtgacccccctccctttttggaatgatggggatctttttggtgtatgttggatttgttttcttttccgttttatatgtacaacaagggctttcttctcaagcaaaatttaccgagtttccgcggaacgtgacggcgaccgaggggcagaatgtggagatgtcctgcgccttccagagcggctccgcctcggtgtatctggagatccaatggtggttcctgcgggggccggaggacctggatcccggggccgagggggccggcgcgcaggtggagctcttgcccgacagagacccggacagcgacgggaccaagatcagcacagtgaaagtccaaggcaatgacatctcccacaagcttcagatttccaaagtgaggaaaaaggatgaaggcttatatgagtgcagggtgactgatgccaactacggggagcttcaggaacacaaggcccaggcctatctgaaagtcaatgccaacagccatgcccgcagaatgcaggccttcgaagcctcgcccatgtggctgcaggatatgaagccccgcaagaacgtctccgcagccatccccagcagcatccatggctctgccaaccaacgaacgcactccacctccagccctcaagtggtagccaaaatccccaaacaaagtccacaatcaggtatggaaacccatttcgagccttttattttaccactcacaaacgctccacagaaaggtcagtcgtatagagtagacagatttatgaatggtgatttttaaaatcggagacctagttcagtgcaagtgattatgagaggtgagcaccgagcctgcaccaattcactcagagctcaaagcatgtgggtgcaccccgtcagtcccctagtggtgcttcatttccagggcatctgagagctggactctggtttttatcctttctgtatttacacattataagaacaataaatcatgtaatgttggttacattacaaatgcatgttcattttctctacagatttatgtatcgataatgacccaaattaagaggctttcacttaatcaaaatgtaaatgagagagacatgccatatcatgcattttcagcgacccatagctctaagcaggactattctccaagggcttttgattttgaaggagaaacctcagctgcctgtgatgatgataatggaaggatggaggggggattgaagactgtaagtggtgcagagataaggcaactcctctgtgaatttgccttccaggccaatttagaagcttagtcacaggattctgaaggcagctgtgcaagttaaagctgttctgaatggcattaatgtatgcagtcattcagccaatggaaatgcgtggaagttttaaccttgatgtgggataaaggcttcgtggaatgagcagtaccctgcacaaccccgcggccgtcccgatttcctcaaacacgtgacatgggatgaagggagcacaaacatactgactttatccttctttaggtttttccctaaagaagtattgatgctaccatcagtaatggaaaattacattgctaatatttaaggtctcttcagccattaaattaaaaagtctgattacttcaccaggatgatttctgagatctcatctcatatcgtcctgaatacacacacacacacacacacacgcacacacacacacatctcagaaatcatcctaatcaaatatagactttatatatatcaaatatatatatacatgtagaaatacatataggtatgtatctttaagtccttgcttgtgaacaatgcttttaaatgtttttaaaatactgtatgccaaaataggttttctcttaatgctttacttcctaatggatgtgatttgcagatttgtagggcacttggattagggttctctgagtttgccctgccttataatgtagatgagcaactctcctggcatgccttggtcattgcaatttatgtcagtctgatgaacagatggcttagcctctctgaagcccaatgtgtgtggatttgtctaatttttttctttataatcttttctgcttaccaaattaaaggacaaactagtatagctggaacatatatgtgtgtatccatacacactaaacacacaggtatatgctaaattgtaatggtaaccaaatgatggttacaactttgtgactattatttgaggaagatttaatgtctttggagtgattttcccctctttcttcacattatcataaaagaagttagacactacaggcaagattacagagtagcctaagcagacaatttacaacctaattagcaagaactccaaatcatggaagtgaaattattattatcctacatagactgttccaagttagatgtcatcaatctgttcggcagaataaaatcaaacagattacctattccaagtgaagaattccaagggtagaatgaaatgctttatctatttctagaatgttttcttagcttttggggtttaataatgcaatctcaaaatatctatttattttattttaatatctcttagcgctgtgattagtgctaaatgataaactctagatctcttctaacaattatcaaataaaaattactgctctttttgcatcccattgccagccttgctgtcagattcaaaattgctttttctagagttaaaggtagaaggagagaaaaaagtgactcatgaagtctatattcattaaaagtcctgttcactaaacatatctgcttatatcaaagagtaacttgaaatatctgaaaatatttaatttcaatatttccaaccagtgaatactggataatatttttatatacttctatcaacattttctaatttcgatttcagaagctggggcagtccagtcactcactttacttatgtgtaagttcctatacttgcacaattattatatatgattcagtatctggggtggatatttatatattatattcactgtaatacccacatcctgatttatgatttttgcctcacgattttcagattatattcaaataaagcttatttc

SEQ ID NO: 1088 - DNA, 1371 bp, Homo sapiens
  source 1..1371: mol_type = genomic DNA
agctccggccccgaccggaagccccaccgcaccgtcagggacgcggactcgggagtgcgcacattcgcagcccgggcagccctgctgcgcaccgggcctcgcgccccgcgccccgcgccccgcgccccgcgccccgcaccggcctccaggatcatgtggtatgtcagcaccaggggcgtagccccacgggtcaactttgagggggccctcttctctggctatgcacctgacgggggcctctttatgcctgaagagctcccacagttggacagagggaccctgtgccagtggagcacactctcctatcctggcctggtgaaggagctgtgtgccctcttcattggctctgagctccttccaaaagatgaattaaatgatctgatcgaccgagccttcagcagattccgtcacagagaagtggtccatctgtccaggttgaggaatgggctgaacgtgttggagctgtggcatggcgtcacatatgcatttaaggacctgtccctgtcctgcacaacacagttcctgcagtacttcctggagaagagggagaagcacgtcactgtggttgtaggaacatctggggacacaggaagtgctgccattgagagtgttcaaggggcaaagaacatggacattatcgttctgctgcccaaaggtcactgcacaaagattcaggagctccagatgacaacggtgctgaagcagaacgtacatgtgtttggagtggagggaaacagcgatgagctcgatgagccgatcaagactgtgtttgccgatgtggcttttgtcaagaagcacaatctgatgagcctgaattcgatcaactggtcccgggtcctggtgcagatggcccatcacttctttgcttacttccagtgtacgccatccttggacacacatcccctacccctggtggaggtggttgtgccaacaggggctgccggtaaccttgcagctgggtacattgctcaaaagataggcctgcccatccgtctggtcgtggcagtgaaccgcaatgacatcatccacaggactgtccagcagggagacttctctctctctgaggctgttaaatcaaccttggcatcagctatggacattcaggtgccctacaacatggagagggtgttctggctgctctctggctctgacagccaggtgacaagagccctcatggagcagtttgaaaggacccaaagtgtgaatctgcccaaggaactgcacagcaagtgggagagacaggactacgaaaaaatggctgtaatggagtgtgatgggtgctgtgtggaactgtgccttggaaactgtgggcccagaagagggagcgtgacagatatcccagggacagccatggtcagaggtggtggctga

SEQ ID NO: 1089 - DNA, 1003 bp, Homo sapiens
  source 1..1003: mol_type = genomic DNA
agtgtgagaagcagtatgtgtgagcatgtgtgtgtgtgtatgtgtgtgggggggggtgtaaaatgtgtttttcaaagtactgagaggttgatgggactgttcgattagctcctctgagaagaagagaaaaggttcttggacctctccctgtttcttccttagaataatttggatgggatttgtgatgcaggaaagcctaagggaaaaagaatattcattctgtgtggtgaaaattttttgaaaaaaaaattgccttcttcaaacaagggtgtcattctgatatttatgaggactgttgttctcactatgaaggcatctgttattgaaatgttccttgttttgctggtgactggagtacattcaaacaaagaaacggcaaagaagattaaaaggcccaagttcactgtgcctcagatcaactgcgatgtcaaagccggaaagatcatcgatcctgagttcattgtgaaatgtccagcaggatgccaagaccccaaataccatgtttatggcactgacgtgtatgcatcctactccagtgtgtgtggcgctgccgtacacagtggtgtgcttgataattcaggagggaaaatacttgttcggaaggttgctggacagtctggttacaaagggagttattccaacggtgtccaatcgttatccctaccacgatggagagaatcctttatcgtcttagaaagtaaacccaaaaagggtgtaacctacccatcagctcttacatactcatcatcgaaaagtccagctgcccaagcagatctctggtccactgccacctacacaagcagccaaaacaggcccagagctgatccagttcagagacaaccctgctactcactttaacctcaagacacacacgaattctcgagatctgaagacagccatagagaaaattactcagagaggaggactttctaatgtaggtcgggccatctcctttgtgaccaagaacttcttttccaaagccaatggaaacagaagcggggct

SEQ ID NO: 1090 - DNA, 1508 bp, Homo sapiens
  source 1..1508: mol_type = genomic DNA
gggcccgggcgcggcggcggcggcggcggaggatggcgcgcgcggggcccgcacgtggaggccggcgcgggggcgcgggcagggccggctgctgagacgcgctgctgccccccgcgcgggcgccgcggcttcaatggcgccatcgcccaggaccggcagccggcaagatgcgaccgccctgcccagcatgtcctcaactttctgggcgttcatgatcctggccagcctgctcatcgcctactgcagtcagctggccgccggcacctgtgagattgtgaccttggaccgggacagcagccagcctcggaggacgatcgcccggcagaccgcccgctgtgcgtgtagaaaggggcagatcgccggcaccacgagagcccggcccgcctgtgtggacgcaagaatcatcaagaccaagcagtggtgtgacatgcttccgtgtctggagggggaaggctgcgacttgttaatcaaccggtcaggctggacgtgcacgcagcccggcgggaggataaagaccaccacggtctcctgacaaacacagcccctgaggggccccgggagtggccttggctccctggagagcccacgtctcagccacagttctccactcgcctcggacttcacccgttctctgccgcccgcccactccgtttccctgtggtccgtgaaggacggcctcaggccttggcatcctgagcttcggtctgtccagccgacccgaggaggccggactcagacacataggcggggggcggcacctggcatcagcaatacgcagtctgtgggagcccggccgcgcccagcccccgccgaccgtggcgttggccctgctgtcctcagaggaggaggaggaggaggcagctccggcagccacagaaggctgcagcccagcccgcctgagacacgacgcctgccccaggggactgtcaggcacagaagcggcctcctcccgtgccccagactgtccgaattgcttttattttcttatactttcagtatactccatagaccaaagagcaaaatctatctgaacctggacgcaccctcactgtcagggtccctggggtcgcttgtgcgggcgggagggcaatggtggcagagacatgctggtggccccggcggagcggagagggcggccgtggtggaggcctccaccccaggagcaccccgcgcaccctcggaggacgggcttcggctgcgcggaggccgtggcacacctgcgggaggcagcgacggcccccacgcagacgccgggaacgcaggccgctttattcctctgtacttagatcaacttgaccgtactaaaatccctttctgttttaaccagttaaacatgcctcttctacagctccatttttgatagttggataatccagtatctgccaagagcatgttgggtctcccgtgactgctgcctcatcgataccccatttagctccagaaagcaaagaaaactcgagtaacacttgtttgaaagagatcattaaatgtattttgcaaagcctaaa

SEQ ID NO: 1091 - DNA, 1902 bp, Homo sapiens
  source 1..1902: mol_type = genomic DNA
cgcgcagcccctccggccgcgggcgcagcgggggcgctggtggagctgcgaagggccaggtccggcgggcggggcggcggctggcactggctccggactctgcccggccagggcggcggctccagccgggagggcgacgtggagcggccacgtggagcggcccgggggaggctggcggcgggaggcgaggcgcgggcggcgcagcagccaggagcgcccacggagctggacccccagagccgcgcggcgccgcagcagttccaggaaggatgttacctttgacgatgacagtgttaatcctgctgctgctccccacgggtcaggctgccccaaaggatggagtcacaaggccagactctgaagtgcagcatcagctcctgcccaaccccttccagccaggccaggagcagctcggacttctgcagagctacctaaagggactaggaaggacagaagtgcaactggagcatctgagccgggagcaggttctcctctacctctttgccctccatgactatgaccagagtggacagctggatggcctggagctgctgtccatgttgacagctgctctggcccctggagctgccaactctcctaccaccaacccggtgatcttgatagtggacaaagtgctcgagacccaggacctgaatggggatgggctcatgacccctgctgagctcatcaacttcccgggagtagccctcaggcacgtggagcccggagagccccttgctccatctcctcaggagccacaagctgttggaaggcagtccctattagctaaaagcccattaagacaagaaacacaggaagcccctggtcccagagaagaagcaaagggccaggtagaggccagaagggagtctttggatcctgtccaggagcctgggggccaggcagaggctgatggagatgttccagggcccagaggggaagctgagggccaggcagaggctaaaggagatgcccctgggcccagaggggaagctgggggccaggcagaggctgaaggagatgcccccgggcccagaggggaagctgggggccaggcagaggctgaaggagatgcccccgggcccagaggggaagctgggggccaggcagaggccagggagaatggagaggaggccaaggaacttccaggggaaacactggagtctaagaacacccaaaatgactttgaggtgcacattgttcaagtggagaatgatgagatctagatcttgaagatacaggtaccccacgaagtctcagtgccagaacataagccctgaagtgggcaggggaaatgtacgctgggacaaggaccatctctgtgccccctgcctggtcccagtaggtatcaggtctttctgtgcagctcagggagaccctaagttaaggggcagattaccaataaagaactgaatgaattcatccccccggccacctctctacccgtccagcctgcccagaccctctcagaggaacggggttggggaccgaaaggacagggatgccgcctgcccagtgtttctgggcctcacggtgctccggcagcagagcgcatggtgctagccatggccggctgcagaggacccagtgaggaaagctcagtctatccctgggccccaaaccctcaccggttccccctcacctggtgttcagacaccccatgctctcctgcagctcagggcaggtgaccccatccccagtaatattaatcatcactagaactttttgagagccttgtacacatcaggcatcatgctgggcattttatatatgattttatcctcacaataattctgtagccaagcagaattggttccatttgacagatgaagaaattgaggcagattgcgttaagtgctgtaccctaaggtgatatgcagctaattaaatggcagattttaa

SEQ ID NO: 1092 - DNA, 1575 bp, Homo sapiens
  source 1..1575: mol_type = genomic DNA
ctcacacgggcgcgcgcagcccctccggccgcgggcgcagcgggggcgctggtggagctgcgaagggccaggtccggcgggcggggcggcggctggcactggctccggactctgcccggccagggcggcggctccagccgggagggcgacgtggagcggccacgtggagcggcccgggggaggctggcggcgggaggcgaggcgcgggcggcgcagcagccaggagcgcccacggagctggacccccagagccgcgcggcgccgcagcagttccaggaaggatgttacctttgacgatgacagtgttaatcctgctgctgctccccacgggtcaggctgccccaaaggatggagtcacaaggccagactctgaagtgcagcatcagctcctgcccaaccccttccagccaggccaggagcagctcggacttctgcagagctacctaaagggactaggaaggacagaagtgcaactggagcatctgagccgggagcaggttctcctctacctctttgccctccatgactatgaccagagtggacagctggatggcctggagctgctgtccatgttgacagctgctctggcccctggagctgccaactctcctaccaccaacccgggcaacctggacgccaggctggatggaggggagaaggcgatgcagccgcaatggtagtctccatggtgtgtgaggagccggcacctgctctcacacgatgccatcaaagccctgcaggccacacttcttgccggccacctggcacccgaatctcagtgcttcctgcacgctcctccctggaggaggggcaagtagctaggtcagccaggtgtttggggcagggacaggtcccagtccttttcccctcctgctgccatactcaccctgggagaggctgaagatgacggaggcattgaaggtgtctccagctcccagtgtatccaccacgcggggtggcgggaaagcatccgagtggagcaatttgccatcagggcccagggcgtcggcgccctcctcagcccaggcacagacaagcacagccctgcaagacggctccactcagctgggtgttagcccaccccgtccccccagccatcctcccagctccagggcggactcctggagtccaggctcatcctgtaccttctaaagccccttcctggcttccccggctcaccctttcctcacacgaccatacaagcccctcaaggcttcctctgctgactggaaccccaagtgcttggccacatctttgctgacaaacacctgtgggcagtggaagagaagctggtggtcacttctaactcgtcattcaccaacagcagcctagcgttgcccccattacaacacgactcccccaacatgtccacatagatccccaacgtagcatctcactgtcccacgggaacgtggttttcttttttctttattttttgtgaagatggtctccctgaggctggtcttgaactcctggccccatatgatcttcctgcctcagcctcccaaaatttctgggattacaggtgtgagtcactgcacctggccagaagcatatttttatcgatgcttatat

SEQ ID NO: 1093 - DNA, 4975 bp, Homo sapiens
  source 1..4975: mol_type = genomic DNA
ggctatcctactgcagctggctgcatcagatgtgccaggcctgccctctagctcccaacaccatctgcctgatctaagctttgccatgttgttgtcactgctgggtgcctgtgctgtggtggggccattccatggccctgagtgggagccagtgcagggcctgctctcccagaatcacagctgcagggaccctcagtgctgtggcaacctgcttgtcctctgcctctttctggtctggcaggtccggcactgttggcaccaggtcaccaggacccgcttcagcacaaggaatgtcatcaaggtgccactgcagaagcgggcagtgccctccatgaggtgcgaaactgtcttcaagctgactcctgaattcttcagtcctggaaagtccaggggcctagattctcaacaatgcgcacaaaggcagagatggggataccggaggagcctccaggaatcatgggcccagaacctgctctctccacagcacccatgtccaggcccaccttcgggtgtccacacccactctgagcccatcttttgtaccacctccatttcaaacacctgtttactgcctcagaacagttcctggaaagcatggcaggtgccttggtgtctccatgatggtcagactcgccctgccttggacatgtgtcaagagatggagcagctgctgcttcactcacaggaaaggttggtgtcactggagcctgtcatcagtgtgaggtctcgccccacctccatgaccttaaccacctctcttccaaacttactttcagctgagaggctgcagttctgcccccagagagctcctgcctgatccttcccaccaaacactgagaatgtgcacttggaagtcttggcactgtcgaccagaggcctgggaaccagggggtaaaaaccagaaagcaggcagagaggatagtagagagacccaggctccaaggtgggtgaaccagacagggagcagacgggaggatgcttcagaaatccaggcatctggggagtagttcccagtagactttggaatggagggtgatgcagagactaacgtgttggagtgtgcaaaccagagactagtaataagtgaaactgatggcgagatcttgacaccagggtgggacacccaggaccggatgggagttgagagtagaaccaacattcaggaactagggaatagaaaccagagggaggctggaggtgagaatctccctgaaacccaggcacatatgggagagaaccaagaacagttaagatgtaaaattgatgcagagacccaaacacctgagtgggagaaccaggataagaatggaagtgaggatgctgtggagacccagacatttgagaagaaggacaagaaagaggctggagaggaggatggggaagagatccaggctcaaggattggggaagcaaggccagactggagatgagaatggtgaggagacccagacaccacagtgggagaaacaagatcagatgaaaggtgatgcggatgtggaaattcagatggaagaggggagaaacaaggatcaggttggaggtcaggatgctgcacaaacccaatcatgtgggagggagaacgtgggagaagtaaaaaaagagaatagtgtagagacccaggccttggattggggaaaacaggaatgtgttggaaatgggaatgttacagagatccagacaccaaggtgggagaagcatgatcaaggtggaagtaagaaagctaagaagacccaagcatctgggggagagaaccagaaacaattaagtcatgaaattcaagtggggtggggaaataagggcctgagaagagatgaagatgctaaggaaacccagatagctaccaagaagaagctcagggagataagagaaggattgggtggtgatccaggcactatggtggggaaaccggagacaagtagcaagtgaaatttatagagaatttgagatactatgttgggagaatcagaactggattggaggtgaacatagagcagaaattcaggcatcagagaagagagaccaaagaaaggatggatgtgaggatggcacaaatatcctggcacccgaggctgagatccaggaacaattaaaaggtgaaactgatgtggagactcagagcaatgagccacttagagaagaggatggtacagacattcagtcactagggaggagagaggttaaaggtgaggatgataaagacacccaggaacttgggaggaaaaatcagggtcagttaggaaatgaatttagtggaaagattcacataccaaaggggaagaatcaggaacatattagaggcgaagatggtgcacatacccagatatctgagtcagggaactggggcaaattaacaagtcaaattgatggagaaatgcattcagcagaatggaagaaagatcagcagattggaggtgagaatggggcagaaattcagatacaagggaagagaaacctgagagaagttggaggtgaggacggtgtaaagacctgggcacctgggaaagaaacccagagtcagtttagaagtgatcttggtagaaagatccttttatcagagtggaagagccagaagcagatgggaagtgagaatggaacagaaattcaggctccagtggagagaaaccagagagaacctggaggtgaggacggtgtaaagactcagagacctaagagagagaacgaggaccagttagatagtgaaattggagggagccattcaccagggaggaggaactgggagctgattggaaaggatgttgcagaaaatcaggcatcagagaagagaaaccagagagaggttggaaacgaggacggtagaatgatctggaggcttaggggaaaaaactggaggcttagagcgaagaaacagactgttaaaaagtaaagataatggaaagacccgtttatcagagtggaagaaccaggaacagggtggaggtgggaatgatgaagaaattcaaatacaggggaagagaaacctgagagggaccacagctgatgatggtacagagacccaggctcctgcaggagatgaccagggacagttaagagttgaaattgctgaagagatccaggtacaagggcaaggaaataagaatgacggtggagttgaggatgttgcagaactccaggatataggaagccagagaaagtgcacagatgaggatgttggagagcctcgagcaccaaggggaggaaacaaggatctggtcagaggagaggatgctgtgagggacagtctccaagtcgactgttctgggagtgagaggcccacaggcaggaagcacagcctaccatggcctccagccttcactggctatggatgtgggacccgggaacaggaacaggcagtggctgtgaatggtttcatctctgccccctgtcctgagatgaatcctgtcccccactggggtgaagtcttcctgctggtgggtggggagggagagcatctggccagccagggcacaacccctgccagggatcatagagtggggatcagtccagcctcccagcaggcccaacctgaatcctggagaagacgacaaagggacaaaggggtggatccagagaaggcccccagcctgactcggcagtcccaaaaccctccgtctctgacagctcccttgggcatgccctctgcctgctcctgtctcccgtgtggcccagccccggaagctgccatcattctagcgggtcctcccaccgccctcactgtcctgcccaaggggacaggcctcaagaagagcaaacgactgctcctggagtccctcatgcggaggaggattgcacacctgaagtggggtcttccccggcggatcctggagtcctatttcctgtttaacttcttaggatcttgctcattgacccttgctggggcgaggctctctggactgaacacaggccaggagctccaagcccagcaggaaaggtattgtgaggcccaaggctccccaccaggccttaagtccccagagaggttccagagggttcagcgcccagacagaaaaagctcgaaacttcctatacaagccagagctctggagaggaacagaccgcacatgtcagagcccattaagcatttccatccagcctgaaaaggccaggagagtcaggccaccagggggcgccagagaaccacaggagatccaggaagcgcttgctaggaccaagctcccagctcccaggacccccaggccggcagcggagtccaggagctggtgtggcccacaaagggtcggagagcctcccagtgagaacagtaggggcaggaaaatgatcaggtcaagggtctcccagctggcagagagggctcccagcagagtgaggacttcattctctagggcagaccacgcccactggaggaaggaatgtacatcctgggaggcctctaagctccccagactcaaatgccagcagctcacatactggagaagaggaagcctggaatctacagggtgcagaggggctgggcagcagccttcctgccattctgcagaacctgtcagcttcaaagggaggctccactctgcggtggcaaagctgggcctgacccttctggccaagatgtcctggtccccacagctcgccaagcgcaagcacttggcccctaacctgagcctgagggaacctgattctactctgcctcccaaagtgggtgatcctcgtgcaggggaggacagcatcggagatcacactgcttcacagagggatcttcagctgcaaggtcactgctgtactggggccacccttcctaagacagagagtccccagggccaggaggcacctgggaacccaaatggggctccacagaatacacgagcctccaaaaagtttagtattatgaagcatctgaatttttttctcttccagaatggctttaaaaagtagactcaggcccagagtcctcaggacatatcagaaaagctttgagagtgtcctgatccctgcaaagcctctaataaattggtcatttgggc

SEQ ID NO: 1094 - DNA, 2922 bp, Homo sapiens
  source 1..2922: mol_type = genomic DNA
gctcaggaacccaaacctgtcgggcaggttttgagagctgtggagagagggacagaggctggagaaggatgtatggcctgccctgggcttgtctgttccctcctgagcctgagccccttaccttcctgaccccatgaagcacacactggctctgctggctcccctgctgggcctgggcctggggctggccctgagtcagctggctgcaggggccacagactgcaagttccttggcccggcagagcacctgacattcaccccagcagccagggcccggtggctggcccctcgagttcgtgcgccaggactcctggactccctctatggcaccgtgcgccgcttcctctcggtggtgcagctcaatcctttcccttcagagttggtaaaggccctactgaatgagctggcctccgtgaaggtgaatgaggtggtgcggtacgaggcgggctacgtggtatgcgctgtgatcgcgggcctctacctgctgctggtgcccactgccgggctttgcttctgctgctgccgctgccaccggcgctgcgggggacgagtgaagacagagcacaaggcgctggcctgtgagcgcgcggccctcatggtcttcctgctgctgaccaccctcttgctgctgattggtgtggtctgtgcctttgtcaccaaccagcgcacgcatgaacagatgggccccagcatcgaggccatgcctgagaccctgctcagcctctggggcctggtctctgatgtcccccaagagctgcaggccgtggcacagcaattctccctgccccaggagcaagtctcagaggagctggatggtgttggtgtgagcattgggagcgcgatccacactcagctcaggagctccgtgtaccccttgctggcggccgtgggcagtttgggccaggtcctgcaggtctccgtgcaccacctgcaaaccttgaatgctacagtggtagagctgcaggccgggcagcaggacctggagccagccatccgggaacaccgggaccgcctccttgagctgctgcaggaggccaggtgccagggagattgtgcaggggccctgagctgggcccgcaccctggagctgggtgctgacttcagccaggtgccctctgtggaccatgtcctgcaccagctaaaaggtgtccccgaggccaacttctccagcatggtccaggaggagaacagcaccttcaacgcccttccagccctggctgccatgcagacatccagcgtggtgcaagagctgaagaaggcagtggcccagcagccggaaggggtgaggacactggctgaagggttcccgggcttggaggcagcttcccgctgggcccaggcactgcaggaggtggaggagagcagccgcccctacctgcaggaggtgcagagatacgagacctacaggtggatcgtgggctgcgtgctgtgctccgtggtcctattcgtggtgctctgcaacctgctgggcctcaatctgggcatctggggcctgtctgccagggacgaccccagccacccagaagccaagggcgaggctggagcccgcttcctcatggcaggtgtgggcctcagcttcctctttgctgcacccctcatcctcctggtgttcgccaccttcctggtgggtggcaacgtgcagacgctggtgtgccagagctgggagaacggcgagctctttgagtttgcagacaccccagggaacctgcccccgtccatgaacctgtcgcaacttcttggcctgaggaagaacatcagcatccaccaagcctatcagcagtgcaaggaaggggcagcgctctggacagtcctgcagctcaacgactcctacgacctggaggagcacctggatatcaaccagtataccaacaagctacggcaggagttgcagagcctgaaagtagacacacagagcctggacctgctgagctcagccgcccgccgggacctggaggccctgcagagcagtgggcttcagcgcatccactaccccgacttcctcgttcagatccagaggcccgtggtgaagaccagcatggagcagctggcccaggagctgcaaggactggcccaggcccaagacaattctgtgctggggcagcggctgcaggaggaggcccaaggactcagaaaccttcaccaggagaaggtcgtcccccagcagagccttgtggcaaagctcaacctcagcgtcagggccctggagtcctctgccccgaatctccagctggagacctcagatgtcctagccaatgtcacctacctgaaaggagagctgcctgcctgggcagccaggatcctgaggaatgtgagtgagtgtttcctggcccgggagatgggctacttctcccagtacgtggcctgggtgagagaggaggtgactcagcgcattgccacctgccagcccctctccggagccctggacaacagccgtgtgatcctgtgtgacatgatggctgacccctggaatgccttctggttctgcctggcatggtgcaccttcttcctgatccccagcatcatctttgccgtcaagacctccaaatacttccgtcctatccggaaacgcctcagctccaccagctctgaggagactcagctcttccacatcccccgggttacctccctgaagctgtagggccttgtggagacggggttttgccatgttgcccaggctggaagtgtctatgtttaactgcatcttataaaccagcaacaagttttctactgggaattagaatggtgcatacacaatgtattattatcactgtcagatgagcatgcttgaatgtagcatgactgcctctttttgcttttcctagaggttttttttttgcttgttactcatctgttgacctacctgggggaagtagcacccttgcatttcaaaaataaaattgatggcattacaaatggaataga

SEQ ID NO: 1095 - DNA, 1745 bp, Homo sapiens
  source 1..1745: mol_type = genomic DNA
acacactggggctcctctgcccgtgtcctgcctggggactcaggaatcgggatctccctccctgctgggccctcttgaactcacagctccaggaaactgggagactcatccctggtgttccagggagtctctgctgcccaccatctctgccccccagggcccaggagccaccatgtggcgatgtccactggggctactgctgttgctgccgctggctggccacttggctctgggtgcccagcagggtcgtgggcgccgggagctagcaccgggtctgcacctgcggggcatccgggacgcgggaggccggtactgccaggagcaggacctgtgctgccgcggccgtgccgacgactgtgccctgccctacctgggcgccatctgttactgtgacctcttctgcaaccgcacggtctccgactgctgcccctttcccccgatccaaggatgtatgcatggaggtcgtatctatccagtcttgggaacgtactgggacaactgtaaccgttgcacctgccaggagaacaggcagtggcagtgtgaccaagaaccatgcctggtggatccagacatgatcaaagccatcaaccagggcaactatggctggcaggctgggaaccacagcgccttctggggcatgaccctggatgagggcattcgctaccgcctgggcaccatccgcccatcttcctcggtcatgaacatgcatgaaatttatacagtgctgaacccaggggaggtgcttcccacagccttcgaggcctctgagaagtggcccaacctgattcatgagcctcttgaccaaggcaactgtgcaggctcctgggccttctccacagcagctgtggcatccgatcgtgtctcaatccattctctgggacacatgacgcctgtcctgtcgccccagaacctgctgtcttgtgacacccaccagcagcagggctgccgcggtgggcgtctcgatggtgcctggtggttcctgcgtcgccgaggggtggtgtctgaccactgctaccccttctcgggccgtgaacgagacgaggctggccctgcgcccccctgtatgatgcacagccgagccatgggtcggggcaagcgccaggccactgcccactgccccaacagctatgttaataacaatgacatctaccaggtcactcctgtctaccgcctcggctccaacgacaaggagatcatgaaggagctgatggagaatggccctgtccaagccctcatggaggtgcatgaggacttcttcctatacaagggaggcatctacagccacacgccagtgagccttgggaggccagagagataccgccggcatgggacccactcagtcaagatcacagggtgaggggcgtgtgggcagagggggtttgggacagcagggtttgtgctaggggctctggagcctgccttgggttcttacaacctctctaaaaagccaggactgctctcatcatttcaatagggagaaaactgagactcagaaagagaaaggacttgccctgggtcgaattgaaggttgggagcctctgaaggcttttttaggaactgttccttccttacattgggataaaataactccaatatgaagagagcctcaagagtttctcaacctctccccacctcagcacctgtcccagctctgcctgacccaccgagtgacctgggaggtcgctcccctggcctcagtttccctatccgatttagggaatatagatgttaggatcactgacttc

SEQ ID NO: 1096 - DNA, 405 bp, Homo sapiens
  source 1..405: mol_type = genomic DNA
atggccgcagccctggcgctcgtggcgggggtcctgtcgggggcggtgctgcccctctggagcgcgcttccgcaatataaaaagaaaatcacagacaggtgcttccaccactctgagtgctacagtggctgctgcctcatggacttggactccggtggagccttctgtgcccccagggccagaataaccatgatctgcttgccccagaccaagggagctaccaacatcatctgcccttgccggatgggcttgacgtgcatatccaaggacttgatgtgttcccgccggtgccatatgatttagaggaagatgcaggctggtcactgctcccttggggccataggccctggttgccaccaacttgctccaaatccagctcctgagacattaaagtcacttcctgtc

SEQ ID NO: 1097 - DNA, 1242 bp, Homo sapiens
  source 1..1242: mol_type = genomic DNA
ggagctccggctgcgtcttcccgcagcgctacccgccatgcgcctgccgcgccgggccgcgctggggctcctgccgcttctgctgctgctgccgcccgcgccggaggccgccaagaagccgacgccctgccaccggtgccgggggctggtggacaagtttaaccaggggatggtggacaccgcaaagaagaactttggcggcgggaacacggcttgggaggaaaagacgctgtccaagtacgagtccagcgagattcgcctgctggagatcctggaggggctgtgcgagagcagcgacttcgaatgcaatcagatgctagaggcgcaggaggagcacctggaggcctggtggctgcagctgaagagcgaatatcctgacttattcgagtggttttgtgtgaagacactgaaagtgtgctgctctccaggaacctacggtcccgactgtctcgcatgccagggcggatcccagaggccctgcagcgggaatggccactgcagcggagatgggagcagacagggcgacgggtcctgccggtgccacatggggtaccagggcccgctgtgcactgactgcatggacggctacttcagctcgctccggaacgagacccacagcatctgcacagcctgtgacgagtcctgcaagacgtgctcgggcctgaccaacagagactgcggcgagtgtgaagtgggctgggtgctggacgagggcgcctgtgtggagtgtgactccagctgtgtgggctgcacaggggaaggcccaggaaactgtaaagagtgtatctctggctacgcgagggagcacggacagtgtgcagatgtggacgagtgctcactagcagaaaaaacctgtgtgaggaaaaacgaaaactgctacaatactccagggagctacgtctgtgtgtgtcctgacggcttcgaagaaacggaagatgcctgtgtgccgccggcagaggctgaagccacagaaggagaaagcccgacacagctgccctcccgcgaagacctgtaatgtgccggacttaccctttaaattattcagaaggatgtcccgtggaaaatgtggccctgaggatgccgtctcctgcagtggacagcggcggggagaggctgcctgctctctaacggttgattctcatttgtcccttaaacagctgcatttcttggttgttcttaaacagacttgtatattttgatacagttctttgtaataaaattgaccattgtaggtaatcagga

SEQ ID NO: 1098 - DNA, 1373 bp, Homo sapiens
  source 1..1373: mol_type = genomic DNA
cgcgggagcgcggcccctccgaggtccgcccgcggccggggagctgcctggcacccgcggcttccaaaggggaaagaaagttgcgcccgcgccaggcgcagcgcgctcggcggacgcggcctttcgggcgaaagttaggaggggccgggctggcgggcgggcgggttccgggggctcctttccgcaccagcggcggtcgctccccgtgggcgggacctcgggcgtgatcgtcgaggagaccgcggctccctcacctgccggcttgttcctcggggtccgcggagcgagcccagctctcggcgcgtgtcggagtctcccagccccgcggccccgagcgcacgatgcgcggacccgggcaccccctcctcctggggctgctgctggtgctgggggcggcggggcgcggccgggggggcgcggagccccgggagccggcggacggacaggcgctgctgcggctggtggtggaactcgtccaggagctgcggaagcaccactcggcggagcacaagggcctgcagctcctcgggcgggactgcgccctgggccgcgcggaggcggcggggctggggccttcgccggagcagcgagtggaaattgttcctcgagatctgaggatgaaggacaagtttctaaaacaccttacaggccctctttattttagtccaaagtgcagcaaacacttccatagactttatcacaacaccagagactgcaccattcctgcatactataaaagatgcgccaggcttcttacccggctggctgtcagtccagtgtgcatggaggataagcagtgagcagaccgtacaggagcagcacaccaggagccatgagaagtgccttggaaaccaacagggaaacagaactatctttatacacatcccctcatggacaagagatttatttttgcagacagactcttccataagtcctttgagttttgtatgttgttgacagtttgcagatatatattcgataaatcagtgtacttgacagtgttatctgtcacttatttaaaaaaaaaacacaaaaggaatgctccacatttgacgtgtagtgctataaaacacagaatatttcattgtcttcattaggtgaaatcgcaaaaaatatttctttagaaacataagcagaatcttaaagtatattttcatataacataatttgatattctgtattactttcactgttaaattctcagagtattatttggaacggcatgaaaaattaaaatttcggtcatgttttagagacagtggagtgtaaatctgtggctaattctgttggtcgtttgtattataaatgtaaaatagtattccagctattgtgcaatatgtaaatagtgtaaataaacacaagtaataaatgaa

(The sequence listing continues in the following parts.)
